United States Patent Application Publication US 2011/0014706 A2 - sequence listing, part 18

SEQ ID NO: 34182 - DNA, 2090 bp, Arabidopsis thaliana landsberg
tgcccatgctaacacacctccctgatcctagggaaacgagtcaccatgtggatgagccacctgttgaacccaccggcgactggttcttcccctcggcacaaccggtccaccccccaccttacgttgtcccctccccttcccgctggcatgtggacctgccccgtggtgccgtttttgtgccatccccacgtcgtcccacatcatggattgggtgggtcgtgcccgtgcacactccctcgcccacgcccggttaggctaaattcacccccgcggcccacttaaccaagaaaagccttttctttttccttttcccattttcatttttcacaaattcatttacacatgtgttttttgatattttatgcactaataatggtccaagcactttataagtcacctaaaataatgataataaaaacatgacacacttttcttagcaagacaatggattgatgtattgtttattaattgtttttgctagaggaagcagtgaccgatgttccaaaagccctaggtccagaagaaggccaggagccctagcttcaacgaaggcaagtccatccttcccttgatgcataaattacctattctctctaccactgcctaggccgggaattatgggggaatattgcattgtgagtgagagatggcccgcattaacatatacattctagatacgaaatgtggattgggaagaagggcaatgtgtttctccaaataaagtctctttttgaaaagttttgcgatgaagggtactcaccctcatcaccctgggagtgggatgatcagggactccctggtttaggggagggcctagggtgttggctcagctggtttaggcgtgacgagaaggattgtccctcatataaggaccggcttgtcattttcactacctgtactcctttatcgtacaaccactcaagactgtgtggacagtcactcaatctgaactcgtacggtccaaccccagggttatgaaggctggggagcaccgggaggataaggagggggaatgttttgtccggtttggacatggcggtggcctgactccttccggtataaccgttaaggttaggacgtgcggggaaggaaagagattcggattcggatctcattggccatgagatcgcagagctggactagtgggtaaagtgtacccctctgctcagagttcaaacctattcgaatagtctgtgtccacaggaatggacgagtctgctgtggtatgacaattaatgttttgttttccaaaaaaaagagatgattttgagaaaagtggtttttaaaaggtccggcggttgagccgtgagctatggtggacgagaagtccagtagctgtttttgaaaatgaaaaccagtgggaaactgttgagatacctggatggtttagtccaggggattttgttataatactgaaaaacttcctgctccttttggagaggatgcgctttgcaaaaatacaaaatgtttttcaaaacaactctgcataaaatattgctgtttctgcaaaatatcctgagcttcacatattccatgcattatatctgatttccccattccgcgggtgaaggtgggctactgagtacgtttgtactcacccttgcttatttgttgtttttcagaaaaaggagatcgggtaagagttacgactgttcccaaccttgcatgtggctgttggaccgctgaattgcttcactgcgtatatcgggctgcttcagccccactctgatgatatgtcccaagttgtggaccaactcttaaagttgttcgccacctttataggtttgtctcgtttaagcagatctggaatcatctgatgtataaatgtgtttactagcctcctgggactagtaattgtatcacatttgagtcccagaggatcgggacgcttcaggtggtatcagagctgttaggttgaccgcaggacataacccttagcctgatcaaaagtttttgagtccaaactattttcttaaaaaaatcttgctctcatcccttcatttcaaaaatgctttccccctttccttctctcagaagtcagatggaggttcgctgccaaaccagcttttgctagaaggaagttggtttcc

SEQ ID NO: 34183 - DNA, 706 bp, Arabidopsis thaliana landsberg
atgtggacaatacaagagcgtttctactcaactctctgttactttctgaccttacacacactaacacactcatgtgacacactgacgcatatttatcaatttacacgtatatatattggtatatatgtaacgtaaatatatatgagacttgcttttcgcttgtgtatattaataagctcttgttttgccaaaaatacatgaaagccggtatgttttattgtgcatcgcaagcatcgaccgctacggctaacggcgaacgtaccgtcaccgctcgagccatcgaccgtcataacccgattatcaaagatggtcgtagatctttcacggcaccgtgttcctccggagacgactacgttgctccctaccgtcagctttcgaaaattacgagagtaccctcctcctccggcgatggaaagagtgttcaggtagataaaggacggagaagcaattcagggtcgttgatgaagctgattagctatgacgtcagcttagcgaggaagagttttggctgtgttgttgcaacacccaaaactcctcctggttcaactaggtatcttctgggatccgaccctgtttctttagccgggtctacgggtcaggatacggttgcaacggaggaaagtgaagcttctgcgccaaaaagaggctcttctggtcccgtagaagagaagaagaagtcttctggttcaggttcagaccaggcaag

SEQ ID NO: 34184 - DNA, 1843 bp, Arabidopsis thaliana landsberg
acagtttggaatgatttggtggacatgattactgaatttggcccagatgatgtcggtttcatgtcttgaatgcttttgtgtctcttacttctcttccctttatctcattcctatgaactcagtatattactctcttcttttttttggtaatggctttatatctcctattatctacgatcgccttctcagtaaagtcagttgttatcgcttgaggtcacttgttaaattttatcataattcaggcctaactcaaaattaactcatccatatcaattgattaactcagccacaacattataataactcagtcgtatcaatagattaacgccttctcagtaaagtcagttgttatcgcttaaggtcacttgttaaattttatcataattcaggcgtaactcaaaattaactcagccatataaattgattaactcagccacaccattataataactcagtcgtatcaatagattaacgcagacacaacaaagaataactcagtcatagcgtttgattaactcagtcacaacattaccagtataactcagtcaacgcgttgttaaaatctcagctataatattagcttaactcagcaataacattatattaactcagccacaacattggattagcttggccgaacacaaagttccatttcattgcaagctaatatttgaaccaaaaaaacgaattaaccctagacgctgagataaacatcaatcacataatggattccaaaagcaaacaattcatccaaacatcaaacaaactagtagccaagaagaagcctctgttccttggtttttgggaacattaagataccaagtacaatgacaatgataataaagccaagacaaaagcagcaaagtttgatcatcaatttccatttctggttttccctttcgctcctcatcacttcttccttcagttctttcaccatcacctgtaacgcttctagctcgacagcaacctcggacttggctgcgtttatctcactgtccatggcggacaatttcggccaactgtctacgaccacttcgtatgtaccatcttcaatccatttaaacaaatggtcctgcatattcaatcacaaatcaattaacaacgaaaccaataaaatcctcaaatcaattacatctttacgcgtaggacaacggaagtatggtcttccacggttctttgctggcgtcaatgtatagatgaccacgtctaatccgcaatgacacttcgatggtaaccgacgtccccaacggctgacggattgtgtactcgcaatcgaattctcagaattgctactcatttctttaatttttagttgggaaattcggagacgaaaagcaagaaggaatgcagctccagatctgaaatcagaaattggaattttaaaacttagggtttgattttggggatttataagtgtgtccgtgttcatttggtttttgtcacaacgacgtcgtatctggtaaataatagagactctggaacaaaccgacgtcgtatctggtcaataacggagactatttttctctgtattctgacctaactcagctacatcacaggcataactcagccatcactttgttataactcggccaaaccctgaaattgcttttcttaagccatcagttgggacaatcaagtaactaacatatcataatcacattccaactagtggaatcatgaaactagctcatattctatatacttcatccaacatcctactttatccaacatcatactctatccaacaaaagggaagtcgcaacaacatcagtcgtagaagtttggtcaacatagtttatcaatcgacacttagtgcattgtgtctttattttctgtttggata

SEQ ID NO: 34185 - DNA, 932 bp, Arabidopsis thaliana landsberg
tggcggtgtgatctagtgcttcaccactcttgtagctagttgacaatatatttaaacacatacataaacctcataccgtgattaatgtgacgttgaatattgacgtgctcgataaaggataatatgtcatttgcaaactaagattcataatacactttcttgattaagatcggttaagaagaaaataatcttaatgttgttttcaaaaaggtccaaaagaaaacgaatcatgtctgaccaaggaaaatagtacaattttatagaccaaattagtcttatgatttagcttatcacttatcagatatctgtttagaaaatgaaattaaaatcttactgatctttactaatcaaaagcggcaactagaactgagccacattgagtcattgacccttttaaagacgactatccgatatggcccttcaaatacattttagccttttggatcaccaagatgagatgaaatcatactttaagaaatggattatgtcacataacttggttaattaaactataactgtcggagttaggtcaattcttattttaattattcactcattttattttcctcgcacaaatccacacatagtggttgatttgtggtatgattggatcacacctgcaaaacaagatcaccgatattcattaacaagtttggctaaacttttatgacattgtgagttcgaattcgaccaccaaataaatatattaacaacaaaaaagggctgaatcatatcttttgttcgtggaaataaacacaagcatacttccttggcattaattacttttatttaaaccacctatcgaaactattcaagaacttgaacaaaatgtttcataaagaacgtaaatttaaaatgatgtgctaacgtgggatggatctctctacttgatggactcttcacaccttattgacagacgattggtcttttaa

SEQ ID NO: 34186 - DNA, 1339 bp, Arabidopsis thaliana landsberg
ggatcatatattatataattaacggtgagataagataaatcatatgtagtgttatgggaaagaagaacacaattgtgaaggcacccggaaagaagcccaaaatattctagaattgtggacagaaacaaaaacaaacaaagaaacacaactactatatgaggaaattaatatttagttggtttgatggaacgaatagtgtctgaatgttttctcttccaaagagataatgtcaacaaagaaaaagtcacaaaaaacttcttaaacgttacaaagactccaataaatcaaatagttgatttgttgttgtttgagacatcgtaggccatctcatgttcatctttcgatacactgaacttgtttaaacccaacaagttggatcgacctggtggtgtttggagttccaagttggaaataagatgaacgatggatcggatcagttcacttaatactaatcggttttaaattgaaaacacataattcttattagtcatactcatcaatgttcatgattagagaaagatcgtagatcctcgtcctgttttagtgaccagattttgtttcatgtgggaaatatgtttttaattagggaaaagtttcaagtcgttgcttgtgaatgtaacaaggtcggaactcggtctcaaatttatatgagccaatcaatagtaaacattattatcgaaggagcaaattccctcctttttggattttagttgaatccggaacatatatatatctcgaacatgattcttggtttttttaatttatatcttgtccaatctcatttccatcacaagtttaatcaagggaaaaatgaaaccagatttcttttatggttaatgggttaacttttggttgggccccctaaaccaatggagaacgagttaaagcgaattaagaaggaatgttagtcatagtattgaaaaaaaaatgaacgataagtacaaaagaagataagttccagaaaataaagaagtacaaaaaggaaagcataaggttgaaaggtgagtggctcaattattacaactttattaattagggcaaacactaaaaattcgtagcccgagaagaagtgaaagagacaagagagaagagaccggtggtgatggtcacgacggcgacgatggtaggaccgccgcacgtggcctgccttacccatgtctccatttgaccagtcaacgtacttcttctctaattattggagttcttcagtacatatctaaaggactaacaggtttattaattcaagttcaacttattaacatgactcttcttttgacaacaccgttctaatataataaggtattacaaaaaaaaaaaaaaaattgaaataaattgggta

SEQ ID NO: 34187 - DNA, 3047 bp, Arabidopsis thaliana landsberg
  unsure (1)..(3047): unsure at all n locations
tgaccagagaacttagaaaacctataacttgatgaatttttaataaaaagttgccaaactaattttgttagctcctgaatattatgaactatcatttaaaaatgatgaaccctatgctttctgttctgaatttttgagattaaaattaaaaacagaaacccaccaaaccttgtttaattaaggaaaattagtttttcttctgtgctgaacttaagaaaatttgtagatgttcaaacctcatttagacactgtttaaaaatagtaggaaccctagcattggaaaatatgatgtagatattcatttaaagctattttgcccaaaacttagaaaaaaccagaaaggcattagaaattaatggacagtgattaatattacttttcctagtttacttatgtaacagagaacctaggaaaaatatagagaccattaatttggaccagtttcaaattaaaatgatttgtttagccttatatagactaaaaatcaattattaaagaggcaaaactataaccaaaatgaataataaaaatccagtggacttataaccaccagagccccactacaaaaatacagagcaccccagcccaactttttaagtaaggaaaataaatacaaagtgataataaggcatttttcaactaaatcatgaacaacccctattaatgtgataatgggcaaccaaaaattagctaagtccatgatgagataaactaccagagaaaaatgcaaacccatgaaaaagaagcaaactcataccaattgccaataatttaagagaaaggccacttaattcaaataatgcataccaccacttcccttaagcaaaaagttaccaaacttcaaactgattgctcttgcataaagaagaagataggaaaaattagaaatctattgtttgatatttttcaaatatagtggaagtagaaagcacctctttggctagaaaatttagaaaatcataacaaaataactaataagtattagtggctaaacatttgtacaaagtcatgttataacatctacatgccagcaaaaatatgtcttagaaaataacccactattaaaaatgagttgcagttcaaaacaccaaaatggacttaccaattagcttaactaagcttgaccctaatttgctaagtgtaccccaaaaatcttcagtagtaagaataagccctacctttttaaattgatcatcccccatcaaatcttaattgtaattgcatatcatggcatacatatatctcactcattgcattcattagattgcaacctcgttgacggagagtacgtgctcattcccgagcaaggagctgtccacgaggaagactaggagctagctcccgagtctgccacagaggatcttcccgcagctccagcatttgaaggcaagacccggttttatgcataaccaatttatatatgctactttactacacttaaatgtttgtaggcttgtaatgtgcacttaagtgcaggagttgcttgaaacccttagttgcatgaactcaggattcctttttgagatggatactagtatgctaggtcgagtagctggtttgctatttaggatctcggtagaagtcgagtgatttttctagcactcgcgcgaggtcaggaattgattgttcccaatttccatatcgtactgatgtggttttttggccacaatccatggggattggttgttcacgggataaaaattttgaataaggattaaggtgtggtaccgtgagtcaagcgtttgaacgtactaaacacatgccgagaaatatggtaaatcggtaagcctagtacctgattgaacctggctgtagactttgcccctcacgcgacctgagacgtggtctcccattccggttatggtgggtacaagtgcggtcactgcacgacggcagtcggggttagtgaggcattgtacgccaaggcagtgagccctgatctgctgacggggaatcgatggggacggttgatgtgtgtggggacggagtgcccctgcatgtcgtgtgtttaggtttaccttgcaaggataaaaactcgattcgaatcgtctgcttctcgcagctaatcagactgcttgatccatgctgctacattgagtaacaagtggaaatatgatgagatgatacaagatgttgattgctaaaaatgtttgctactatgtatgagtagatagtatatatttagccttaagagagtcacacttaaattgcaaagttaaaacttgatttagaaactcagctagtgcttttggcaaccaaaccccacagccaaacagatgcatgtctagaggtagaggagtagactcctcacaccgggtaagtctagctgagtattagtatactcagccttgcttgtggcataatttttacaagatcattggaggacatggttgttggagtgacttggtcgtccatcttgcctccgggttggactgtcgagtgggaccccgcctcggctgaggaggagcatgaggagtgatgggacggacttccccatccctccatttatctatcgttagttttattccgctgcacttcgaacaatgatgactaattttgcaaaacttcgatggtgatgtaataatttaatattccttaatgtatggttttacgttttattgtatttgctctgtgactcaccatcgagtgagattgtggtacttgatcctgtcagtggcctcgtcggactagatccgagggattgacgggttattcccatttaagtgtggtctagcctctaaggtggaacctaggcacctaagtcggaataattcgggcagttccgccacaatacatttcgacctgaggacctctctatactctagcagttatgcctccccgcttgccccttccgggtaaggtaatctctccctagctttcctaattacttggccaacggatcccattccacccttgtggtagcaaagttttcccgggtggttctccatgttccagtgaacaatatgatcttatcatgaacaataattanacagcaacataattggaacatgatcataataaaacattagtttcgaaaaccaggtaga

SEQ ID NO: 34188 - DNA, 1333 bp, Arabidopsis thaliana landsberg
aaacccctagtgcatgagcatcttgcatagcttagataagcattgtcatcgcatatacaacgtgttatgttaattcttctctgggtactagtgtgtcttttgttgtactcttttacactatagcatcccagagactttataaacgaatgattcgtcgtatggataaaccatcctagctcgaccgtactgtatcctctagcatgaagcttttgcggatcagatttattagacaaatattctgccttgtttgtcaagaaggcaactttgcaccctctcgttatggtgttttctattgtgacaccaacaatctgttgaatactaccgccgcgcatgtatgcattgcagcatccaataccattgcagcttgtttcatccataatgctgtcatccatactgctgtcctcatgacaatactggtggtcaccatcgtaattctgaccactcaagtctgcaagataatctttgctatgcctttggggttttgcgctccagcttgatgtgcattgcactgtgctaggctacacatttgtcaccgatgccgtgctgttgcaaccaaccgataccacttcattgggctggctaacataaaaaggggtccccatcaaattcaaaagtgacccaagctcttctacattgattgagcactccttcgaggctattgggttaataatgctaacggaccggcatggattgttatatctagaacccctgccttcattcggaagagagatacccacaacttccttgttgatcacggaaagataagggacgagctttccagaagtagaggtattacaagtaatttcgtaccacttctccagataacaaccctttcccattccaaagggatacgggatctcgattcctccacagtcggattgacataaagaaactgtacgatccgcagaatctagagtaaaacagagttgcaaagagaagagaatccaaagagaaaaactattataagaactcatgtttatgatttgctcaagagaacttgttctttcctgaatatttttgttttttaaagcagacaattttttgtaagaagaggtagattagaaagattccgtttacttggacagcaattaagtctcaagtcttcgtcttttgtcttttatcttttgtctttctcaatcaagactagtaagaaatgcctttatggctatatgtgttcgtaggcctactgaaacaatctcgcttcttccatcttttgaattttcttcctccattatttgcaagataaatttaaaaaaaaaaaaaaaaaagagtaccgatataaagttgtagaccgttttagagaatttaaaatttttgaactggacaatacttt

SEQ ID NO: 34189 - DNA, 1107 bp, Arabidopsis thaliana landsberg
tcacgaaatggataccaaaacgttataaaatacatttattctcaaaacatttcactcttatttggtaccattttaaatattttgggatttcttactgcttttttttatccgttataaagcttgtattattttgtgtcaccaatcgaatatgtgaaaaagttaattaattttaaaaaatttaatagtaatttattaaaatattatttcagacaagtagaagaaaaaatcagtcaaaagttaataattatactcgcaccctatttatttatatatatgtttggtgaaaagttaaaaataccgaaaagttagaaatgataaggttaatgtaagagacagacaaaacatattaaagagaaacatgtctccagttacgtcaaacatcaccatcttcatatttattgtcctcttaggtgttgaatatttttccaaaaggttaagataaatccagagaaattctagagactaggaatggtttttctgaacatagcagcttcaattctgcttcttgtttctcacatgcctctgtttggtttaactgattgaaataaaactacacactgtgtcataatttattcataccgggtcagtttcataccgggtttaatctactcaattatagccggtcaatttcggtttccttgtcatgtaagtgaaaaatctactgctactagatatactaatatagctactacaatggttacaccagagttagggggttctagaataatctgatttccttcaagaaaactagactatagtttttgtaaattgagtttactcagaaattttatctgtaaaaaatgtacattgaattgttgaacaaaatttttaaacagaaatttggaaaactcggttataccaaattgaatgaagaatcatgtgaaacatatcatacttctctggcttagcatgccacagaaaatgcttttgaactttcttcactctcatctgcattgaccggtaccggctttccggtatcgacatcagaatcttcttcaaattcgggatatctttctccggtataaaaatcgcaaatgattcccaattcaaaacctcgaaaaatggcgggacaaagttatcagatatgatgaccggaacacaatcata

SEQ ID NO: 34190 - DNA, 649 bp, Arabidopsis thaliana landsberg
aaagagatgtcttttgcttgtactgatcagtgaagatttatcatattacgacgtgacacggagactaaggtgacggactagctataactggtgttcccttcaatgagaacacagaaacctaaagctctgaatcataaattgaagatcaaaacaattaatttgtagacacgttaaccaagacaattaagccatctacggtggtccatagcatatactaatatactagtactatttaagatcgtcttttcttgatcacaatttggatatcgtcgtaagataatgttggaaccatttgacatgctgcatcaaggtaatctccaaactgtaaaaccagcttctttaatgtctttgcgcttcccatgacaagttttatgagcgaatccacatgtttcatctttgcagatgtctgctccacagttggaaagaccctatatttcgatatccagctttgatgcaggatctcatgcctcgcaatttcaagtgtctgccacgatgcttatacggtctacataaaaacagaatgctcacgcaaactactaggcgtggtctgcgattgtacaaaaattcccacatctatctagctttgcccaaaaggtgctaggtacggttcttaaaaaagattttctctgataaaagataccggtgtggt

SEQ ID NO: 34191 - DNA, 1353 bp, Arabidopsis thaliana landsberg
  unsure (1)..(1353): unsure at all n locations
atatctatagatcaaatatgccttacgagcattttatgaatcgcaacattgcttttatattctctgatctgcagcattttgaatactttgcaggaatttgtttcatgtcaaacgatatggtaagatcatttttatccctaaatcttactttccatcttcccccttagcatcctacttgatagcaacttatgaaaaacctttggataaatgcaaatgggtgatgcaatgtttgagcagcctaggtacgtggttaatcgagtgacagcaggagactatgactgcccaagaaaggtgatgaatttcttgacagatcttcatgcagcctttcgcatgctcaatctcaggaacgatttcctgcgcaagaaattcgacagtaagtcatacatatctctaactgctcttctttctccatttgcgatggttacataaaaaaaaatcgattttgacatgtgacaggtatgaagtacgacctaagaagagtggaagaagtttactatgatgtcaagatccgaggtttgatttccggcggagatcctcctggcgtccaagcagtccaaggccaatcctaaatgtcctcggctctttttaagtttttatgtataactttgtttagctagcatgaaaacgtcaaggagtgttcttctctaaaccaaaaacggcaaggaaaatagagagactgtagtttttaggtgtagtttgcaattactgaaaacggcaagtattccttttgtgggccttgaaagcccacattttagtcacaactttactgttatccgaagtcagcagcttaatagtttaacagtagatgttcatgaacaccaccctgccatcgatgcggacttgaaacgcacgttatatttgacggtgtctttcgtcattttggatttcaaaactaaataaatgagcttttggaatccgaaacaaagacaaaaaaacaaaatccaagtctaacagtcgccatttcccctcctgcgtcagtgttcttcgtctcctctcgtcgtctctctttggtatcttttttcttagcttcgagtactattcttttcgctgacattgtgttagattctctcttgaacttgaacgatctcttttccaacacaaatgtaatgtatgatatcgttcgattttttctcggattgttagtttcttcaaattgcaggtgtttagttaaaggaaggggataagctaagcagctggattttcttttcatttcttttttttcttccctggaaagagatatttttattattattttctaatggaacagctgtgagtcgtctctatggcccacattatacnngatattctttatggttnttttttttttttttctatattgcatttgcattttga

SEQ ID NO: 34192 - DNA, 404 bp, Arabidopsis thaliana landsberg
gcacgacaagatgggagatgcaaagatagatattaaaccatttctggaggttcacaaaatgggtttgcaagaacttccagatggaacagagatcaagagagttgtgcccaacagagaaaactgtttggctgaagcgagcagtatcgtctccaataatggcaaaatcgttcagaacatgattcttctgttgaggaatgtcgaatgcggcgaggtagagattcagcttgaatggattaatattccaggttctagagggctttgaacatatctctttctgtgtgtaataaaaaaaaactcagttcgttttggggttttaagacaaaagtcacaataagtagaacagagcactactctgctttgtaattgaaatatttggatttagtttctaccctaaatcgtttcgg

SEQ ID NO: 34193 - DNA, 1666 bp, Arabidopsis thaliana landsberg
  unsure (1)..(1666): unsure at all n locations
aacacagagggctacactaatacccaacacaccccaatgtctatgtactcacgcattgaagaataaacgaccatagaaacacacacaagtttgttttgccccaaatattaaactaagaatttagggaatgttgacattgtaaaacagagaaatgggtgtatggattaccatggcaacaaaaaatgaagagagattgagctggtctcgttcttcaggctgactcacatgtcaaaggcaggcattgcaaactgagtagcaaaagcttcgacttggttccgaagatctgcaatctctttacagtgatagatgcttttgagcggttccttttgcaacttcccgtgttccctttgtgcagcactagctatctgagcagctctatatagaaaatcagccattgtctcaaattctggttctaaacaacctcttgaggtcatagccggactgcctgatacatgagcccattgtcaagaatcagacaacaagaaaaaagaactcaaagcacactgagtttcattctaagtccaaagtgttgagatttccttgagaatttaatttgcttacctattctcactcctccaggggaaataacaccgttttcgctgaaaatggccactttgttgaccgtgatatggcacatctcgcaaactttctcatacaccttgcctgaaaaaatcacaaggcggaagatttgagtcgtctttggacacacagctacaccatatgcatggtacagacgtcaaaaaagtgagactttgattttggtaaattagacatataagtttagttacaatctcaaacaatttttataatagatttcagactgatcattggccatcaagctagtaatgtaggctatccacaacctagagagatgagaaaaaagagatacgctaagaaactcagccattgtctcaaatagctggtaaaattttgctatagacccatgacacatggttaagcagatctaacaccatggaaaatcagacacagttgcaatgctgccaatagcttatgtaaggcaatgaatcacatagtgcgagtaatttccttatctgccaagaataagaggaactaatcacatacctgtcaagcccaaaggagtcagatcccagagaagcaaatgattatcggtgccacctgttatcagcttgcactttctgcttatcaaagcagatgctaaagccttagcattttttttgacctgtcgcatgtaaagcttgtactctggtgaagcggcctgcttgagggcaatggctagagcagctatatggttattgtgaggccccccttgcaacgatggaaagacagaaaagttgattttttcttcaaaatcatactggatattgctctcacagtgattaagatttatgctttgcttcttgggcttcaagcctctcctgtaaaatatgatgccgcccctagggccacggagagacttgtgtgttgttgaggtaacaatatcgcaataatcgaatggatntggactttcctacaacattgacagaaaccaaaacgtcaagagaatgcaaagaaaagtaggcttaataaatatcactgagtaaacacaaagatcatgtgcttaagcttcaagttaatgacaaacaatccataacgcattatggaaaacgagaaagacattccttggcagcgacaagaccactaatct

SEQ ID NO: 34194 - DNA, 968 bp, Arabidopsis thaliana landsberg
agtcataggtgcagaacttgaggtaattgctcattgtcctacaatatttcaggattgtggtttgcagttgtgaagaaattgatctttgaccatttgcagagtttgaaggagaggttggggctagttgcgcgttcacatggtcaaatttcttctgatggtaatgatactaactaaatctcagatcccttttttgtctcctagttgtggcttttgttctcgtcgcgcatgtgttgatgttatctgctaatattaagggaacatagtcgggacatgtaacatgtttgtattatcatcccaagttcactctgagccatttagcagttaaacttgtccctttcctaatggaaaaatacttgtctttcttatcctttgcagttgaaaacatttactaccaggtacggtctgcctcatcttttggatatgatgatatactacaagctacgaattcattttatctgatcaagtttcattttcacctgaaaaaggttccttttgaagaggttcctgaccttgtagctagtcggagagtattattacagaaagggtttgcctttgtagctggtactcaggtaagtaatgctttctatttcaatttgaaacaaaacttctcttatgtagatagtagtgtctctttcgtttaactcatatttgcttatgtctttgagcagttggtttcccttgttgtcacacaatttcgatctcatctatcaaaggccctcattctaacaaacaggttattctggtttatatgaatatttaaaagttcttctcatatatgtcacaccttagtaacaagattttctttttgtttgcagaaagtggacaactaccattcgagaacgagaaaaagacagactaactccagtaagcacggacctgaaatcaatcaactgcttaatttcatgtcccatgtttgcttaacttatcattgctctcattcagatcgtagaagcgttatctacaagcta

SEQ ID NO: 34195 - DNA, 384 bp, Arabidopsis thaliana landsberg
agttttaactttacctaattaatattataaacactgggatggtgttagaaagaaaaaaaagaaattcacaaaatattttgtcaacaatttttttacgaaaaatataattgattttgtctaatatgttacgctaaccaagacatgtaataatttgtgttagtgtttcattatatctgatataatgtaagttgtttacttcagtataacaccataacaattatgcttttctacattgaaaataaaatcagatgccgtcgtatgcaaaagtttcttattttattgaagtggcacggctatgtaacagagttatgctttggtttttttaagatatatgcagaaagttaaatatagtaaccataacatatagcctaattattttatgat

SEQ ID NO: 34196 - DNA, 6110 bp, Arabidopsis thaliana landsberg
  unsure (1)..(6110): unsure at all n locations
cgcctttcattttcctctgaaggataagaaagagacgtaggacttcatgtataaggtagtgatttatccttctttctcttaaaaatctctcttttcttctcatactaaacgattcttgtgctaggtcgtcgacaaacatcgccgtttgtgcaatgagagggagcgtttgggcctcaaaaggtagacgctcgaggcccgaatctcttgtgtggaaaagaaggtgagagcaatggaaagtgactcctttcagtgggagtgaaggaacttcacctgcgtggctaagatcccaaccatgatccggatgtatcttcgtgctcgaggtcaggtttctggtcccgtgaatgctcctatcgaggtgatcccatccgagagcgaggacgaggaggaggaggaggacagcaacccctggaagcgggtgaagaatgacttcgaggcagaagtcaagaacgaagcatccacttcaaaccctgaactggcgatgaaggaggctgttcctgagcctcttccttaaatgtttgtgagaccctgtcccgggacgcggtccttacaatgtcccccaaactcaaatactttctctctctctttttttattttgtttggacttattatggcttcgacccatttttatttaaggaagctttcctatttctcttgatttcgaaatatttatttcggagctatgctatgaatgcagggcggactggacggcgtgaatgttccgcgaatcactccgacctcaaatgggatcacatccttgaagggctatgaagacccctataaatggtcaccctaatttccctttattttcatctaactcttttctcttcttgcagtcatgtcactcaatctttgatgttggatccatgccaaacttctctagagtcggaatgattgacgaagacattccaaacgtgccggacagaggacgttctccaccttgtggtttcttcagatcccaaatccgcgctccatgtgcgctgatcaaggacctttcagaagagaccatgaaatcgcgatggccttcatcaaagctctcgcggctcaacacgagaagtgttcttcagaaaataagaaactttgaaagaagatcaatcagatgctacgaagggtcactgtgatatcaagggagcttcatacccttaactcccatcccagggattggattgaactcagaatctccgagtttggtcgcatcccggactttatgatgcccattcttgacctcgccggccaaggagttcaagtgttttgcaagacaacaagagtttcctagttcgaagtgctcgcatgttgagactttgacgtttttactttaccgcttttgaataaatataattttgtttcttatctttgtacgttcgcacagccgaacttctttgccttgttcgttcgtagagtcgaactcctttttttttaaataaatttttttttatttattaatagctaaactcgtttccgagctgcctacgtacgcattttgggagcaagccacaccgtagttcatgtaaaaaaacacgtgttactttaaccataaaatttctttaagttcaccactttccaaggacgttggactggcctgtcttctatcggcctttaatctgtaaacaccattccagaccatttcggtaacaatgtagggaccttcccaatcaatgccgagcttgcctgctccttcttccttcttgttatcaaacacacgctttagaacgtagtcacccacaaagaatggtctgcttttgatttttgaattgtaatatcgagctgctgcctgttaataattctgaattcgcattaaggcttgatctcgcctctcgttgatgatgtctaacgaggcgtctagcatcgctgaattttcatcttcatttaaagcagcttctgttcgacgaagtccaggcaccttgagttcggctggaacaactgtctccattccgtataccagcgagaatggggtttctccggtcgatcgtctaggagtcgtgcgatacgcccataaaacaggttgaagctcatcataccatcctcctttcaaatgatttaaacgctttttaagattgcttagaattgtcttgttcgcggtttcggcttgaccatttccttgtggatatcgcggagtagagtaactaactttaattctccaatccgaacagaaagcctcaaactcatgtgagataaactgtgctccgttgtcactaactatctcgtacgggacgccgtgtcgacatatgatatttttccaaacaaaggtttttaccgctgagtcattgatgtttacgtatgcttcgatctcaatccactttgaaaagtaattagttaaaatcaagagatattgtacacctcgggttgacttgtccaatgatatccatcgaccatctcataaacgggtatggggcagaaatagaagagaataactatgtaggttgatggatgagaggtgcgtggagttggcaacgtttacaccgctgggcgtacttaacacaatccgtgatcatagtaggccaataataccccattcttttaatcttgaaagccatagcccttcctgaagaatgagtgccacataaaccttagtgcacttcgttcataacgatctcgacttcgggtccacaaatgcatagtagataaggatctgacacctcgtctatacaaagcatccttcaatagataaaatttcgcgctaacgattctcattttcctagcttgccatttattctttgggagctcgcctgtcacgatgtaatgctgtattggctccctccaatcagccccccaatctttagcaggaatttcgtggtttcatgaaatatccgtgtttccggttcggggtgctcgtttggttcaaggatatccacttggaccaacgggtcagtttcagcttctataatcttttctggaaccgtgtcttctattgtattggcgggttcttcgatgttactttcttttggcgtagcgggtttatgtacttctaccttctttgattttcttctcttaacaggtagcagttcgatctcgggttcaccacgatcccgtgccgcagctcgagaccttgtattgacgaaggtttctttttcctccttaatgctcgctctgaaatgcattctaccaaaaatactctttttacttcaggatctgatgttgatgctagggctgcaagtgcacccgcaaaagtattctctcctctttgcatgcgaatgaattagaattttttgatattcttagccaaatctttaactacttcaagatatgcttccatccttgaatctttaccttcataatctccattgaactgataacaaccagctgcgaatcacaataagcaaccacttcgtcagctccaactccttgtgccaacctgagccctacaattaaggcctcgtattctgcttcattgttagaagcagtgaataataaagggaatgactgctcaaagacctccgaggtgggtgactccaatttgatccccactccggatccttgtttccgacgaagatccatctacatgtaacttccaaatttgattctctggttgcttttgtgtgcccaataccggcaattctgttaaaaagtcagccaaaacttgagccttcatggcgactcggctcttgtactctatatcatactcacttaactctaccgcccacttcgccaacctcccggattggttcgggctatggagaattgttcagagcggttgatttgataacacttcgattggatgagattgaaaatacgagcgaagcttccaagctgaagttactactgcaagtgcaagcttttccatcatggtatacatggtctccggatctgtcatggatttgcttatgtagtaaatttttttctgctctccccggtcttctcggatcaagagcccgctaactgcatggcccgagaccaagacgtatagatagagcttctcatccgcctctggtttggacaatataggtggagtggtcagatatgctttaaactgtccgaaagcttcttcacacttctcgtcccaaagaaattctttgtttccctttaaaatttgataaaannnnnnnnnnnnnnnnnncgatcttgaaataaaacgatttaatgccgcaatttgaccggtcaaccgctgcacttccttgaaatttcttggagacggcatgttgagaaaggcattaatttggttcggatttgcttcaattcctcgttttgtaacaatataacaaaggaattcttccctggatgagactccaaacgtacacttcgccgaatttagcttcattagatattggttaagaatcacgaagcattcctctagatgtttaacatggtcttccttcttcagagacttaactagtatatcatcgatgtagacttccattgtctctccgaggtatgcgttgaacattttgttaacaagtcattgataagttgctcctgcgttctttaaactgaaaggcattaccttataacaatagatgcccctatccttgatgaatgacgttttcttttgattttcaggattcatcattatctgattatatcctgaaaaagcatccatgaaagtcagcaattcattcccggtggttgactccacgagacgatctatgtgtgggagtgggaagctatcttttggacaagctttgttgaggatctgtaaagtcaatgcacactctatcctttccattcttctgtttgactacaatggtgtttgctaaccaatctggatattgtacctcccttatagatccaattttcagaagtttttccacttcgtcatttactgcttttgctctctccactccgagttttcttctcttttnnnnnnnnnnnnnnnnnnntgggtctacattcaaatcgtgacaaattatatttggatctatgccgggcatatctgctaccgaccaggcaaatgatttcttgttccgccttaacagctcgattaaagcttcttttatttcgccggataaagtagctccaatccgcacgttccgatccggtttatctgcttctagaattacttcgaccacaacatcgtccactttttgcccgctaggaaacctcgggactactcctttctttgcgggcttagttaattgctattggattttcaatcggtggctagctaaataacaagtttctcgaggcttcttggtctccccgaattgtttccactccgtttggagttgggaatttgaggcagtgatgatccgtagaggggaccgctttcattaggtagatccacgaagttccaaggatgatgttataagctgctggtttatcaaagacgaaaaaatctacaatcttcgacatctttcccgccaaaactggtagcttgattgttccgagagacattgctgatttacttgtgaaagctactaaaggggatggcggtcctaccacatctgccctgcttatccccatcctttccaaagtgctaagaaaaattagatctaccgaactaccagtatcgatgaggattcttgaaacctcgaaattagctacatccagcgtaattactagagcatcatcgtgaggtctttcgaggtgctgtgtttccttttcttcgaatgatattgaagcgccttgaaaatctacctcttcacttaaacttgacttaaggggaacattccgtctatgttttcttattgcgctgatggaatcacggcaaagtttggaacctccaagaattacgttgattttaccttttgaacttcttggttcttcttcgcaagccggtcttggtcacttagagttttgagcctcggaattatcctttgactcatggtattgtttaacgaaatcctccatgttgaatttcgaaagatctccacttgcccatagttctacaagatgccttttaagaacactacaatctttggtcagatgtccggtgactctatgtatatcacaatacaagctttcatctcgaacccaagtatttgaccttccttttccctgaaactgctttcgaacgttattgttgaatggttgtgaaccaaacttccttggtcctcggttctcccgaggttcgaacttcttgggtgcaaaagtcactgctggttttgcttgcttatttctcttaacaaacaattccttttcatctacgacttccatccaattgttcgctcggaatggcg

SEQ ID NO: 34197 - DNA, 1865 bp, Arabidopsis thaliana landsberg
agaatttgctctatataacagcttttaggcttatatttaagcttttatataaaagccctttcttcacaaatcttagtttaagatttggctaagataccatcaataatggtggtcttacacgctttttttttatatgatatgtttttacatacttctcatatacatataaaatttatatgatattgatactacttggtatgaccgtatgatgtaggcaagcaaagcagctttagtaaaattctttgaaacattaagagttgagatcagtcccgatatcaaaataacaatcgctcttcccggatttatatctacggatatgaccactcctcagtttaaagaaatggtcagtgataactttcttgtacataattttataccttatatatatgacattaacgatgttatgtgtaatgttttttgtgctttgttgaaaattagtatggttcagatttcatactttcggaatcagtgagtcgatgcgcaaaagcgatcttcagaggtattggtagaggagagacatacgtcatagagccatcttggataaaatggatctttttgataaaaaatgtatgtcctgagatcgttgactacttactcgactatatatttgttagttatctaaaaccttatttcaagcgtgattgatcatatcgatctatccaaaatctataatctttttaataagggttgtgtacttgtcttcctatgatgactatttttcaataaaatgtataatggttgtttcgtttggtctttggaagacgcatttcgtgtcgtcattcaccaaggtttttaaccgcaaatatttgacatttgacacctttaaataagaaaagaaaaagtaacttgatcatagaaaatctcattagcttaaatagatgtcatttagacattttgatccaagatctcatcagtactgatcatattggattattgacgtttatgagtcctaaaccaaaaacaaagctattgtatatgtaacatgttattagttattgacatagtatggtctagcatttgttcgagtcttgtagtagaagaatgacacggcatggaaaatatatcaggatcgagtataattggccaccccttagaaggtcatgtgcttgtcccgtgcttaaggttagaaaccatatggacatagttctttcgatggtttgcaccagctctagatcaggggttcgaggatgcgtaagaaatggttcatggaaagtgagactagtgtcctcgtttaaaacagtaccatattcttagttctatttcggtttaccacatttttagtgtaacaagttgaaattaagaatgaaagcaagatcttgaactggttcattaaggtctcttatagatgaaaaaaacttcgatagacaaaaaccacctcagaactatcaaaacccaagaaacaaggttgcaaacaaaaatgtaggaccagaaacgataaaatacattcttttgaagcggttttggaacaagtgtctaagagtcagcaatagtgacctcgacctcaacaccgggctcaatggtgatagacgtgatttgcttaacaacgtcaggggagctgaagagatcgatgacacgcttgtgaaccctgagctcaaacctgtcccaagtattggtacctaatacaaaaacccaccatgaaacagtgtcaagaaaagacattcgatgcaatacttgagtttagcaacatttgaagaatgtagaagcagagaggatgaaatgagagttaccttcaccacaaggagcctttctggtagtgatcttaagaaccttagtgggcattctcacagctcccttaactctaagtctcttgaccttagcaccacggaccaaatcagtgcacactaatcaaacaaaagcatcacaga

SEQ ID NO: 34198 - DNA, 1839 bp, Arabidopsis thaliana landsberg
  unsure (1)..(1839): unsure at all n locations
aaccgaaaggaaaaaacattagtaacttaacatcaatagacctaattgatctgggtgatgtaaaaaggtaaaatattcgaatgattgcggcggttagaatggacaaaaccggtgcggaccaactttgagactacttttacattgaaagaaattggatctcgatagattattgttcgctataaaagaaaatggtttaatccgttttgcccaccacattcattcaaaaccaaaatatttggataaacaataaaaaaatcataagcaataacaaaataatatacgatatgaaaaaataatgataaaagacaaatggtggcatcggttccgattttgttattgttaacaatcaaaacgaaatagttttatcgtgaagttttttgttaatctaacatttaaaattataaaatctacaaattaaaaattccaaaactttcaaatgtgagtcccatttttttgaatctcgagacattttccacaatgtttttcaagtaggatgggacattttaccaattatataactaaacaaaataattggaataattataaaaagagtactatattcgaagaaggagcaaagtccaagaacagagctttcaaaaaattgttgtacttcccaacggatctctgacgtttggtccagagccgacgacgacccacaactgaaaccaagagctatctctttttcctcttctctctctccttctctacctgcgttcgtgcttaaacaatgatctccctgaatctatctccttccctcaatccgggtctcctccacaagacccggacctgtcaacaaccgacccgtctctctgctcttctcgtcaccaaccctaaacccttcaatcacagacacccactagggctttcaccgattcccaatctccagattcgtgatgtttccgcaaaacccttgctttcactcacaaaccctgaatcctcatctgggttctcgagaaaacccagatccatcgccgccgttggctcatcggattcaaatccagacgaaaaatccgatcttggtgaagcggagaagaaagagaagaaggctaagactcttcagctagggattgtgtttggtctttggtatttccagaacatcgtcttcaacatcttcaacaaaaaggcactcaatgtctttccttatccatggcttctcgcttcgtttcagctcttcgcaggttctatttggatgcttgtcttatggtcctttaagctttacccctgccctaaaatctccaagccttttatcattgctctccttggtcctgcattgttccacactattggacatatctcagcttgtgtctcattctccaaagtcgctgtttcgttcactcatgttatcaaatcagcagagcctgtcttctctgttatcttctcgtctttactcggtgattcgtatccgttagctgtctggttatcgattcttccgattgttatgggttgttctttagctgcagtcactgaagtgtcattcaatttaggtggattatcaggagctatgattagtaacgttggttttgtcttgagaaacatttactctaaacgtagcttacagagctttaaagagattgatggattgaatctatacggttgcatcagtatactctctctgctttatctgtttcccgtggcgattttcgttgaaggatcacattgggttccaggttaccataaagccattgcatctgttgggacaccatcaacgttctacttttgggttttgctctctggtgtcttctatcatctgtacaaccagtcttcttaccaggcactcgacgagatcagtccattgactntctcttgtgggaacacgatgaagcgagtcgggtgattatc

SEQ ID NO: 34199 - DNA, 763 bp, Arabidopsis thaliana landsberg
atatatatccgcataagaccattctccatacaagataaaatgtaataaaccatgcaatatgaaaaggaacgcgttactacggtcacgcgaggaaaaaggaacgcgacagtcgaagctacggtcgagaagatatcacgtttacactaaataaatattaactataacatttaatttgacattatcaaatataaatattatacgccatttagttcgattaatctgctacactaacaaatgtcagttaattaaataatttaattaaaacaagagatcctaagcgagatgaattttatgacgcgtgaaacagcacgacagcgtgaaaacgacgcacggacacgcgcgacatagcacgctgacgacatacaaaaatagcgcgtgcgacgagcgcgaatgcgcacgaaccagcacgcgaccacgagctcatcacgcacgaacaacgcgcagacaacacgtgaacgacgcgcaaaacagcacgcgaccaggacgagtaaaaatgggtttgcaacgcgttatatcaaataactggccatctacagctagcaaacaacacgaccaacgaatactactaggttgtgattaaacgcgcaaaactatatttctaagttgattttagtccatataaattattgcgcataatattttagataaactgaattatcaattagtcaatgattaatcaagaattaatttataagcatgaacaattatagtgaaatgattaactcatgcgcgcggacagcgtgtgattcacgcgaacgacaca

SEQ ID NO: 34200 - DNA, 595 bp, Arabidopsis thaliana landsberg
  unsure (1)..(595): unsure at all n locations
ttttaattagtgtgtttaaaccatttccaatctggggatacgcagcagaattgaataggcaaaccacttcctttgtgaaatgaagcggaaaaacagcccacggcctcccaggatctnnnnnnnnnnnnnnnnnnnnnnnnnntctaagagcccaaccaaacaattttaaatcaaaaagaccaagaccacccaattctttagggcgagtgactttactccaagccaagtataagattgaaatcagcagcggatggctgcgggacaaaggataaaggagggtcaagattggccagcaagcatcattaagaggaggtccaagttccaacgcactgatgttcccaactcttcccgaaaccagcagcaataaactcaccaatatgaccataactccgtcatacgagatgcaaagaaggtgattaaggacatgttggaaagatcaggaagtctactttcaaatgagctagtcctcactgtcagattcaaagcgagcaaatcagaatagtccaggagaagtcgagccatccaacctgggttgtaggctgtgttcctttagagcccactcaggggcgcgccccctttagggtttccacccaaa

SEQ ID NO: 34201 - DNA, 682 bp, Arabidopsis thaliana landsberg
actctactaccatcttttttgccatctatttttatacatctttcatttgagttattgattttgaaatccgggttctagaataagattaagtgagcagtcctgtaagtagtaactactgacatattaaaacaagaagaagaaagaatcacaaaaagttcattgtgttgattaagcaagtgtacacaaaatagaatagtcaaaacccccaattgattgagcttggataatattaaatactagatttaaaataaaattattaatagaaaaattaaatattttgtttatataattaagttacttatggtagaaaagcttttaatatctaaggtttggcaagactaaatgtaagagtgtgagtgatggacagtgggtttacaagcgagaatatataagatttgtataatcttttacttgttgataacatattttgttagaattattatatagaaatcataaaaataatatattggataaaattgaaaattctcacttgaaataaacaataacgtatttttaaaagaggtttggatatttattaagttgaatcaaaactcattagtcaatcttttcataaaatttaataagagtgtatttactatttagtcatgttttcatcacttaatcagaaacgaatgtattttgccacgtgtatccgtattattggttcgatgacatgtaattc

SEQ ID NO: 34202 - DNA, 1149 bp, Arabidopsis thaliana landsberg
cttaaaagttgtaaaattagtataggaactgaaaggaaggtgtttttgacgtatacaaccatttttgtttgatccaaaatctaaatgtttgagaacttatgtgagatctacatatacatttttgcagttactttgtgaaataaatcataaagttgagacttatttacaattcaatgccactgacattaaatcttttttttttcaaaaatctcaaaagaatattactcttaacaatattgccataaattctctcaaaattaactacacgtgtattcaaatatcaaatccaagatttgcgtcgtcatttacttgctaatcaaactaacaatttcgattatccatattaattactctaaataaggcataatcatggcatattccaaaaaagaaactaatagtttataagattttgtcactaatatctttctaaacggaatattttttggctatcaaatatgaccctaattagttttgcttataaatacactgcacctaagagtggtttaccatcactaaacacaaaactacattctttgctttaacacattctttttttgttgcgattttttcctactcacttttctttctttaagagtataatctaaaatataatgatttttatttttgtatcaaaaaacactatacttaagagttgttaattttaagttttttggtagcgagctatatattgttacgttggttacaaactatttgtgacctctaaattcaaaaaagaaaaataatttatttcttcactaaatcaaaactgaatgaactttatattaacgttcctataaaccttaaatatagtaattgtacactaaatgatatatagatataagagttgtacatttttaaaatatgtataagtaggttatatatatagttaatctattaaacaaattaattttgattttttctgaaagatatcgcggattaaaatctagttcatatataaattggctgaaacatattttcaaatttaaatgctaacagattttatgtaattgttgccgtaagtgctaaaagatttttttttttttttctggtgagggtaaatgctaaaggattatgtagcctaataaagtgatttgaatcaatagcagccatatgtgaaacggtcaaagcattcgatggttttgttggttt

SEQ ID NO: 34203 - DNA, 1451 bp, Arabidopsis thaliana landsberg
acatctctgtacactgcatagaagcaacactgagtatatgttatatgtatattacgcataaagaaatgatctgtggaaaaggttctctatattcagccaaatgcaccaattatctagagcctatgagaacgacaaatccagcttatagacttggtgaaagaggcacataaattttgactcttaagatctttcaagtttcaagactactttgtaggccaatttcatcaccattaacaggcctcaccaatctttgagctcttattcctcatcaacttgaatagccttatggcataatattgtcaattccttcaaacatgtaactacactatctctggaataccaaccatcatttactgtcactgtttctttactgaactccaaaatcaactaacataacatctatcagcagtccaagtcaaagaatagtaagctgttcaagaattggcgagctctgttcacagtataatgaatctgacaaaattatgttcgctcacacaacaacatacacatataagaatatgaaaatgaccttggtctgtaaagaactcttgaacaaccacttgaatcatattcgtaatccacaaagaagtgaaacactaagcactaattatcaaagataaattacttacaagaggttcccatctggtaggcatctcctgcaatgaagaaaaaaaattgaaagaagcaattagagaaattccataaactagtgattacctcggaatacaaacaataagatcttagacttataagcagccagaaacattatgccaatttcaagcatcaccatcaccgttcaaaattgatgttcaccaaaaacaaagtgtttgattttcatttcacatcaagaaaatttaacatttgagtgaaaaaaaccgaagaatgataaccattcattgcaaacaaacttcaacaaacaccgaaaattcttgtaaatttctagattatttgggatctaactaatgaaatcgagggtataatcctgatgaaatgtaggcagaggacagagagattgtaatagagagacagatatctaacatgaagccttcttctcggatcatcctcatgaaaccgccgagacctttctctataatcgcctacaacgcactcttctacaccgtcaaagccatcgacttccgctatcgctctctctctctcggaatcgggatctgatttcgttgtctgaactcccaagggacatgatgactattgctaaacgcatagacctgtatttgttgggctacgctttgtgtatacctgggccacttgctcgctatggccttccccatgatgatgtatcttacaagtatccgaatatacattttgtactatgattgggcatatcaagaactacaggatttaggtgtgctttgcccactatcctcacagcattcgatcatacattgatgcggttgttattgtgatttctcagtgaatcagaagagatgatg

SEQ ID NO: 34204 - DNA, 2726 bp, Arabidopsis thaliana landsberg
tactccttttaatcttggttaaattttgtttcgtaattaatacaagtactgtttttctttctttcatgaatcagtgtaaacggtaaatgattccgtcttatcgagttgtatattgcttgaaattcggtattgataaatgtaccttagaagttgacaaattaggcaacaaaataaaggaatcaaagaataataatacaacgaataatgaataccaattgtcgattcatgttgatgggttgatcatgttccaatgcaaaaaggaaagaaagcagcgtagaaattacgcatcttaatttgtattgtgacttttctcaagtaagatatgaatgaaatcaagattgaatttgtctaaatcttttccaatcctaatgttatacgattgttagtcttctaagttaaccactttgaaagaaaatcagtgttgaagttaaaaattttggtaatgtatgatcccgtttggtgaagtgatatgtttgaaacaaaatttagatatgaaagcaaagatttcttgtattacaaacggttacattacttgttgagaactagagtttttactttgtagctttcatgatgatgtgttatattgtagttgccgtgttacaattaacaaatccagactcgtgcatgaattgtagtaaatgaaaaaaaatgattatcaaaaacgtccaatagcttaattatttttaacgtaaaccaaacgttttaatgcatgcaactttaaatgcgaacaaagaaacgtataattttgagttaagaataatatattgcacacaaaatgatgagtttacagttgtacccctctttgactgctgtcgtcacacttcgacctttgtacgattctttgaagacttcaggagaaagctgtaaatgagagagaacgaatcaacacaaaccttattttcaaattgttaacttaacatatagtagtaatgaattaatcgacgaaatttttattctaaacatgcttggatttgaaaagcaactgttattttttgttcaatcataggtgaagaaaatttattatatccttatttttagtagtctagtgtctagtcaggtgatgtgagcctacataatgggtcatcaagttgtcaaactcaataatagtttttctcacaattttatttatttatttctggcattataaatagttttattaactagactaccccaaatgtttacagtttataaggttaataagaaaatttactgggactttttaagtctagtttattctattacatgtttttcaaaacaaatactcattttgttttaatttaatttgtgaagaactaacttgttttttattgattcataataaggttacatcacatatatatacatacttgaggagattacatgtctaatgggctaggttacaaaagcccataactacttaagtctatgaccgacctatgtctagtccccatgggccggaccgactataacttctcttcatggaccaggccgacaggccgatggaccgatggactggtgggtcgactggtcgatgggccgtcacaccaatgggctgacggacctatcctccaaggacatgggccacggttatggagtccatccataaagtggtttgcaacaatctataatattttaaactagaggtcaacatgtaagattgaattaatctcgagtggaaagagtttcataaacatagtctaatttgagcaaaataacgcatcccgacttacgagccactatgtattttttcaactttgctaaaacctagtctaatttgagcattatcaagtttcagtcaaatatattttataaaatattgtcactatcatgggaaaagtttgaattttactataaattttaaatatatatatatatatatatatatatatatatatttttatagtggatcaaatatccgaattttagcggatatgcggacatcaaatatctagtaaatagcatagtggatacaaatctgataaagtcaatatttgtatggaattgatcaccaataccatataaattgtagatatccacttcaagtgcaatcttaatatatttttaaagcttatatacactaattgaaaagtattggctattggaagaaaataagaataacactttcttttgatatgtaaaatttaagactccacctttctgattgaaggaaaaaaaaaaactattttgtcaaacctacaatacactattataaaaagacaagaaatagaataaaattttaaattgattgataagttgcatcaattttctggcgactattttggcgcaattgttttccaaagtattaaatatgaaatatttaaaaaattaaattaattgaaaatttcttagcttgatcgatttatctaattaaaaagcttacaattgttcacacaccgatttaaaataacccagataacgataaaaaaatcaacaatttaaactacgtacctttagagtatgacatcgatgttaccctggatttcatctgatgacatgggctgtgtttcctgtcaaacaaaatatcggaaactacctccttagcgacggtaatgcaatattctttttcaagaggcgtcacaagcttatagagtatttttttgctctagactaatacgtcatctcaattttttttccgagcactgcgactgccctttatgaaaagaagagaactcaacaatacatcctttgacagagaaaaagaagatttgttttagtggttatctatgtcgtatagaatgtatttatat

SEQ ID NO: 34205 - DNA, 1005 bp, Arabidopsis thaliana landsberg
ggtctaggaagcaagggttgagagagaagaggtccaggattatcactgtgagtaagatcgtacgaagatattgtacgcctttgaacataagaaaatcgagttaaagacttccttttcagaatggaagaacaatctgtaacaggatttaaagtctcgacgtccgacattagggagaagagatgagaaaaaaagaattatgagagtttcagattgtttagaagaccaaaagatatagatcccaaagaaaacgaaaaaccaaatacctagagattaggttttggctctataccatgtcaagaaaccttgggagttcttaaagagatttttttattcagtttgattcacagcaaacgccttttatacaagattagacataggttatgtgtggttctcaacctaataaacaagacatgagatattagaaggagatgtggcccattaggacccaataaattcatcaggaagatatataagatgtccaatttctccaatctttttctcttctataatggatgtagaacaaaagtttcctaaccacttcattttttatttatattttgcttcaatcaatatttgcgtttatttttcatcatttattttatttataattgataagatcttatttatattaactaaaaaatgataacatatataatattatatgttctaaaatatacgatcaatattacttactatttaatttgtttcacaaattattaatccaaaaatattgcaaaatagtttcttaaaataaataatttcctatttaattactttatttggaagattttttcttttagatacttttgatttttaatttgtatttttaacatgtgtaacgccccgaccactcttaccagtgggttccacgacatctctcgggcacatgggcccaccccagtccgacggtctgtgcgccaaaatatttttgaaaccagggtgttacaattcaccccactagcagatcgcaacgtcctcgttgcgcaccaagatcgtaactcccgt

SEQ ID NO: 34206 - DNA, 1841 bp, Arabidopsis thaliana landsberg
gtggtataaaatttgttgaagtttctaatatagcctttctcgagtgagtgaaccacatcagggtttgtccggtaaggttttcagagaaaagtttgcaaaatcctacatcttcatcaacttcctccatatcgactcttccatcggctataaagaaagatgcgagataacttttttggtcctctagcccgttttagggctcaatgttgagtttccgagaatccttagactggcgattctcgaggtgaaagatgtttaccttgtttgttcgatcactcgatcgatgtcaggctccatatatttttttcagctcgcagctaactttctccatagcttcatatttatcatagtttttctgctcatagaggtttccactttgctcttcaccattgactaaaacttctacgacatccggttgagatcggggctcgcttgcacttggagtgttttgcctaccagcctcgttccacgcttgggaatctggcaaactaaacatgcttcgtcgagctccccgaggatttcctgcactcaaagttcgcacatgagattgtatagtattaacactttggttaagagatacctggattgtttgtagttcgcatactgctttctccacatccgaaaacttttgtgtcattcctgagatcgtttcctccagcttttagtgcatcggtcatggttacattgatatagctatcgtcggccattgtgactttgcttaaaaatcttgtgtgtaatgaaatttgacgactcaagaatctcccgtccccatagacgacgccaaaatgtggaagtcggattcgcacactcatgaatatatttatttgtgggaatgaaaactcttaagatcaaaaaagctaaaatgaactctttggaaagaataactcttatcaaggatttaagtaagaaaattgtaatgtattagcaagaatttgtacaaaaatgcatgtatctttcatatgattcgagaccttatatttatacacttgaatcacaattattgaccattatacacaataattcccatttaaaatgcttgttcgattccccaactaaatgtggtaacgtttatattcgaactcctttgacttcttcatggactttgataaccgacccacctcttgctctcgaactgctgcctcctttctgaagtcctcacttcgcatggccctagaccttcagcccagcttggcaataaatccttgtttaacactccttaatgttgacctttcgcctatgtggcaatatttggttggatccaaacattcggttcgggattcgacaccaacatattggtcccgatatgtacaaagcaaagactagcaatcgtgtcccgccccacctgccatggtcgaccataccaacatgtaatcaaccaaagccggcccatcaaggaacaacataagtccacaccacccttttggtctggcaccgcaactgccctgccatccattctcaccatccttcaccacgacgttgatctaactcgtggtcaaaccgacaaaacaagatcaactctatattaggtatgtgactcgtgttttatttcgccttaggcttttacctgaaaggccacacgactactgaaagtgcacaatatattcggagtagtatttatggatcgaatccacagggagtataggtacaaggaagaattcaagttagttaacctagaccaagacaaacgagtgagtgggggtttgtgtatgcaatgagaataagtagagggtgcagtagaaataagaaagcaataaaagaagactgtaaaaaaaaacaatcaaagtaaatgacagttaagagagcggtgtaaaacaagtaatcgaaagcgctaggacatcagggtt

SEQ ID NO: 34207 - DNA, 1974 bp, Arabidopsis thaliana landsberg
  unsure (1)..(1974): unsure at all n locations
atttccttgccaccttctgaaagaaacttgtgtgaccaattttgtgttctttgcttgactttgtccacgacataacggaagatggcctttttcctgcttccaatttgttcaggcaatccgagatacttcccacctccaccatcattatggatattaagtatacgacgcaatcttgttttcacatgttgctttactctcgattcaaaagtgattgccgatttgttcagattcaccgcttgacctgagacctgctcgtactcgtgaagaatactcataatagtattgcatgacttttggtgtgcatgacaaaagaatagagcatcatctgcgaacagcaaatgattaatgacaggtcctgtagtacttattttcatccctttcaatctattcaaatcttctgccttggtgagtaggttactcagaacttctgcacacagtataaagaggtatggtgataaccgatcaccttggcggattcctcgctctggctttatcattcctctaggagaaccattcactagaactgagaagctgactgattccacacattgcattacccaatttatccaaatcgagtcaaacnccatattctgcattgtttctcgtagaaaggcccactccaatctgtcataagcctttgtgatgtccgtcttaaccgtcatataggaattagcccaacgtttccttttttcagtgagtgaagcatctcatttgcaatgatgacattgtccataatgttcctccctcctataaaagctgcttgattttctgaaattatagatggcaggtggtgtttcaagcgttcgacaaggattttggagattattttgtagctcacattgcataaagcaattggcctaaagtctactatcgctgaagagacatctttctttggaatgaggcagatgttggtgtggttcattgattcgcgcatgttaccctctcggaaaaaacgttggatttcaacaatgactgcatctttcacatctggccaaaattgttggtaaaatgctgcagtgattccatctggtccaggcgctctatccggcccaatatcaaacacagccttttgaatttcttcttcattcaccattctttggaggtccatattcatttgatttgtcactttcccctgtagaccttggaagacgcttgtgttatctctaaattcatctcttgtggacttgaacagatttgtaaagtactcttctgcagcttcaccaatttcatcatctcctctatatatgtttccagcatcatctgtcactgctaaaactctgtttctagcaagtctttgctttgttgcaccatagaagtatttagtgtttctgtctcccaacttgacccaattcttcctgcttttgattttccagaattgttcttcatccttataagcttgattcaggcctagagtgatttcatgaatttcctctgtagatcgatttccatatgtataagcgtcgttaaggtctcttttgagcattgcaatccgaattgaagcattgagacgattacgacgtttccacgcggccatttgctttctactttgacgaatcctggaatttagcgtcatgctagtgttgtcagcttcccaactctccaagatcatgtctctgaatccttctttgtgaaacaggcgactgtcatatcgaaattggtttcttctctggtcaaccgtgttgcaaaaattggtaaccaatggtcggtgatctgatccttcaaaatccagaaattttgtctgtgcagaaggaaataatgtcatccagtctgaattcgccatggtacgatcaagacagcaccaaatgttatgtgagtaacgctttcctgtccaggagaacttgttgccaatgaactttaaatcatggacgtcacaattggttatcatgcggatgaagtcttcaaatgatcgattaggtcgtcgtggtcctacattcttctcttcattgcttttgatttcgttgaagtcagctaacg

SEQ ID NO: 34208 - DNA, 924 bp, Arabidopsis thaliana landsberg
  unsure (1)..(924): unsure at all n locations
tcagggagtgagaaaagaagcaaagttacatccgccttgcttcagggaatgtgagatccataaaagtcttgtgcatcaccacattgttcggctttgggataaatttcatatcgacatgcatacattctgcaccgttctggaatattgtagtggtaaatcagaattctcctattcctttgtagatcctggagtacagttctgagttctcactcttatgttttgaatttctaatgcagggaaagaccttgatgctgtattaaaggcaacatctaatcttcctgagaaagaagcaaggattatcattgtgcaaatagttcaaggccttgtatatctgaacaaaaagtcacagaagataatccactatgatctgaagcctggtaatgttctctttgatgagtttggagtagcaaaagtaactgattttggtctaagcaagatagtggaggacaatgttggttctcaaggaatggagcttacatcacagggagctggaacatactggtgagcaatctagtttttgtctccttgatatggtctatattatttttgtctcttctacttccggacatcttatagctaacaaggttctataatataggtacttgcccccagaatgctttgagcttaacaaaactcctatgatctcatcaaaggtcagtgattggtcaatgatgtcataatctgattatcttatagaagttttgtggtactaaattgtgttgaaactcacgttgatgtatggtcagttggtgttttgttttaccaaatgctgttnnnnnnnnnnnnnnnnnnnnnngaccaaagccaagaacggatactaagagaagacacaatcattaaagccaaaaaggttgagttcccagtaacaagacctgccatctcaaatgaagcgaaagtaaattaactgtaccggtcttaaacatg

SEQ ID NO: 34209 - DNA, 1438 bp, Arabidopsis thaliana landsberg
aaaaactatcatataagaagataacattaaacggatagattcatgtctctttcttgtaatccttttttgggtaaaatccaaaaaccaaaatcttgccaaatgccaataagagcaaaaatccaaactttcctttctcttcactattacacaatgaaatcaacactacattttcacatcaaaatcacattccttccatggccttcttctccatgatctccattctccttggctttgttatctcctccttcatcttcatcttcttcttcaagaaacttctctccttctccagaaagaacatgtctgaagtctccactctcccctctgttccaggtttttttttttttttttccgattttgtaatctgggttttgcgaatcataggtttggtgactacttctgtttcaaagtttgaaactctctttgattctagtgatttatggaactaaaaatttgatctttgagaactttaaaagatgggtttttgatgtagcggtaccagggtttcctgttattggaacttgcttgaactaaaagagaagaaacctcacaagactttcactagatggtcagagatttatggtcctatttactctataaagatgggttcttcttctctaattgtcctcaattctactgagactgccaaagaggttagctttctaggtttgattgatatgtttggaatcgaaaaatcgttcttttttcgatcttgaacacatgactaaagccttacacaacttgatgattgctcttgtttatatgattgtagtctgaacttatgtagaaaagttgagttgatgtcttctcttatcgtttaggttactctttatgtgtttgttttcaggccatggtgacgcggttttcgtctatctcaacgaggaagttgtcaaatgcgttgacagtccttacttgtgacaaatctatggttgctactagtgattatgatgatttccacaagttggtgaaacggtgtctcttgaacggtcttttgggtgctaatgcacaggtgaattcattgttcgtttatcccgcagcttctccttggtatacataatggcaactgaatcaatcttttgtgttgtgttggttttttttgcagaaacgaaaaagacattacagagatgcactcattgaaaatgtgtcttccaagttgcatgcccatgctagggaccatccacaagaacctgtaaacttcagagctatatttgagcatgagcttttcggtgtagcattgaagcaagtgagtgtttcgcttatcctatacatcatttcttcgtcaacataaagtatgaaaatggatttttggtttgttttcataggcttttggaaagatgggaatccattatgtaaaaactcgggtgctttgtcaaagactaatcttcaggttttagtcatgactgatgatggtgcattgatgttgtttgagagacttttccat

SEQ ID NO: 34210 - DNA, 932 bp, Arabidopsis thaliana landsberg
  unsure (1)..(932): unsure at all n locations
taagtatagttcctaagtcagcacagtgaaataaactcgttcacaagaatgatccaaactcgtcaatcgtcatagtctccttctattcaaatatttctcttgtatttggcatttcaaaaaaaaagaggaaaaaaacacgagattggtcgttgtctcgtaaaggaaccaaacaaggccttaagtcccacattggattctcccatcgcaccgctattctctgaaccctattttgtccttttcatgactcaatccacaagaacacaactgagaattagtgacttacttgcatgcaacacatttaatctgcaaatagtactattggtgcgtagcatgagtaattactaatcataatgtcttatgagtttatttaattaatttgttacaatacaaagtagtggtcaatgaattaaagatactaatgacttagtgagtgtgcaattgtgcacgcaaaaagctctntaacctgaaaaaagaaagtatcatatttgttgggatggctntagaagtagaggcctccttaaaaaaaagtcatgcattgaaattcttcagaatccttttaaagcatataaaaaacattacatgtgtgcattataaaattgttcatttcttctctttccaaatagtatgatttacctctttttatttgaaattaaagatttttgtattagatcccaccatattatttgttaataaaaactatattggcccacatctagaacattagataaaggaaacaataattatgcaaatacatagtttaagttattaacctataaacgagttttaccaacaacaaanaaaaaccctataaacgtgtatagtggatttgccaaaaaaaacgagtatagtggagagtcaaaagcttgccgtgtggacttgtcacaaattattggtaattntattattatatttaggtagttgagctaactggt

SEQ ID NO: 34211 - DNA, 2590 bp, Arabidopsis thaliana landsberg
atttgaaactagaatgaatgatcgatacttgaaagctatcacacttaaatagttaaatggacgatataattcaacaatatcttaaataacattaatcattcactttgtagaaatttcaatttgacggtgctaacaacaatatgtgacatttttgtttgcagcaaaaaagtcaaatggtaaaaaaaaacatttttttaaaaagagagtatagtaaaaaaacagaggataaaaaacgaacaaacggttaaagctggcaaagatcccatcttccccacgctgtcaaattttgtcactacttcccaaaaaaaactctcccgcctctctctctccctctcccttcttattctcctccttcttctccttcaccatctccagatcccaaaatcttcatcgatcatcatcatcatgagagaaatcctccacgtccaaggcggccaatgcggtaaccaaatcggttccaaattctgggaagttatctgcgacgaacacggcgttgatcccaccggacgttacaacggtgattccgccgatcttcagctcgaacgtatcaatgtttattacaatgaagcttctggtggtcgttacgttcctcgtgctgttctcatggatctcgagcctggtactatggatagtatcagatctggtccctacggtcagattttccgtcctgataacttcgtctttggtcaatccggtgccggaaataattgggcgaaaggtcattatactgaaggtgctgaacttattgatgctgttcttgatgttgttcgtaaagaagctgagaactgtgattgccttcaaggtatatatatgaatcgatttctcccttttgatttatgaatctgctggtgctttgatcatattatctgattgatttgtgaatcaaaactgcaattatccgatggtttcgatcatttaaatctcgtctcgtgagtgttaatgtagttgcatatttagtaaccgatgatttcgatttcagtttgatttttgatcatcttcgcattgcactagtgaatctctcacatatcgtgttttgatatttgattaacgtttctcttcattgatctcttcatggtcatggttccaattacagtttatgaattacatgaacatgatccgtcgatgttcttgtgtttgatttgcgtttttatggtgtttctctcctgttgattactgtttaagagtgagctgttaacacttaatgattggctaggatttagattttgtctattcataatagtaaaaagttaacatcattgaaactaaggacaatatcctaatttggcggtagtgtattagtgtcccctaatgttttgttccagatttgtgactgtggatcaacaatatcacgtgaaaccttaaaaccatatcgaattttataataagaactttagggaatactcttgtgttgacactttcgaggtgaaacatatcactttgtggggatataattgaataagcaagtgggtcatgattggtttcagcaattgttaaataacatctcaatactttttggatctggtttaggtataagggacttctttagttttgtagtacattgtttcacacttgttcttaacatttctgtattacagggtttcaagtatgtcactctcttggaggaggcacgggttcaggaatgggaactctcttgatatcaaagatccgtgaggaatacccagacagaatgatgctcacattctctgttttcccatctccaaaggtctcagacacagtcgttgagccgtacaatgcaactctctcagtccaccaacttgtagagaatgctgatgaatgcatggtcctcgacaacgaagctctttacgatatctgtttccgcactctcaaactcagcactcctagctgtaagtaccatcaaaaccttaatgtttgttactttgttttcttggttcctaaattctaagagttcatatatatatatacattttgcagttggagacttgaaccacttgatctccgcaactatgagtggtgtgacttgctctttaagattccctggacaactcaactctgaccttaggaaactcgccgtgaaccttatcccattccctcgtctacatttcttcatggttggtttcgcccctctcacttcccgtggctctcaacagtacatctctctcacagtcccggagctgacacagcaaatgtgggacgctaagaacatgatgtgtgcagctgatccacgccacggacgttacctcacagcttcagccatgttccgaggaaaaatgagcacaaaggaagtggacgaacagatcctaaatgtccagaacaagaactcatcctactttgttgaatggatcccaaacaatgtgaagtccagcgtctgcgacattccaccaactggaatcaaaatggcttccacgtttgtcggaaactcgacttcgatccaggaaatgttcaggagagtaagcgaacagttcacggctatgttcaggcgtaaagctttcttgcattggtacacaggtgaaggaatggacgagatggagtttactgaagctgagagcaacatgaatgatctggtctctgaataccaacaataccaagatgctaccgctgatgaagaaga

SEQ ID NO: 34212 - DNA, 2472 bp, Arabidopsis thaliana landsberg
ataattaattgaataattaaaaaacaaaacaaacaaaaaaagaatccgtgtggaacttttcttcattttgccaatctgttaacctcgaaaatacagatttgcccttggtatccgatcgggctgtgagtgtcacgtacgcgggaacgacgacgctgacattgttaatgaggttatttatttaaatccggaaactaataatcagtcccattctttatgaattcaagagcacatgtgccaatttggttcaagagctacgataagtaattgtttttaacaatgttatttcttaattatctatgatctatattcactgtgataacaggatgataaaaatgacgtgaatgcaagatatattaatacaaagctttttttaaaaacaatttactcatttacaaagataatgataacattctgagttaccataacatattaaaaacagagatatctgaaatggtaagttttttccatgtcttaataaaatatatattttcaaatttttctataaaaactattaatttgatattatgttttatgtttcttgcgttttctgcctatcacttgttaatggttcgtaaagagttggaatgagatgatatagtttcatcccctcttataattcaagagtaatcagtgattagtattaagcatcttcttcgtcatgaaataccaacttcgatgctcccttggtatagaaacttcaaggaaagtataaatacacagtaactagtatgtatgatgtgaatgacaaagataatagtattcgcatcaccgagttgtatgtctaagtaaaggttcttggagagattgaaaaaacgtagtattattaaggcagaatcaatgcttttgcatcataaactatcatagattttttgtatgttttttctatttatgcgtttatttttcagaactacaaaaatgacggtaataatatgtcaattgacataaagttgtctttaactgaagagcagatgaagcattttttgaataactataacaaaaatccaagaggatttcttggtattttgagactatccataactaaaagaaccaacaacatgcgtttgcttaattagtggtcaacacctatatcactaattaagaaaaaaaaaagcttacagttcttgttatattacactttcaaatgttttgtggtctttttgtttaaacatttcactagtcttttttcgaaaaacatgcaaattaaataaccgtttataatatattatctccgcattttgaacaagatttgttccaatggtaagataacgataccattgttaatatttttgtccaacaaaattatgcgattatcaagggtctctcatagttaattttaatggttttgttggttacaaaaatagtagtagaaattggactttagtatataaacaaactcatagtacagtattattctaaatctttaatccagtacatctccaaagtgaatttcgaattatttggttctgtgtgaataaataaactgggctttattgggcttgaggcccatctccgttgtcgtcttcaaggtcacgcttacagacttggctccgccgctccggcattgagctccgtcgagagaatggcgagtaatcaacaaccaccgtcgaatctacagacctacggtgtaccaatttacgccgtcgactggattctagaggaagctgtcagatccaaaatcactaaggatcaggatgatgatgatgatgatggatcgtcgtcgtcgtcgtacatcgttttatccggcggaggaggagaaggacgaagtggaatacctaatgtcatcttaatctgtcgtgttgatctccacaccaattctctctctgaacaacctgtaagtgcgaataacaaagctccttctcttatgatgaatcattcacaattctctgaacattctcaatgtttttcgcagattggtaggcgtgtgattggcactgatctaccttatcgtatggctattcatcctcgtcaaggtggtcttatttgtgcattgcctaacagttgcagactgtttgattgggaaaacattatagaggatgataatgaggaagagtcagagaaagttgttaaagagttaaaagatgttggacaacagttgtctctctcgtttaatcaggatgggactgttctagctactggtgcagaggtaggaaggatcttatattcattctcttgagaaagaaataaactttggtggtggttcttcttatgtgtttggtttttgatgcagtgcaggatgggactttgagggtttttgaatggccaagcatgaagactttacttaatgagtctaaagcacatgcattaattaaaagcctaacttttaggtgagaaagggatcatcttttggagaaaatgattgtaaaataaatatttcttgatagtgaatattttttttccttggtttttggcccaaacccggaaaaaagggttggggggtttaaaaaagggtttttttttttcccttttttgggg

SEQ ID NO: 34213 - DNA, 139 bp, Arabidopsis thaliana landsberg
cttattttgtacctaggacacccacacacacaggggggagcagagatgggtcacctacactatcaccacaatgacgccacgctaccagacttgggaggaggtcagaatggtctgatccgcgagactctgatcctggccg

SEQ ID NO: 34214 - DNA, 8251 bp, Arabidopsis thaliana landsberg
ctctgtacattctcacttatctgtttgatttagcatttagcattcacttttatatccaagcaaattcaaatcgttatctgttttttgtttctgaggaatcgagctaaataacttgatagaagtgaaaacctagttgtttaattacttaaacatgccgcttatatgggtacagaaacttttgtgtaacaaaaaaggagattcgagatgtggtaaataaacaaataaatacaaaatacaagaaatgaaaattcaggggtgccaaaaactacaagatgcacctcttttgcagtatccactctcatagaatttacatattttcagccctttgggcggatgggctgcatacgaacctgatccatggtcatacccatggctattgctgtatggccattgccggttattatgactgttgttgaagctactgttgtgaccgttgttcaaccactgccggtctctgctgtgcccgctggatctctttggctggctcactcgtggacttcgctcggtgcttccacgggctgagcttgagtcatgagatgataatgatctagggcttggttccgaacttactcccaaaacagatttaggaagcctctcgaccgttccagcttcaactgtggtttctgatcctagtctgagagctgttgtcgttagagtcaggtcgtgacttattgcagttggcggtggcggtggcggtgcaaaaagcaggagctctggaccagcagttccgcagtggctgaagggagtattgtcttttgcttctgtaagcattgagcttttcccggcagagacattgtcgaggatactcgtctgagagacatccaatctacatgtttcaggtgtgagagacatgcgtgccacagggttaaagaaatctttttcgggccctttcaaatcatcgtcatcatcacagtgaaatgtcgaggtgggtgaagagggtaaaccgttctgctccattgcttcaacttcagctaatagatctgaaactgattcatcacactcgtcggggtcagccacaatggccggccacccagatgcttgagccacttgggtgttgtctgaagtctgagtagctgtggcgtgatcagctgccaactcaattggctttacagacggtgcagctaaaacaacagtattctgctgaattacttgaggaagctgtcctccagtaaccacaacacttgaagtggtagtagcagcatcggttgtacttgtggttgtggtgctccaagtgacaccagatggccctttgaccagaacacatgaagacagagactggatagtctccgccgcttgagcttccaagtcttcagggctcgacttaggtgtaggactagggaaatcaaggaaatgactttcttgattcaggtttggtgcatgaacagaaccgtttatggaaacagaaccaccatttgtttcatcctccagagtcttagttgtgttatggttaccatctgcccgcacagtattgtattgatcagttcctggagtttctcttacatcaggagtaacaacgtgtccaggaaccacagagatcgacgccggacaactaacttgaggctggggacgaacagaattaccatcctcaacttttccagagcaagctacaagagccacaacttgtttctctttaggatcgttagaatgggcagtgacagtagaggaggaagaggaggttgcactggtgttaactggcatctggttcttctgaagacagttcacatccgcgccagtgcggccagaatcgtgtggagacggttttagttcttggggaagcgaagaagaactcggcaaagtagttgctttatcaaaccgtccagcaagagcatcagtcagaagcacagactcgtcttggttctcatgcgctctccatatcctaagataagggggaaaatggccactagatttccatctacggagctgcaccatagaaaacggtccctgggtctttcctgttggatctcgataatgccatatttcactctcctcgtcatctttaccagtttcctgcagtacgcagaaatttacatgacgtgaagtcaaaatagaaatcatgaaaggttacgttgcaaatgtaggaggtatgtcaaacctggatatttgatgagttattgtggaccttagaacaatcatctttatcagcatgtacgttatttctgcttcgcaaaattggtgcatcatattttttctgcacattatttcccacgttgttcaacttaacccctttattctgtggacctttactttgtgcctttacgtgattatctgcaattaaaaaacgtagaagattgtaaatagcatccaacaatcaggaatcttcgataagataatgaacaagtagctgttcacatcctaggttaaggtgggagaccttgtttccttgtacccaaccctgcatcttctgataatgcatgacttggatccatgcttggatctgtatgaacttctgggacttcctgcagaagccgctgacgttcctcaggtgattttagaagctccagcttttctacacattctctaagcgtgggagatagttaagaaatagttgctaaatcaagtattaagtccacgcaatcaatgtcaaagtctaaatgggaagaccgaggtacactactcaatgtgaattattctttgcgcttatgagcagcatggtcacctcttcaatgaattatttcatcaacgactcattaaaattttctatatcaagcacatttgcagagagatatagtgtaagcgaagtgcaacaaatatagtatagcaatctcaaaaaggatattcctttctatgccccttctcacttgcccgatcacggagatggttgagctttaatatctcagcttccagagcctacatcaacaaaacatcaataagaaacacggtagagggcaataaagaactattataatgaggatcttagtatttctatgaaagatatttgctctttttaatgaacctacctcattgattctcatggcttgcagtgttgctgccgtcttcaagatgtcaacctaacacaaaaaaaaaaacatgtttccaaattaggtaacatatacaatttcaggacaagaagatatcatgtgcgcattcctaccacagtcaaacgtttattgaggccacattttatgctctggcgcagccgtttgcactcatcctgaaaccacggttatacgtacattaaaaataaaaactgaaacgtatttactagatcttacttattagctgatgggtttctaactctttcttcacaagcagagaatgagagaaaggtagagaaatcaatatttcagatagaactatactcacctctgtgatattctggtctgataattgatcaatcgagatgacttctctcttgtctaaattcagtatttcaagcataacatctgtagtctttgcgccaagttggtaggatgctattgccttgcttgtacctgttgaataaccacaaaatcagctgagatcttactattaaaacatttgggtaactaatattccattttcctttctatcctcaacaaagcactaatatgaccattaatcaagtacctacaacttgaacaagcctgtgaatatccagcttctggtcgctgccagataccttgattctcaaaattgtgcctaccaccttttcgtcaactttgttgatatcatcaagaagagactccaaaaatttacgtctcaaataaatcaggttgatattgtgaacatcaatggctgcgtatgcatccagattttcattttgtactctgccatcagttttcctacgcatcttccgtcttctatccctgaccattggatcatgaacactatcctcctctatttggctaggtacagcatgagtagtttcaccattcgtggtcttagcgcctttcggtttctcttgaataaggacatgagactctagaagcttaagcatttcaaagtgacccactcgctgttttccaaacaacttcacaagcatctggtcacaaagaacttgagacttctgaagaggatccctaagattttttttcttgatatagtcaagcagaagaccctgcacgtcaaactgagatagaacagatgtatcgccatttttcatgaacgacacaaactcgaggagttcttttgttgcccagctcgtatctccaggagccttctttaggatattacttggatttttgccatccaacttgttgggtaaggtaggggaatcactggtccttcttctttttgttccatttactgctacatctaaagctctgttattggtatgatcattttgtgactccactttgggagcagtgttaggaacctccttccaaggattatttgctctagtaagctcatcaacagttagagacagctcttccttcaggcaaagccaatataccttgaatagatactcccaactaagcttgtcatcgaaatccaccttaacctacaaaacaagaaaaacatttatgagctacatacattatgatagagtaaagaggataatttaaaagaacaacactcaactttcttaaaatactgaagatatacaagtttccctcccaaaacaagagtgacccttgtctttcagtttcacccgattgtttcaaaaacccaacataccctactgctcttgaattattacagaggaagctcatggctaacatctttggaaaactctcatcctttcacgtaatacatgaaatcaatcaaccccgaatctctaaatattcatgattttaacttgcgattgattgctatcatcttacctattgtgtcgagatcatagtgcatggcaacactacgagggattagaatcgggttaacataaatagaaacccttggttgcttaatatagaacaagcaaagagacgtaaagcccaaacaagactcaaatcaacaaactatattcttcttaaggaaactgtggcaggttggtaaaaataatcggcacccaagcaaattttgcggctaaaacagtactaaatgaaaactatagattgtgaaggattgtcttaccgcttcattatctccttgagcaatattctcaatcagcattataggcttaatacatgtgccacaaagacccatgttacctctcacaatcacatagtcagcatctttaatgcaccgcttacaaacagaaaaagtgcatgtataacacatgtaactggaagctttttggcatgtaccacatatgtgccaccctgaaatgaatgaacgaaacatcagatttcgaaggatgttcacgtcatcatgtaagagatgtgaaataacgacatgtcagaacaatcagcctctagattgctgacagcaacatagtaacatctatgatggactatacgacataccacaattccatttggccgttgttcgaaagaatgcctcatctctcttaatacaagctggatggtatgccttggggcaattcctgaatggacaaacaaagccatcaaaaacttatcaataactcgaacctcgattcttaaacctccatagatagctatttttaacattaccctcttgcttgtttagaaattgagtagctctaacctatgagcattaaccaacgcataatcgatacttagaatctcgataatgagatacagaacataatagaatatccaaaaaaaaactacgaaattaagctcttcttcgttgtgaaccaactaaaacatatggcaaggctctaatctcccactagagcatactatctaacagaattattatcactataagctaacaatcactaacctacgatcgcagagaacaagactaccaccatcgaagcaaacaaagcaaacatcttcatcttctcttctcttcctcgaaatcggaggcgaagaagctttagctaaagttctcggcggacgaccacgtctacctctcttcttcaaagaatcggaatcttcttcgtctaacttcacatccgaatctaacggaacaccaccaccatcgaagaatcccggaggagaagaagaagaatcatctaatttaacatcggaaacacaatgatcgactctcataagatcgatttccggcatcgattcgttgttggctcctcgtgaagccaaagaacactttttttttgcttctcagctcaacaaaaagacaagaacgaggaagcggaagatctgaggttttaaaaaaagaagggaaggtgaagcaatcgtggaaaccctaaccctagggtttggaggagaattgggaattggagaagggaggaagaagaagttgaagaagatgctggcgtgtaaggagagaagacacagtgggcacatggaaaatggacttactcgttactcggcaaaagcaagagagagagagatgtgacaaggcagtgtttggttgtctgtctcctttttttgactttctagagagagaaagaaacaacacgctttttttttgttgtctaaacgccgcgcatatggctggttccacgtgggcaaagttgaggctggtgggagccactcgcgtcttttcccataaaataaactattattatttttaatttttattatttttttaacagagaatcttgttaccactaaaaatatatataggtgactaagctacaagatgcaaaaaaatcacgaggcactagaaaaaaatgatctctgagttagaggagtattttcaaatttatattttaagtaatttaagattcataatgatttattaatttttaatatgattttaggtaaatttagagaaatttatgatttgttgtagtctggttccccaaattctacataaaagaattacatttgtgttttttaattttttctaaaattttataagaaattattcaattatatattttataaaaaaaaatttcaatttttcaaatatcttaatcttgtatttctacattgtcataaagattagataaactatagttaaaattaaaacacaaaattttacaaaatctctcataatcaacttcgacatcatacaaacatcagagaatttcgctataataaattagaattcgtcaatttaggttttttactttgataattttagagtttaggtttgatgatttataatcttattgaagaacatcatattatttttgtttacaatttgtgttgtataagtttatatatctttttcaatataaatagagtttgtccaatttcatgataattttaaaaaagggaaatttgtatgaacatatttgaaattgaggaatttttttactatacacccttaaaaactaatgatatgaatattttcaataatagtggaattaaaattattattcaaattattagttcaataaaatttgattttagaagattcttaaaatataattgattgacataaaaatttgttatcgtaatatatattattttaaatattattatttttgtatatttataaaaaaaatccacagctcgaattaagctcttaaccccaccatttgtttatttttatttgcgtcgatttagtgggggaggcttcgtgtcttagtctaacacggactgttatattaatgtaatttattagatattattttttgttaaataataaagtggaccaaagcgaaaatgaaattgaactacttttttttctttcttatgtgcaacatgtcgaggtcgtagtttcttgctttggtcttatactcgctacctaaccatatatcttatctttaattctcatttcgagatcttctttctcttaaaagaaaaaaaaaatcagctattaattagttgacaaacttttatataaaataaacgaagtggacataacgattcaagactcaatgctttattaaagttgcaatgatttctagcaggataatgttttataactaagattaactgattttttagagttttgtttcattttttttttgttataacaataatcttttccaatagtacaaaacgacacttgcaaaacatgagtgttaaagaaacactatcaagtgatagaagatagacctaataatattaatgcgttctggtctctagtctctagtaagcttttataggacaaatccatggtaaaaagtcaaaagtaatacgtaaaaccgactaatcttaggctatcaacaatggtttttccattcaacaccttccacataagcttctctcttttccacatcattttttttctcttccacataataattcaatatccactcaaattttatactctataatggtttgtttaataaaattcaacacactacaccacaaatttttatttcattatttttcttttcttttatgtcttaaatggataattaatggaattttaaaggttaaat

SEQ ID NO: 34215 - DNA, 1699 bp, Arabidopsis thaliana landsberg
cccatgaggaaatgcagtttttacatccaaatgatgtatctcccaacaatttgaggctgctaaagcaattatgagacgaactatttcaatacgagccaccggagcaaatacttcttcaaagtctacaccatgtcgttgaacgtatccttttgccactagtcttgctttatatttatttatgctgccatcagagttatgcttcagtttaaaaacccacttgactcctattgctttgcttccaacagggagatcgaccaaactccaagtgtgattcttctctattgattgaatttcctctttacaagcatctctccattcttttgacttgtttgcttctttgaagtcccacggttcatcattgacagcaagtaaaaggtgttctgcttcgatttctgcacataacacgtagtctttcaagtagttaggtcggattacttgtctttgtgatcttcttacgggttgatgttcttcttgagattgatcatgctcttcagtttctgcttcttcaatgatattctcatcttctccatttatctcagtttcttctgtttcttctggttctgtagagatatcattctctgtgactccattatttccaaactcgcttaaggtaattgtgaatgtccctgattccttgtcagtttctgagcttgattcttgccacatccagcttctgttttcatcaaagacgacatctctgctcacaaagattcttctttttgttggatcaagtagtcgatacgctttagaaccaggttctgtaccaagataaacaagcatccgagacctatcatccaatttcttcagatttggaacttcaactttagcataactcacacaaccaaacactcttaaatgttcaacgtttggcttcttatgtttaaagacttcataaggtgtttgattttccaagtgatcttgttccaactctgttgataagataggtcgcatgtctcaccgcttctccccataagtagtttggaatgttcatatgcttcatgatgcttctagtcattcccaaaagtgtcctgtttcgtcacgccgttttgctgcggagtgtatggcgcagtgtagtgtctaatgataccttctttttcacagtaagcttggaattcttgagataggaactctcctcctctatctgtcctgaatgtcttgatcttctctctggtttcttgctcaaccagtgtcttgaatcccttgaatttttcaaatgcctcactcttctctttcagcaggtatgaccacatgaatcgagagtgatcatcaatcaggacaagaatataccgtctttgagcagctgtaggtggtgagataggtccacataggtctccatggattagctctagtatttgtgaagcacgatatgttgttgcctttggaaacgcttgccttgcttgcttccctagtaagcatgatgcacagatttctttctcctttggtacactcggaattccaaccactagttcctttgttaccatcgactttatggtttcaagattgatatgtccaagacgagcatgccactttgttgaattacttaatgccataagctgcagacacttagtgttttcaacctttaaatcaaccttgtataaacgatttcttgctctttgtcgccttactagtaagtttccatcacgatcgtgtagagtcagatagtcttctctcaatctaatatcacaacccgcttcagtag

SEQ ID NO: 34216 - DNA, 1505 bp, Arabidopsis thaliana landsberg
  unsure (1)..(1505): unsure at all n locations
ctctcgatatgctcctttacccaaacgttactacatactttgggttgatgctccgagtgcctgtatttgctgtaaggactctctagatactcgtcataatgagtgaaacgtttctgaatcatctaaaatactctcactctcttaatcttcagggaatctatagcttaggactcaacattataaagatgctagaggtgtgtatgatgtgagaatctaatccacatttgctttgagactatatgactatatcttaaaccagaccaacttttttgggaatgcaggggaaaaacaacaataccttgactagtttggatcagttgggaggagttgtagttgcagtcattgcgtgggcaaggataaggaaaggtcgattctgctactgattgattattttactttctccatcaaaccttggacttgctgcaaaagattcatataacttgtcccatcattatactactggagtactggttatgttaaactttgtgacaatgagattattattattactattttttacgtttggcctgcacattttggaaaccttcgtttccaaagtaaactaattctttttctcttgtcgtcaaaattggaacattgaagattatcttaagggtattgtcttgacatttattccaagtcttctcaccaagctattggtttcttttgaagtcaatcacagggattatacagaaaaacaacgaattatgtattcctttaaaatagacaaacctaaactataaagactaaatcctttttccttacaaatagtactaacatgcaaataaatacttatgagaatatccaaaaagattataaaaaattattgtgaaaagacaaatgcaaatttttcctcattttgtcaagttgaggatctttgtgactttgtttaagttagccgttttatagagaacagagagagagtagattctagtcacttgggtacattctaggaattgttcagtgtccaattacataattgttttgatgtcgagtaaatctcattatgtgagtttgtgaaagactacttaaccgatttctagtacaagatttgatggtgaatttgctttgattcttcttttacactattgcggttgcagcaatagcgagaagatgaataataagatatagcagtttctggttatggttacttgataatttgatgtatgtaaattgtgattttggagatggaaaagttatggtttaaattttcaactttcctaaacgggaatgagcatgtgattttattttattttactagtgtttagtgtgacgtcacttttgattgcactaaaaaaaaggtgacgtttttaacacacatacctcatggtgtctcatgacaataaaacaatcagaagttcatgcatttggtataaaaaattgaaaatttattccgaagaaaaaggagaaaaaatgcatgcgattttctcgagcttctctcgcanggtcgtcgtcaacgttggtgcttcttcgcaatcgcagctaaccaaaatggtgaagaagaa

SEQ ID NO: 34217 - DNA, 324 bp, Arabidopsis thaliana landsberg
ctctatgccatctttgttcaatgcaggttacctctcctgcttccacgatcccgttctctcttgctaacgatgcaggaagaaactgtacattttcaacacatttaagcgaatgacaacacaaaaagacttgaaaaacacctagaacaaaggtcttgaaaacttacaaattgacatgacctgaacacgtaaggtttaagatcaaacgtcagaatcttgttctgattcaatggaatagtctctgagcaattctcagattctatctcatcaccttcaatttcagaaacatttcgtttttttcttgctttggaagagtttccttctgga

SEQ ID NO: 34218 - DNA, 1293 bp, Arabidopsis thaliana landsberg
ctgaaatttggtgagtgtgagtgttttatttgtgtgcttttcctctagattcaagttttaagctaacattttctgatttctcagtgacgaggctgaagagaaatgcattccaagcactatttctaggaagagagtcacttttgactccaaagtcaaaacctatgaacacgttgtttcagaagaatctgttgaactctcagaagagaagaacgaagaggttgaatccgaaaagaggtcattaaagtcaagcaagactgatgatcagatcattgaggttgcctccaactcctcagggtcgtatcctgaaaaccacagatacaagaattgcagagaaagtgatgatgacatagaggaggatgagtttgactgcagtgacagcgatctagatgaagatgaagaatattacagtgatgttggatttagtgaggatagcttgcataacccaaccaaggaagtttatactcaagatattggggataaaacagaggagattgattcaaagctgagaaggtctaacgagactgttagagatggaaaccactatgatggccaaggagtacttaaccctgttgagaatcttactcagtggaaatccgctaaatccaaagggagaacaaagcagaaacagtctcaaaaggagaactctaacttcatcgcagatcaagaagaaaaaagggattcctcttctttcggtacagaccctcagattgatgatataacactcagcgtcaaaccgaaatgcagaattgaacccaagaaactgcgaaaccaagaactggccgttgatgctagcctttcaacatggttatcaacatctgagtctggtagtgaatgcaacagcgcctctatgtataccttaacacccgagaaactcaagtctaccagctgctactcaaaaccgcttagaatcaatcatgacgatagacctgtattatgcgcattgacattggaggatatcaaacagttctcggctacatctacgccaaggaaatcaccgagcaaaagccctgatgagacacctattataggcacagttggtggttactggggtaatcgctcaaaggcaatagattgcggctctgcatcttcattcaagggaataccaaacaccagtagcaagtacagagaggtacgcataaaccagtaaaaacactccaaaagatagtagaatttctgatattgatttcatcacactttcaaacccaactacctcgagtgcaataatcaatcaggtgtccttttccccgacaataacagtttttttggaagtgcaggataagagcgtaaagggca

SEQ ID NO: 34219 - DNA, 509 bp, Arabidopsis thaliana landsberg
  unsure (1)..(509): unsure at all n locations
tatcatttaccaagtcttgagtctacggtttattatatcagtaaattggccaaatatatcatatagcaacatcaaaataaatgcaccgttaatgcctataaaggtaatgcatactaataatatttgaatggacccaaaaatattataggagctgatatctcattcattctgattgacatgcacccaaaattgaaaaaggtttggatctcttgggaaatatcagctcctataatatctcaataagtgcggaaaaaactagcatagaaactgtccggctctggtgctttgtctggatgtatgtcaaaagccgctttgcgtaattcctcaaagatgatgtangatgagagcattgttaggttatgtggtcctaatcaaactataagttatcgttacatcataggttatatgttctaatcaaactataaatatcagtaaattaaatcaaagataatagttatgattggtcatattgtattagatcctattagtaaaaatgataaagtaaatat

SEQ ID NO: 34220 - DNA, 1962 bp, Arabidopsis thaliana landsberg
tgggacaatgttttcaaactcaaaaacagagtaaattcattgactctcagtattacatgcaattttaatttatgtaagatcattcaagggaattaaaagctaaacacaaatccaaaacaaatctaatgtgtgttattgtaagcctatgtgtgttagggtttctttggaaagtgatataaataggattgttatgtgtctaaaagatgtaaacaactctcgttcatccattttatgaaatattaaccacaatctctttgttttggtgacaatctaagttattttccctctttttatttttgcacaataaagctctaatgaactatttcaatttgtagtattttctatatcattatattcaataattttttcttaaatttttccaaattttaaaataaaatatctttgatcgaatatgttacctgaaaagttcaaactacgttcaaataaacgattgagctatgaaacctcttttactatgcccatgaataaactaggggaattaagacaaatagcactaaaaactttattattccaaaaataacacattcttttgaaacttccaaaaatagcatataaagttttaatcctctataaattaattaaataataaagtttttttattaccatttgtatcaatcctccaaataaaaatgagagcaaacactaatctaatattaaattgaatcaaaaaacttttaaatagtagaaatatatactctaaattggaaataaaaaactcaaatataatattacaaactaattttaaaatgaaaaatctcttttaaatggtgaaaatatataccctaaattggaaataggaaacccaaatataataccataaactaatattaaaatgaatcaaaatttcttttaaataattgaaatatattctctaaattggaaatagagaacccaaatataatattttaaatttatttctaatttattttggttgaatagattttatataaaattgtggtattattattgtccataaaacttattttagtgttacttttaggaatttcaaataattatttgagtgctatttatgtgtaaaaaactttttaatgctatttttgtccaaaaaacttaaaagtgtgctatttgtgggaatttctctacatataatacttctacttgacacacacacttgcaaacttgcacttagacctaatgatggctcttacacaagacaagtagccaccccacatgcattggaactctcaccccttgattcactcttctactctaacttagacttacaacacaacactctttaactaaacatacttgggcctaattcatcttcagcccattacaaccatattacaaaacacaaagcccatatgtttgttgactttcttctcttcctttgactcttctcttcacgacatcatcttcttcttcctctgttcttcatcttcttcttctcatggattcttcttcttctttttcagattcaatcaaggatacaattccaacacattgccgtcgtagagcccacgaagcccgttgtttgctaacccatacatgtagcaagctgaccggcctggccaaaaccggtttcgataggcctaatactatttgaatactatgtgtttgaaattattttggacttatatatatgtacacgtgaaaaccaagaaacattgaattattgaaaaaatagtcatggtcccattaccaattgaataaagttctttatttctaaatttcaatcttgcttccctccaagattataagtaatggaacgccatgccccacgcccacgggcaaccaattcataatgcatggcaaataatcatttgagaatatgattaccggtaaagatagacttaaaatattaggtagtttggttattaaagataaacttagctggaaatgtgtttgtttcaattagaaatcataatctaaacataaagaaacttagagtacttctatatatgtttaattgatgtc

SEQ ID NO: 34221 - DNA, 1377 bp, Arabidopsis thaliana landsberg
gttatcgtgttctgatgatgatgatgacactgtgagtgcctcaggaacctctataaattagtcctcttcaccgaatccttgtaaatcattactgtactttttctctcttaacggtttctttattattcttcccattctacccctcttcttccttctaattccccctcaaatgccactgtcttctcactaaactccaaaacccaccggaaaaaatgattacgtggcacgacttgtacaccgtcctcaccgccgtggtaccactttacgtagctatgattctcgcctacggatccgtacagtggtggaagatattctcaccagaccagtgctccggcatcaaccgcttcgtcgctatcttcgccgtccctctcctctccttccacttcatctccaccaacgatccttacgccatgaatttccgcttcgtcgccgccgacacgcttcaaaaaatcatcatgctcgtcttacttgctctatgggctaacctaaccaagaacggtagcttggagtggatgatcacaatcttctctctcagcactctcccaaacactcttgtcatggggatccctctgttgatcgccatgtacggaacctacgcaggttctctaatggtccaagtcgttgttcttcagtgtatcatttggtacactctccttctcttcctcttcgagtaccgtggcgctaagcttcttattatggagcagttcccggagactggtgcgtctattgtttcgtttaaagttgaatccgacgtcgtttctctcgacggtcatgattttcttgagacggatgctgagataggaaacgacgggaagcttcatgttaccgtgaggaaatcaaacgcatcgagacggtcactgatgatgactccacggccttcgaatcttaccggagctgagatctatagtcttagttcgactccgagaggttctaactttaaccattctgatttttactctgttatggggtttcccggcgggaggctttcgaattttggtccggcggatttgtactccgttcaatcttctcgtggtccgactccacggccttcgaacttcgaagagaacaacgccgttaaatatggattttacaataacactaacagttctgttccggcggccggttcgtacccggctccgaacccggagttttcaaccggtacgggtgtttcaactaaaccgaataaaattcctaaagaaaaccaacagcaactgcaagagaaagatagcaaagcgagccatgacgctaaggagcttcacatgtttgtttggagctcaagcgcttctccggtctccgacgtgtttggcggaggtgcaggcgacaacgtggcaacggaacaaactgaacaaggtgctaaggagattcggatggttgtct

SEQ ID NO: 34222 - DNA, 1126 bp, Arabidopsis thaliana landsberg
gcgaaagtggaccaaatcctgaatttgattgccaatgacgggggaaaacttagtgaaaatgtttaagctccgaattaaaaagaacatagaccgtcgtttgaattggtttactatctttacgttcaatcttatatcgatttgttttggtataatttcattttgataaatccaaaatggtttaatcagattgtatcctatgttcctaactactagttagaataataatctatttttaatattgattttaattcttctgatggagtatataatagtgctcgacaatgtcataatcagtacaaaataaatcacctaccaacctgaactatatgttatatattttgaggggccacgtcaagtgtgccgtttatttttgtgtttatgattgtttaatatttgtgcgtgtgatggtgtttcttgcttagtttccacttaatacacaatcaaatatcaagtggaactatttatgaaaattgttcttcgagaagaattctgaccctaaaaggtcatttgagggcttgaggcttattgtttccaaattacaccagtaaacaagggtttttttttgtcaacaaagattattgtaattcgaatttcgtctacaataaaacaaattttcttactaaaacaaaacaattagctgacggttgatatttcggcttttgagtttaattaactaattggtgattatgttgatgatctttcacacctaatgaagtgtcatgtatatgtatatacttatgtatatataaaacgtacatataatcatttgtcatatatatcatcatgtattgcatgactaaactacccttaaaagaggaatacgatagacatgacctttaggaatttgtttttttcttctaaatggattccttcgcttctttttagcctcgtagtgaatttgaacattgcagttatttctagtaagatattttttctgtatttttcggaaaatgttaaaaactaattatacacaatttactttctctctcaactcttattttacgttactgttttttttttcctcttgcaaaattagagctgctgtatttacatttactagtaatttggtagatagaacagtaatgtagtatatagatggggttgagggcaaatgattacttgggag

SEQ ID NO: 34223 - DNA, 815 bp, Arabidopsis thaliana landsberg
gatagctttagtaggtaaaacattactctgtttagctaataattcccctaaagtaacatgcttcgtaatcagttgccttgtctacaatcctttctctcttaccatatgtttctaactcagatggtcaataccaggaagggtggtggaattgatctacctcccaatcgacacactcggaggatatttagacaaccacaacaacaacaacctgagatggatcctccaccgcctccaccagcaggagttgacctaactcttgcaacacagatggggataatgcaacagatggctgacactatggcggatatgcacgcgcatatgcggtaggaacaccaggagatgcgccaagagcgagaggatatacgacaggagatgcacgacgagcgagaggagatacgccaggagagaagggtgcagcagcagcaacaacaacaacaacaacaacaacatcaacatcaacatcagcaagcaccactgcctccaccaccaccaccagttccaccccgggacaagcactgggagttcatgagccataagccaccaacatttgctagctctcctgatccattggacgttgatgattggctaaaatatgtggaaaagatgttgaatattgcacaatgctctgaccaggagaaggttctatatgcttttggtcgtctgactggccctgctgctgattggtgggattcatatgttacgtgccatgaggttgctgacactattacttggtcggagttcaccacacagtttatgaactaccacattgctgttgggttgatgaggatcaagatgaaggagtttctatcattgaa

SEQ ID NO: 34224 - DNA, 2695 bp, Arabidopsis thaliana landsberg
ttactctctaaaaagattaagtctgggagagaaagaacatcgaaaaagaaaaaaaaaaaatatatatatatatatatatatatatatatatatatatatatatataaagaatggtcaatttatcatggtatagtacaggaatgagtatagaaggatcttgaatgctggcttgtttgatgagacccaacgatgaaagcctggtgagtatagttgtggaacttaggtatggaatctagaatattgtgtaagctttcagagaagtacattttggttaggatttggttagacttgttacgcatatggacttagtttgaatgatcatggcaataggctagagaatgttgggagttcctttgttttcaaaacctcttccacgggttcggcttttgtgttttgcttgagggcaagccaaagctaagtctgggagagttgatataacccgattttcaccgattttatctatgttttaggtataggattttgagtctttatgttatttctcgagtctttttagtgtcttttcaggtattctatgcaatggtacaacaatggagataaggagacattttggagcaaaatctatggaaaaggaagcgaaggacgattttggttcaggaatcagtgaggagtgtcgatcgacacactcttggtgtcgagctacaccagttgcggcctagagacgtccattactcttttaagtttgaaaaattggaaatttgctctcgaatgcatctctatttttattattagtcactgcacgttttttaggtcatatatatagttttaaaggtcattgtttagacgtatcaagctttttatcaagttttctagcaaccaagtctttttccaaagcactttcataagatattcatccatgtttcatcaaagatttcaataagagtgaagagatcttctctaactctttttgctattgatttggttatgattttgtattcatacatgttgtttgtttcatccatcatgtctgagtagtctgcttgtcagggttaggatttctcactagggattcatataatttagtagatcgttcccttgcaaggctatctgtaggattcttcatctttagttgttcttaatgctagttctagagtaattaactagaacttgatgttaggataataggtttgtccaccatacggtatctattactagaactatcttagatgagcctagtttttagatgtgggctagcgtcaattacttaggtgaacttatcaaacatgattataatgcttgcttagttctagggatttacaagagagttgggatcaatactattaagcatagttagtttcgcggaacaccaccggttactctatattagtgatttgagttctagaatggttcgataatattcctaatttactgctagatctactattttgatataacctgagaatttccctaaacccgacgtcttaatcatctgaaccttcaatctcttttattgctttcttgacttgtcttttattttataatctatttgtttagcttaattcgaaatcttattatattgtgtgatctgagagctttgtggaattcgatcctaaagtactacaatcgatctcttatttgagagagtcgtcttaggattaatttgactcacatcagtaaagcaccatgagttattattatgtcaagtttcatgaacttccaactgcaagtaaattaaacatttgtcgattagcacatttctcagatatatcattgttggtttattctacattcagatgtggtatctaaacacgccttcttaagatgatagctcttctaaatagattgtttatttggcaggattgaatgcaagaaaaagcacaaatatataataactatacaaagttgaaaatgtgaatttaccgcgagtgcaatcatctcttgatccattcgtatcttctcttgcctccttgctagttctgcttcttcaaggttcttagattgaatctccttttcttgttccctacgctttttgttttcttcctaaaaaacaagaatactttctaactaaaaatctctgtccataaattgtcaacctcatcccatgatacatgattcatatttatttaattatatgctcgaacaaatcaaatactcagtaggagaaatttgatccaaggaaatatgtcgactgatatttgaagaaaatatggatttaccgccattttctgcatgtttttctcgtgctctttttgtaactcttcctttactagagctagttttgcttccgcaatggtattagcttcaatagccctctcttgttcctttacccttccattttcttcctggaaaagaaactttttgataattaaatatctatacataatagcaatttcttgatattagattgccctaaataacctgaaaatatataagaaaaacatataaagttttattggcttttaggtcaaaaccattgaacaataagtgggttggctaatatttttttatctttaattaaatctcatctcacagactgatatttttaataacacaatgaaatgatggttttattaatcattcgtagatattgactacatctcattgtcagctcaaacgaactttatttatttatttagggcctatataggattaaatcgatcataatgtttttggatgaaatgattctatccggggaggtagcatgtgattatacagaacaattcatgacccttcaact

SEQ ID NO: 34225 - DNA, 3863 bp, Arabidopsis thaliana landsberg
tctctgtaatggagaaggagataattggaacagcgctagataccaaacccctcggaccatgatcaagaaatatgtttaaatcatttgctgtcattgctgggctgtaatacgtaggacctgagatccaagaactgaatactccacgctggaactcacggaaacctccagttgaagaggactgaccaccgcttgcatcaagagcttttcttttacaggatgcacgacgtccatcaacagaggaaccagctctaacactgttatctagtaaaaactcagacctaagtccattaacctcaaaatgaccaggatgaactgtaaccggattcatatcctcaagatgctcattgtattctgcatttagattgacatcacgaaccacgcggcttccattagatggttgcacaaacaaagggctcaactcaagcttatcattcctctgttcctcaaaccttccaattcccttccattgttcagtgagacttgccccttcgttcttcgtcccactagagctagcctcaccaatgttaaacctctgcaagccccgtttctcatgataaactgagtttgcaaaagtaggatttgtatcagcagctgaactcatgtaatcctgcaaatcattatcaccataattgtgaagattctcccaacgaatttgctgatctaccacagcgttactagacgtagaaccgcgctcaaagttcaaagcctttgataaagaaccaagactagccctctctccctgcatcctatcgttaaccacagttgacacttgacaaatcaagagactctcaccacttttcacaatctagcaaatcctggaaactaaaataaaaaaaaagaaaagagttaccttcacattgaaatacataaggagttatctttcagccaaagaaaaatacaatacagcaattcaagatatgcaagcaaaagtataatatacaatgcctaatcttaagaccaaaaactcaactgcattacaatctttatacttaattaatcagctacaaaagctacattatcaatttgacacatgaacatcaaaatcaagcaacctataacaatccacatagctacaacaagaatagcttttgttaataagataaagatcaaacctttagcaaactctcaagtcaaaaactaacactgcaacatgaggaacaataacatattcgtatcaacaaaccaccaatacaaacaccatagggaaaccataaagcaataaccttttgccaaagaaacaccaaacaagttcgttcctaaaaacagagatatccattcaaatatcacaacccatgctaaaatctatttcaaaaactcaatttttagtcacgagagattgtattgaatattacgatgaacaaaacacagaaagctaataataacccaccaatcgcttgaagaaaccaatcgatctgagaaagttatggttgagaaagcaaagaaacgctcttatgggtagattctttcgtcaaagacaatgagagaagaaaccgattgcagagaaaagaggtaaaaggcaaaaataatgaagaagaagagaattgaggaaagcgaaagcaaagcacacaaaccaaatgagaatagaatccggagagaagattattattattattacatatatataggttaggttcaaattcacatttatcaagacagtatatttttcaaaaatattagaaaagatggaaacttttctaagaaaaagtcaaataaaaaaagtgcagttaccaaaagacaaatttgaatacatatttagctaataaagaggtaaagaatcacaatattggaaaatatagtaatagatgtgtatatatatagttctattttttttgtaataaaatgtgaattggtaaaatgggaagaaataagacaaaaagcaagttggcaaaattaaaaactgagaagttgtctttgtctattgtctcacgtcccaaccaaacgcacgcggctttcttttcttaaattttaaagttgatgaaaccgaatccaaggaagttaattgtgaaaggacgttagacaattcaaacccgccttatatacattcttaagaagcccacggaacggcgttttatacatttttaagaagcccacgaaaagcccaaatttgaaaacttcaatgggttttatcctgaaaattccgattggattctccgattgattccatgatgaaggcttctttcaagggaaagttcgatgtcgacaagagcggtagcgttgcttcgcttaccttcaacgccggcaatgctaagctacgagccaccatgactgatgcttccttcgtcgccggtcctagctttaatggtctctctctcgccgttgagaagcctggcttcttcatcatcgactacaacgtccctaaaaaggttactccttttctcttagtttcaagtttttgaagttaacccttttagcttcaaacctataaggaatgagaaatggatgaaattgtatggagtctctgagaaagttaagagtttttggagattaaactaggttaggagtgtaaattgaagtataaagtttcgatttttatgctacagaatgttagtttacaccaggttctatttttgtatggattctatgaaaaatgagtgaaatttaagtagaaattttcggtttttctgctgcaggatgttacacaaggttctatttgaatggattctttgcaaatgaatgaaattgaagtaaaaagtttcggtttttatgctgcaggatgttaggtttcagtttatgaacactatcagaattgcagagaagcctttgaatctgacttacattcatatgagaggagataaccggacgattgttgacgggagttttgtgattgatccagcaaacaagttgtctgctaattacatggtgggtacaaagaattgtaagctgaagtatacttatgttcatggagggatagctacatttgagccttgttatgacgtggctaagaatatgtgggactttgcggtttctcataaactttatggtggtgataatctcaaggcaacttatcagacttctagtaagatgcttggtttggaatggtcgaacaactctaaatcaactggatctttcaaggtaaatactattttcacttctctgtttttgttcatagcactacttcttttggcaggagtagattgaattttacatatatcactatcccagcagttgacactagatactcttatatactgttatcttagcatttcttcttacggtcctgtctcttctcaaaatttgttctttaaaacaagcatatatgtgcatgtaggtatgagactatattgctcttcttgtaatgacatttagttctatcaagtaggttaaaaattcttaacccagccatgttgtttatctattgttgcttactaagaatttaagaaagactgaagcttaagcagtgatataaacttggtatgaatgatgcaaatctcctaatggcatgggtgtgatctttattaatgcataaaagatgcatggtgatcttgagagagtgttaacaagagacttgaattacaatcctctggttagggattaagttcctcttacttggttctggtggttgggttgaataatttgttgtaccatcgaccaggttttcttataggtagtttgggttaaacatgttaatgtgtgaatggggaactagaacttctcttgaatactgcaatcgatcttttaaacgttgtttcataagcacttagctaaaagtggttctttttgcagtcgtggttaatgagtttctcttactgtttcaacaggtatgtgcatcaatgaatcttgcggatgaactgaaaacgccgaaattgaccgcagaaactacatggaaccttgaaatgtagtctcttctttacactacttagcta

SEQ ID NO: 34226 - DNA, 720 bp, Arabidopsis thaliana landsberg
gttaattatagacttatagtattcaaaattaagatgttaagataatgtttaatttataaatatgaatcctgttaatggtaaatgataactagttaactacattgtcaaatacatatttaagggtatattgacctagctaacaagatggtcgaagaatatcaaatctctcaaacccctttaatgtaaactatttatcataatctaaatgtgttttgtcgttacgaaaaacttcaatttcatttccttctcatcaattccatttataaattatatattcttctttttaaaaatatgggagtatatgcttagttaaaactcgagtaatttgcaaaaattataataaaatcattttatcattttcagtgatattttagaagaagaaatttttttttttattaatgtgaggttttcaactttcaactttctatacataactaaatattttttgacctattatattttacagtactttttattggattaattagttatagacttatagagttatagttaataatgtttgtacaattgcgctttcatttcctcgatttagtagaacaacatcataaaatgtctcaaggccaataacttagctacaacaatgactacttattgcttaaattaccacaaactaacttacttcaacttttacaaaaccactcatacatattatatacaccattaacaatcataatcttctttcccataacgcaacgaaaa

SEQ ID NO: 34227 - DNA, 597 bp, Arabidopsis thaliana landsberg
gattatctggttatgtcactttcagccatttactgctattttttaagtattctgaattttggctgcatctactgtaggctcatgctagtgggcctgtggttcaagctcgaacctttactgccataactggtgttaatgctggtattgcatgtgttatgaaacgtgttataggcaacgagcatttagaatctgcgtaagtcttcatttctgatccttgaatattgtagcttaatcttaaagcatgtatctgtgtgtatgtgtgtgtgtgtcaattgttgtttcctggttcttacatttcatcaatgatctagtgacttaacgaattctagaaactgacttctggagctgtttttagagacaattagtgtctgcaaagctgcaactagtgtttatgtttttgcaattgtcacttttctgatcaacagtaacattgtgaataactgacataatttacaggccttaatcagattctctgactcaaaattgataccatgacaggaaaaatagattaccccttttgttctatgatcattcattgacctatagaatcacaaactcttactcgaatcacctgctatgatcattcagatactcaac

SEQ ID NO: 34228 - DNA, 838 bp, Arabidopsis thaliana landsberg
ccttaaacaatggagacacaacggaagatcgccacaaatacttgcaacatcatccacaagatccataaactcatcaggtggacgtgtttgtctaaaagcagatagacaaaagatcattagagcttctcttcttgatggaaatcccacatggtatatatccttgataccatgttgcttccaaatctctttgttttcagtgatcactatgaccctactgccaggaccaaaccacgtgatattagccaaagcctctaattgatctagactccccacatcgtcaagaatgacaagaaccttcaaatattggagcctatcttttatcactcctaaatggcatatcctaatcccctttaggttcagaaccttagaaagaaattgctcttgcaggtacagctgcaacccatacttttcaagactactattatagcttcccttaagattgtccattaaacaggtacgctgaaacttattagaaagtcgactatgtaaagctctagcgatagtacttttaccaatacctgcaggaccagagattccaaccatcttaactccatcattctctaaatctagcaaagactccatttttctcaagtgagcttcaagtcccaccatgccatcaaaatccctacacggtgtggcatttagtttatttgaaacatctcttgcaatcttctctatcatttctgcttcattgtccctaacaagtagaaacataaaattcatgagaaaaaaggtcataaagataatgttctctgttctcacaaccataaacatcattataagaagaataaactgtgattaattaaacacacaccattttaggaagtgttctcccgct

SEQ ID NO: 34229 - DNA, 1066 bp, Arabidopsis thaliana landsberg
cattccagaatgattttggtttttcttccttccttttcttcttcattgtttatcaaaaatggcttaagaaaaattactgtgttgttgaagattgaggtattatgtaaaaatttgttcatatgagtgaaaagcaaatatgagttgcttgaaaggacctgttataacacaagaagataactagttatatataactttagagcactacaatatttacttagagatgtatatccatccacatagtaacaaatgctccaacttttatctgttgtgatcactacatcttcacacaagcttgagcatttcctcaattagattgtttatggctctatacttcatcatcacaatgtttgcttcaagaaagagctgcaagagtttcagaaactgagtgatgataaaataattactgtgtttttctttaagcatatttatctggaagcatggtctgactatacagatctactaaatcagcacatgcattgggaaggttgtagggtaagttttgattagaaagggacaccattttatggccttaagatggagagtaggtccactatcagttaatgggtgaggaaaatgatggtatgacatgacaatatgatataacatgagttgctttcaatcaacctatatagtacactaagattattatggatgactatatagtacactaagtttattatggatgactagttctgaaaatgaccccttttttgcttttgtccttcaagtgcctaattctctgttttttccagcctagttaaactagtaaccacaagtcagtaaatcaacatgatgtaatcaagaattggctatggcaagttctcgaaacgattgtatgcattatgcaatcatattcaaaccataaatcctacatcatatagaaaacaaaatgatatatatgatcatgaggaagcaatgactcaaacagtggtaacaagatagtgctcgagacaaattgaataggggcaacgtatgcacaacatgacaccactcaactttcccataaacctcatggtcgttgcgcctctcagtcataaagaaatagagacaactctcggaggtacct

SEQ ID NO: 34230 - DNA, 1325 bp, Arabidopsis thaliana landsberg
aaaacgtttcgatgaataaatgaatagctctctctaacctttttctttttgtgttttaatgaaaatgttttattttggtatgtaggttgcattattcgacagctgttacaaacctgacatgcatgggatccacacaacaacacacatatctctttatatgagttattcccatttcccaaattgctgagcaaacgacatccgtaagcagagttaagactattgaaaagtgcataacaattatggttgtcaaaacgttgtttgtaagttggtttagctaataatcattataaaggtagattgtcaatggaaatatagttgtaaaagcatttaatatcaaacccccaaaaggaagaagcaatgtatcacaaacgattcaatatcttaggtgaattttgctaacttcgactaattttatgtagagtacgaatgtccacaagcaattgtctatgtaatgcaattgttccacgttatatgaagcattgctcgtttctatcgtcaactataacatttttattttcatcaaaagattgtttggattatttagtcgtataatattttgaaacatatcaaacatcatgaatgcacttcacctcccaaaataagaagtctaagtccagtgctaaatttggttagcgtcgtaatgattataaatcgtcaataacattgaactgtccaagtgtatatatatatatatacttaaatgattacgaaggagacgtctctaaattttctacgttatacgtttacacgtatagaattcgtcgtacatttaaatacacgtacatgcatatacatatttggcacaatgatcgatactgatacagtgttgtgtaattttaaatattaaatacgttataggtaatgagtgatgcaagtggaaacacttctatcgatcattgttcacatgttagtttcgttggattcaaccgattttcttataattcattatatatacattcaacttaaagaatgaaattctactttcaaatgcattaattgtaagatagcattaatttgctcatttgcaaagatactttgttatatgtgtctgattaaaaaaaaaacgaattgatgtcagaaatgagtgccacaaaatctgaacacaaagaaatacaacaaatcgtcattgtttgtaccttaatggtttgtttaagatccattgtaaaacaatacctcatcgtaacaatgtgatcatataacattataagttgatgcgtacacatggattagaaataagagtctcgcatacacacacaatgaaagaaaaattaacattgataaggtagaagaaaatatagtgatgatgataaagaccggaacatacg

SEQ ID NO: 34231 - DNA, 1061 bp, Arabidopsis thaliana landsberg
atcctaaatgaaacactctagactcgatccttaatgcaatgcaactacaagaacactctatttttgtgaatttattttctgaaaattttcagatttttttgggtctttctatgccttagatgaatgcagactcaagattatatacactacaacacacacttcctgagccctcccccaaacttacaatacacagtccactatgtgaccaaatttggaagagagtactcaggacaaaacacatcacagaaacaaaataaaaacaggagctggtatattacaatggtgaagtgaggtgcttacctcagtggaaaaaggagcggatttggtcgtcaatagctgcatgtgattgctcccaggccatcgaaaaatctccatgttgtgtctcagcttccccctgggggtactcgacctctgctccttcgtcgcggccagcaccgctctgatgatactcgacctctcttcttctgctgcggccagcaccgcggtcgcgtaagctatgggactggagaagtcgtgtactcctgctgccagacctagcgagtgcagccttcttctttctcccgagttcccgaggctcgaatgatgaatgccttgcagggactggtggtactactcggtcactaggctcaggcctgtggtgacttggctcaggcctgtgatgacttggccctggcgcgtcatatctcctcgaaggcatgtcctgaggacgctctccctgcggaatagctgtggtagaagagaagcaacttatcttgtccgtcagaaacgtgatggccttgaagcacttgataagtaacctatcttgtttcttgcaccacctctgcaacttactgccgtttctgtgagcttcactcaagctctttctctcccgcgctggaggtatgtgctcactgaagtgatacatgctcgtatcatactcctcctccctatcctcatccgtctcagcaatatcatcctctgtagcttccgtcgtagggacattgtcatcagtcggtggagcgctctcaaagtagaggtaatcatgcgcaggtctgaagtcaatgttctcaccctgaagtatg

SEQ ID NO: 34232 - DNA, 701 bp, Arabidopsis thaliana landsberg
ttgggtaaatccctaccacaacctgttgggagtagaagaacatttactagaatatattgcttaataatattcaacaatgtcgcattgcagaattaataagactcttacggtcagaagaggaaaattctggtcgccactaaatattttggaacactagagttaagatcttttgggaatttccgaaaagatccagaatatccccatgattatttcgatatacgtgattgagcaagtcttatttccgaaatacgaagaagcggcccgtctttcaaaatctgtaccgatcattagttaattgtgaaactagtatttgttggaactcaatatttgtatttatatatcttacttacttaaaaatgtgggagaattttttatacgacatcctaagaatgtcaaaacttggctagctgtcaacaatcgttttcatttaattaagggtttgacattagaggccgcatcagtttttttatttacaagaaatttctatcggaatcccacggtttttatttttgttcacgaatctctcaattaaattttaacatctgtgacagaataaaaaataaataatttaaaattctcatatgattagagaagatcccatattaacccatagtcatccaaaaatgtactttccaaatcatcattttgtttattatcgtaatgaaaagtcaatcgacattaaaagaccattttcctttatc

SEQ ID NO: 34233 - DNA, 4075 bp, Arabidopsis thaliana landsberg
tgacaactcaaaactgcgaagatctcgatatggagatgttattttggggtaattttggagaatgttcagtagaaaattgttgtcactgtgagtcttggcttcttgctacttgcattgtcttcaggagataattatctttgtcgctgtacttctggaagatcatttctcagttaatgattcactcgaagacattacatggaccagagggttagataacttacaaatatctgtatgtttttaaaagtaaaatatatcatttcttgtagactaatacaaacgtgtaagcttagtcgacaaggcatcaatcactatcctaaactcttcaatttcaacttctaatcgaagtaattgaaaaatgaaaatgtcaagcaaattgctaggaaagtgatagtgaaaaaaagaagaagaataattatacatagaaactgtttaaatttgtttacgactgagtctatagttccgcgtgaatgtacacgtctatcatataaattataaaaaaataatgatgattgaatttactacgaaacagtttctatcgtttcaattttaaaacttccttgtgttattaaattatgtcaaatctataaagattggaagatcctcttctgtatttatacaatcataagtcaataaagataaacactcaagcaaatcttggtatctctcatcaatcacacacaccgatatcggaatattctctctggtgattattttccggcgatatgacgacgagggtaaatgcagttatttccttctatgtttctttttaaaaatttatattcggtaaaactagtttcttgcaaaacacgaaacttatactctttctttcttcagcaacgcatagttttgaaaatggatatgagtgatgagaaatctatgaagaaagctatgaagatcgcatctgcaaaacctggtaaacatacatctctactctatggctttaatttgtgagccaagttaggtcacacgaatcgtttcatcaactttgttttttttttacgcgaaggtgtgagatcggtctcgattcagggacagaacgatcagttggttttattgggagaagggattgacttagccgagctaacacgtgagctcaagaagaaagtttgcatgacgactatcatcaccgttcaggctgcgccaccgcagcagccaccgcaacctcatcctatgggccagtacaaccagatgcctccggcgagaagatgtacctgtgagataccgaattcaggtttctgcggattttgtagatctatgagtcaacccaattatcaggtggtaccatcgccgtattatcccccgatgctctattgtcgagatgagaccgatggctgtagaattttgtgatgtgatttttgttgagttttctttattgaaaaaagaaaaaaacattttcttaattttctgatcatatgatattgtaaatagaaaattgttaaattcgtggtgctgtaaatgttttgttttttttttagtttttgattaattgttgtaaatgttgtgacagtggatattaagaaaataacataaagtctttggttagtgagaaaagaagaatatattgaatcgttggttttcctattacatttgttgttgtaaatgcaaatatagaaaaggttgtttatgtatagtttgtttatcttaattctttcatataaaaatgtaaggttttttttttttttttggaatgcgatcaacccagagtccccgaccaactaatgtcatatttaaaagactttgctttgttgacatctgcaatttaggactagatcgtggtccgtgaatagagatgtccaaattccaaattccaaaaaaaaaaaaaaaattccacaaaaaattaaataatatttttaagtaattccttaaactttccgtatattctctgcttcaaacacgggaagcgttaccatgtcacatcgtcaatatatcaaagattctctcattaaaagaaagtcaagaaaatgaatgaaatgaaattgtaataataactaaaaatatgcaactataaataaataattataaggaaaatgtattcttattgaattgaaattgggatttgtagtggttaatacatagtacaagcggttttatacttttatagaacaagaaggtataaataatgttatcgttatgtgcagattatcaaatactgtgtttcacaaacataaatgatacaacgtcctttttgtagagaattttcaacacaaaattctcttatctgcatcattggtttcaatctaggttcaggactagtaataggcccattagtgataataagcccattatcatactagcccagtcaattgatatttgctttctgttttgcagttgcatatttcccgcttatttttcaagccaattccgttcgtgttgaataactaaaaaaaaactgaattcttcaacaaacaacaaaaatcgcttcttaacttcaaatattgttttggaggtttcattttttcctcaaatataaatgtctccatcataaaccacacaatcatcaatccaaatttcaatcaaatatgaagcaatcagccggagttctcttcctctgcatcgttctcatctccttcgtcaccggaaatgctaattccggtatgatatccgatctctgcaaacactccgacgatccaaacctctgtctctccagcataacttcacgtcccgagtccggcgaattcgcaggcaccagcaaccagatcgagatcatagctatctccgccgcatcagccaacgcctccgccacttcctcctacatcaaacaaaagctcagcaacgaagatttggagccggctattgaggacacgcttgaggactgtcagaaaaattaccaagatgccgtggagcagctagatgactcgatctccgccatgctcgcagacgcacacaccgacgttgatgtctggctgagcgcggcgatcagcgccatcgagtcatgtggaagcgcattgggttcacgcgctgggaatgatgctgagctttcccagaggaacgaagtctttctcaagctgtgcaaaaacgctttgatgattaacaaaatgttaacttgagtatattaatcccctaaatttgaatgtactatattatatacgtttcctctctttcttatttttttggttaactgcttaatgtttgattaaagatgagattatcaagtcaaagaaaacaataacaatgagaacttcatcatttgagagttttatatcaaataaattttaataatgttgagaaaccggcccaatgtgagactgtctattgggtccaaattgttaaagcccgcatataacaagctaaacaagagatgctaaatcccaattactaccgattattcaaaaaatttagtcgatattttcttgtttaattcaattaaaaatcagatcaactcggttaatatactaattaaaccgctattttgaataagtcccacgaaaattataattagacggcgtagaaaattttgtaaaagcaaagcaatggtggaaatccaacaaaaaggaaaccgatggtggaaatctattggattcatcatgcagtttttctagtcaaaattgtttaccgaaactccaacttaatcgttgacctaccatatccataagtcataacgtaaccaattaatatcttcatttctcttcactatactcaataattgatttttttttctaaatattttaaggtgattagggtagggtattcaaaactttggtgataatcaagactgatatttttaggaattgtacagtcacgatcaaatgaaggtcatttcagagtggttgcttgtaagattagtgttggatagattctagattcaatgtcccacaaaatgacaaaacgcagatacctttcttctccacttggaccaattatatatacacacttgttctaagctttcattatttctttgccaataaaatccaatttcttcctttcatttatctccctcaaaaagtataacccttatataacaagttggtatttagaaaaatacgatcccatttggacccctgtatataaaaacctatgtgaatcaatttgaacaatttgcacatcaagatgagatcattagacaaagcttgcactc

SEQ ID NO: 34234 - DNA, 3658 bp, Arabidopsis thaliana landsberg
gggaagacgaagatggagaagaggaatatgaagaacaatttttctttttaagaagaagaagatgagaagcgggggcgaggtggtgatgctcaatctccttgggactttgcatcttactcaagctccgttggtgaagaacacgcccgccgtcacacaacgtctattgatgaaaagatctctaaagctattcagcatcgtccagttcccatttcaataaatgaagaagaagaagaggaagaagaagaagaatatgcctccgatgctgaaactgacaaacaagtaaatcttttattttgaattgattgaataagttttggaattaggttattagaaaaattgaaatgtgagttttgattgtgaagaaggagtatctttcggaaggcgatgaggcagctgagttcaaaccagaagatgctactcccaagccgttattctctacagtggatggagtttcatttcatgctgatactttcatggagcttaatctctctcgtccattgcttcgagcttgtgaaactctctgatacaagaaacctactccgattcaggtccaattcatcccacaagagtgttctaattcagttactaattagagtttttatctgaatcgcttgtgttgcacaatgcaggcagcttgtatacctttagcacttacagggcgtgatctttgtgccagtgccatcactgggtcagggaaggtgagtactagattgatggttttgtgtaatactgagattttgtttaggtatttaactaatgtatagagtttttgattatgatgatttcaatttaccttgttgtaatagactgctgcattcgctttacctactcttgagaggttgctgttccgtcccaagcgggtctttgctactagagttcttattctcactccgactagggagttggccgtccagtaagtagcattactttgcctcccataacaataataaactttcaagtccttttgattcttgttgctgaaaaagctgatttgtttctttggaatggttgcaggattcacagtatgattcagaatcttgcacagtttactgatatcaagtgtggattgattgtaggagggctttctgtaagggtatgtatttatctttctctaaggatgtatttgtctgtgtacactatttgatgtttgagaacaagcttattttctctctgagaatcgtttcttaaaatgggaatagcaagattgctaaaatctttaatgtttcttgtgtaaggagcaagaggtggttctgaggtctatgccagatattgttgtggcgactcctggacgtatgatagatcatttgcgtaattctatgtctgttgatttggatgatctagcggttttaatccttgatgaggcagaccgccttctacagactgggtttgccactgaaatcacagagctggtatctttctgatttctttgcgtttatctctttcgtacggtcggttcctgtgacacctagtattgaattgtagtcaataacttcttgtctttgttagtttctaatctgaagaagtggacactatataatttgacttaacaggagagattatgttatgctgttcgttatttgatttatatttgagtccacatctatatgcaggttcgcttatgtcccaagagaaggcaaacaatgctcttctcagccacaatgactgaagaagttaaagagctagtcaaactttccttgaacaaaccgttgcggctctcagctgatccatcagctagaaggccaccaggcttgactgaggagtatgtcagccactacttatcattttcaaccttttcaagagccaaaatatttatccacaaatagcttatgaatatacatcatgtatgccaattagctaactcgtgatctcctaactgtagggtggtaagaatacgcaggactcgtgaggcaaatcaggaagctgttcttctatcattgtgcacaaggacttttaaatcaaaagtcattatctttaggttagaagccactataaatatgatgcctttcaaatccaagttccataaagtgcttgcatagtttggcattttgtatttcagctgagagaattttttgtcccttcttgcgccagtggaacaaaacaagctgcacatagactgaaaattttattcggattagctggcctcaaagcagctgagcttcatggaaacctaactcaagcacaacgtcttgatgtaagaaacttgggcacatcagctttatttgtacatgaatatttctgttctctgtttgcaagtacttaatggtatcattttgcagtctctggagcttttcagaaagcaggaggtcgattttctcattgctaccgatgtagccgctcgagtaagtataagaagcaaaaaacttattttcaagattctcttctcagtagctctgctatttaacctcttgaacactgtctgctttgatcattccagggacttgacatcattggtgttcaaacagttataaattatgcttgtcctcgggaaatagacaggtaaacaagatatatttcctgtattatgattaaattaaaaagctactagttttgttctctttaactgatgtgaggacaatatgttttcctttgattttgcagttatgttcacagagttggtagaacagctagggctggaagggaaggttatgctgtaacgtttgtgactgatagtgaccgatcccttttgaaagtcattgtaagtgaatcatcagacatacatggatcttgcttttacccaattcattatcgctttgtttagacatttgaatcgactttgtttctttgtttaaaggcaaagaaggtgggttcaaagttgaagagccgagtcatcccagagcagtcaatcgtcaagtggtctcagataatcgatgaaatggaagatcaatattccgctgttatttcagcagagaggtttcattcacactcatcaaagaattatggtatcccaggagaattggttgatctgtatacttaagctttgaggtgttttcatcaatttcagggatgagcgagctctaaggaaagctgaaatggaatttgcaaaggtaggcagctttggttcttgtctttgttcaattattgtgggaataatttcaaattcgtgattatgggcttctttctgcaggcggagaacatgcttgagcacagagatgaaatatatgcacgcccaaaaaggacttggttcatgacagagaaggagaagaagctcgtggcacaggctgaaaaggtgttcttttaatttcctgaggttgttgttgtagagagagggatacacttgtctgaatcattctttatactttctctgaataggattctgcagggaaccctgctggaggcgaactagttagtgctgatagagcagaggacctcaagatgaaggagaagagaaaacgtgaacgcgaggtctgtttatcaagaagctcttcactattcagttgcattatcgttctagtttagtgttgattgcttcttcctagagaacttacaattctcttgaccatgcaagtacagaagaatcttcctaggaaaaaacgtagaaagctagaagctgccagagagatgctagaagataacgtaggagaagaagaggaagaagacgtagaaggagacgaaacgagagggagatcacgagtaagtatttcagagatacacatcactc

SEQ ID NO: 34235 - DNA, 3364 bp, Arabidopsis thaliana landsberg
tataacttaaataattattggaattttaaaagaactataaaattcagcgttcaagaaaacgggttataaatttcattaaaatatacagcttgttacgttcacaagttcaagaaaactactcacaagagtttaatagatcttgtaactattagaccatctccattagaagtttttcacaagagtttctcacaactaaaaaaataaaaatattaaaaatgaaagagaaagaagatagaagatagaaagtttctcacttgagaaactatgagatactctctacaactcatcatgacatttctctctttatcattagttcagtttttaactaaaataaaaaaaattaatcatataataaaactttatttttttgtttgtttggaaaactctttgaatttctaatggagatgctcttaaaaacctatttgactagataataacctgatggaatttgtacttttggaatttggattcaattaggagatgaataatgcatatcacgaaatggagttgttaatactttacttgttaagaatttactgaaataattatgattaataaataatgagagagtaggttccaatagatgatttattaattttatgaatttgtgtgcaaattgtgtcaacttcacttaaaatgagaaaagagaaaggagaccaaaaagcgatggagaacgatcaacaatgaacaaaggtatggattactacccaaagatatccagaactttttataaatcctcattgatctaaactctggactgtcagaaagaaaccaccaagtttaatagtaaaacaactacagtacaaagtgtttaacaacatcacataaaataaaataaaagcttccttaaaagatcgccagccgatgtggttgcttggcttcttaccaggagcctgcagcaccagcagttgggttgtggaatgacgagaattcccagtatgtcttcaatgagtatggctgtgagaccgtcacgccctcttccgtgatcttcgctatctgcacagttttcatattttctgttattacaatccttatgaagaacttctaccaaactaaacaaagattatacgagatgagataacggtaaacaaaacttgttattagagacaaacctgaagcttgttaatagcagatctgtcacggtaaagaagcacacgcatacatttctcaagtagcttgacaccatcttcaaaactcaggtctgcatgccactcatcacgaagaattggcctagcaaggtggtttccaaatccagtggcaacatgatcgtcctcaaaactaacaccaatcattgacacctagagagaagcaaatggatccaaatcaatagttacattcataagaaaattttatatatgtgacttgaaagactgagacgtaccattccaaggtaacttttcccatttttgacgcctccaaggacgagagtgttccacagagggttaaacttgttgcgacggttgtacatcacacgggtcagatagttgtgaatctcttttggtcccaaagagttaccatcatcccacatgttatcattcaggctgtgtaaaaccaagggcttgtgaggcttgataattgacaaggaaagattaaaatataaaaaaattgaaccaaacggattcttacgtgagctcatcaagataacggagaatctcctgaaagtcgctgatttctccgctggcaccaagaagagaatgcttaccaatagccttcactctctcgatgttcttgtatcttaaggttgatccatatgaacctgcatgcaaaaatttgaaagtgagttgatggcacaatatcgtaatttccctggtgcataagtcccaggaaaccaggatcacaccattagaacataaaagaataatccaagctacatagatataccatcaaaattattaaccgtacaaacaaatgacagctcttacttattgtgagttggtgttaagatatgagaaatcaaactatttcaatgaacatagctaagtactggttgatggttgtaacgttaattctcagttgtcatctcttgacctaattaacaatggatggcacacagggaaccgaaacaaaagcaaaaagatctagaaacagtcaagacttttcaacattattctctggatcattcataaaagaagcctcaattcttagtttaccctaaatctaacaatattaaagagacgaaacaggaacaaccaaagaactgtaacattctatgttggaaagataacgtagctaagaaaacaaatgcaagggggatgtgaaactaatctcataaaaaacaaaaagcaattgcttgtctatatgtttaggccaaaatacatattattatcaatcaagcagctaatagacataacaaaacctgttctgcaaaatagtgtttgaccctaattcactgaatcgtctataaagatgcaaaaatcaaatttgaccaaaagaatcaaaccatacttaaaaatgtagcagaaaagacactagagaaatgaaatttgaaggattcatacgcatgaaacgagcatatgtgaaacacatgatctattcactgacttgtgatgatctctcacagagaaaaagaaacagatttaaccaaacaaacaccaagagaggcaaaacaaacgattcaagcaatcaagcttataacagatgtaaatctaaacatacattgcaaaaatttgtgcatacattaaaccaatacaaatacttaaccaaataaagagctgaaactaggagctgagacatacctcccatatcagaagccatcaaagaccccatctttgtacttgattgcaacaattgaagttccagtaacatatgggtacctaccaaaatcaactaaaaatatgaaaacctaaacctaattattttccgagattcaagaacactaaaagagagattttacaatgttctttgggattcagcctcatcattcttcgctccattcccgttctcaaccggaataatgagcacgattagagaaagtcataacagatccatgagcaattggaaatttgatctgacttacagtcatcttttcagaaactcgaatgtcttaacgatctcatcttcttcttcttcttcttctttataaactcattatgttaaaatctagtccgctaaaggtcatttatagttaaacttaatgtacatgcatttgcctaagggctgctgttattttgttatgttcaaatcagttcttccaaattgtctcgtccggaattaaattaatatacttgcaaaaaaatttgttatatcttaaattttggtttttgttagttttttttggatcactaataatttgtaatgttgaattcatttggctttttttattagtcaacattacttttagacattatctattattaactaacat

SEQ ID NO: 34236 - DNA, 1530 bp, Arabidopsis thaliana landsberg
tgaatcacaatttctattgattcgtaatcacatttatataaaccagtttgacattttgtaacatgtttggtcttccaagaaaatgaggtatgatttctttatggtgagggtaaattctggaacaagagacaaactgtcatcttgagaatcgtaactaatactttccaccttcatcttcttcttctttgatttctcagtttccttggctttcttattactcaagctaagcctttgtcttcttcctgtagattcagctgttttgtgaccaggatagctcgattcagaccaagactctatgtcttcttcctccttcacatctttgtagatgttattcctttgttctctcttgttccgacctgttttcatcaaaatcaaccacaaaaagtaaattaagcactgtcttcttcttcattcttctccttaagcatcaagaaagcaatcacatagatgaaatatttaccggaactagaagcaatggttgcagatctgcgtggtgtaagtagctctttaccgtctatttggtagatgtccacggtaaagcacatatttccttggtgtgtgaaggtaagaaactcatcattacctaatccattgtcgctcaaaaactgatcccatccctttttctccataaagtagaagcttgggtttctacaaattttgataggccaagaacttccccatgacacttttaacaacatcttagccgataactcttcttccgagatgcttttgatgaagtttagagggatccctctcttaccacatacaacaagaaaaatatttgtcaagaaagagttgaaatatgcaattacactggcaatcactgaaaacttcacatccaccaagcacattgaggccaaagtttcaagttttttttttttttacatgaattgatttggtccgatcatttcacacacaaacctagcaagaaatcagaagcgaagaaagaccaaaaaaaaaaacagagcaaaattttaccaagaacaaacagatctaagttaatgagaccacatctacttcagagacccattataaccttgtaagaaccagaagatccgatctttcaaggataagcttacaagaaaaatcagtgataaagtatgagaaaattaagagaatcaccatgatttcagacgataaatctgcacttcgaaggatcttgaagaacccgggattctctgcatcatccataatctgaccaaacgctttgttcttcatcgttctctctttcgttaacctcccactctatgtctcaccacttttctgtcgctctctgatttatgactcactaattctctttctatttgttttcttcccaataatactaaatagaggagctctgttttgtgacttcaaagacacgcaaaaagcaaaaagtagtttgccagttttagtaacttgatttactacaatgacagcgactaacaacttcatttactctttaagtctcaagaattaactattgttactggtttacagccaatttttactttaaattatataattttatttactttttaatcttacaca

SEQ ID NO: 34237 - DNA, 2724 bp, Arabidopsis thaliana landsberg
aaaaccttttctcataattataaagaaaaaatttcatacttggaaaatctttctattcagtgttctagaacatttattaatgactggtactaattatcatacaatctaaaaaacaattgaacatattatactcatcaattcagaaaacacttcttacattatatggtatgcattgtatcatgttgaaccatcttgatataaacatggcaaaacgcatatatttggaaacttatataactaaatcatgatatcttattattaaacatattatatcatctgtccaactaaaagttaattcccttaatgaagtccaactctaaatattaaaacttccacaaagtacaaataaattgagtacgggacaacggaataacttatggcacaactatggctaatgcgcagtattttgtctgggcccgcattccacttttattaccataataactattggtgtgttcacactatgcgttcacactatgtgttcacactatgtatttcaatttcaattcaaaaaaatctttctcatctcattaagtacaaatttttctctctctttctttatttccttcttctcctttcttctctcgaaaagttttcttctctccttctctcttctctgacgacgaacctccgccgacgctgaatctttcgcatcagccgccttgtccaagttcattggtaagtttcgggtttgatagaaaataaattagggttttgatttttccccaattccattgaattatggtttgcaaaggaattagacttgccgtttatgataatttgatatctagggtttggattttggattttcttaaagatctagggtttggatgttagggtttatattttggaatttatccccttttgattttcatgtgtttggctatgtagcaaataatgccacttagttattcgtcaccttcttcatcagaggaacgatccgatgatccttccaagtacgatggtgattttggtgttccccaaatctgtttttgtggtaaacagcttgagcttgtagagcgtcttattggcgatcaaaagaagacatttctcaaatgtccgatgagtggtcaagatgataattatcatgtagacaagggttgggatcttgcagttcacgagcagtgcttttgcatcgacaaacgatttggcgagccccggcaattgattcaaaacgcattcaaatttaaagaatgatagtaatcgtctccagattaaccaaatccgtgctgaaattgaggacctcaaagaccacttggacaagaaagatgcagagatcgcaaggttatggatgcacttggaaagaagtaaaatgggaattgattttgtgattgtatttcctttttatgttgcaacaagtatgttaaagtttgaaactatgttgaattcctatttctagagtcatttgtactttttttacttgttttgaagtaatttgtacctcttttggaattgagttgtacctctctataaactacttttgcctgtttttgagtcattagaacctgtggtgaattcacgtgtcctaattcactaaatcactttcatcatgatattcacataaataaataccataaataccataaatcctaaaaaacaagatcaatcatcccaaataacaaacatcatcctagtgaaatacataaataaatcgttcccacaaaaacaagtgttcaatacatttttctccaaacataaaccggacccttggtccttctcatcctttctgcggtataaggtggcttgtggaatctcgattgatttacctacgcttctttttgccaccatcatccgcgtcttcaggatcctcatctctttttttcttgtcattcttcgtatcgttgcacttcccttttcccttcttccctttcttcttcgtttccttcttcggcgtctcatcatcgcctttatccactttcggtctcatcatgaacatgtccttcaaaagaaaagggaaccattcataaccaacaaacatcatatattaaaaagatcaaagattgacaaaaaaaacataccttttggagagcctgcagcataaagaacgatggcagtattcagaccctccgtctcaacatcctcgggctcaacaccctcggtctcaacagcctcaggctcaacaccctttgtctcaaaaccctcagtcttaacacgatcagtctcaacaccatcagtctcaacagccacattcacgttcttctcattcttaccaccatctttcttctccttattcacatcggaattcaccttcttctcaaatggaggcacactctcaccggcttgtctcctttcaatggttaaaagcctttaattgtgttccgccaacatctccatcactctcttaaagccttcatcgatagcttccttcaaagagctactgctgcccgaaacatccggaacatgtctcggaacattctctgagacatgttcttcctccatttgctcgccgcttcgagcccgcacatccgcttcaaacatgtccttccaccagattctcttcctctctttgatcaaacggtttctccagctatcgaaaaccggatcaacgaaacctatcccatcatcagcatcatcaccatcgacaatgtgtctcaacaaatctttctcttcgttatccggttccaaaatgctagagataacctgtacaaactcaaacatcaaaataatcatattaaagctcatagtcacatataataagatataactaggacaactcttacctta

SEQ ID NO: 34238 - DNA, 557 bp, Arabidopsis thaliana landsberg
cgttattgagtatgataagcaagtatgttgagatcataaggaattgtgtgttcacaccaattagcaacatcgatccatccttatgaattcaaagtagcttcctttagaagacaacgttcttcttcttcactaactctgtttttgttaccaataatagaaactgttgttatttatttgtccaaaatcatttcacattcaaataatgtttacaactgcatccaacaatcctctgaaattctcagaggaccttcctttagaagagacagcttcgtaagctagttctttaagtttcttagcattacatttcatcttcttaccatcatcttgaactaaaactttatccaaacacttctcaaacccatctttcgtgaagactccattgataatcgtcattccaatctcccacacaacctccaccgctcttccgttcaatctctgatccccaaaaatggcctgcaaatcatcggtacaccacccgatacactctccaacaccgagttccatccacaatgcgtcacaaacacacccgttgcttcgtgtttcagcagttccacttg

SEQ ID NO: 34239 - DNA, 1005 bp, Arabidopsis thaliana landsberg
cctttagtaatgttttagccaactatttattagttcgagtacattcaaacacctccttaatctaaaaattctagaacacatactttatgtttgggtctctaaaaacattccgattaagtttaaccgaattctgtagataaatttcggaattggccaaatgggaaaaaaacctactgacacaaagattgaaaagtgaaaaccctataccgtggcggccgaaaaaatggattaggatggttcccatgaaattataatttggatacttactgtatatttacaacacgtgttcatatacatgaacccaacatataagagaatatgttttttcttctaattattgctcttaaattcaagaagagaaatttggatatgtaccatttaaaaactacaactttatatatataccattgatatctcatttacatgtagggttcaataccatgtggagtcaataatatatatttaaagttgtaatctttaatgatatagatctaattattccttaagaaataaacacaaattgactgtaacctgtttgaccggtagagcagactacccaacagccgccacaacgctcctcctacgtttctttcttcctccacaagcctgcttgttcacctccatggctgatggctccatctcctcctgtccctaaccctctccggccctcccctcctccaaagccctaaaccccacgtagctcggtgtgtcagtccactcgcccgcccggtcggcgccgcacccatctttcggtgagcgcccgcttccgtcttgcttcaggaggcattcctctctgtatccctctctcagtctttctctcttccgtgttactttctgttccctattgggcattggcattatgttttaggttctgtttggtgcgactcgagttcgctctccgttgcatcggtggtttggtgatgatccaggattccatggatggtttgaccagtgggatcgccgatcagtgactccgcgtgctgctctttgtaattttaattttgg

SEQ ID NO: 34240 - DNA, 668 bp, Arabidopsis thaliana landsberg
attaatataaatagaataataaaaagaattggaacatagatataataaatgattatcccaaaaccatgtaaagcaatagcaaactacccaagtgattcaggggtaaacaaggtaatgagataaacaatctagggtgacctatcgagtcccatcaaaattaacctatgcatgaataagtgacattaagaacattattgggtaaaaagtggtcaagggcacaacttgccttcaatgagctcctgctcagctacttctacttgctgaacctcagaatccacagtggcttgctcgtctactcacatcgacacaatacatacatagtatagcataaattaacatcacatcaaacatgtaaataaaatatacagtaaaattctacacattaaaataagatcacaggaactgggatcattaaatttggaggtatagatttcaagttatgaatttcctaagatttaatgtgcttgaaataggattacatgataaattaattttcttactgttttcatgacaaaacagagacactaaatgatagagaatcttattacaaaattttagaaattggaatagctcaatttgaagctagaatgaattttctatgcattttacaagtatctaggtttgtttttggtataaaactacttaatatatcattttgctattttaaa

SEQ ID NO: 34241 - DNA, 833 bp, Arabidopsis thaliana landsberg
  unsure (1)..(833): unsure at all n locations
tgtcaattcgttaaaatatcttagtgagtcactgagatatgctaactttgcatggcagaacaatttgtttagaggcttcatatatattatgttggggtctttgtccttcgaaagttctcaaaaacacacagttaaccactattttccgatatatctctaagtgttgcaggtgctccggcaatagccaccttcggaacaaatcacgaaaaagatgaagacattagctttgtcataacaacacggaagaccatgatagaagtcaaatgaagctggaagaaggtgtttacaagattctaatgaaaagatgatatatatagaatacagttatacctttatgtcatttgttaaccatatgtacaatctttgtggatatacttgtaatttcatacaaagttgtacctccccctataaataggtgaacagtgtcatgcataaactaaccttccgagggcctccagcttcgtctctcttagcctttgaagtatctaatagctatctgacgtgtaaagtcgaaggtacgcttgtaaatttatatcatatggagaaagatggaatgaaaaataaggcatatgagatgagtaacggtggtagcggcgcgggtacccacgggttttagacccagcgaggccaggggcgggtacattcccccccccccccaaactccnnnggggntnngggntttggaccccggagggttttgggtttggagcgggtttttaattcccccccagggtttttaatggggaacggaattagtgaaggggcgccatttgggaccggttggaaagcaaaggggggttattatcgcccacttgaaaggaactttatgtttg

SEQ ID NO: 34242 - DNA, 859 bp, Arabidopsis thaliana landsberg
  unsure (1)..(859): unsure at all n locations
tttatacctctcggtacacggtacttactttgtaaccttttagagtgttgctactttcaagattttccagttttatttttttcgagagttactgtctgtctcatgcatgagctaccatatacaatgtcaaagaaaaagagattgatgagttattgaaaaatatttatttatacactttaagtggtaattcgttcttcgttcttttttggccaacatatggtatttctatatttatgagaaaatgtagtaaaataaagaaatctgaagtttaggaagcacaattcagtttgtacccctttgctgttcacaaaataaaacaaaacaactcaatcctcaacttttgcaaaacaaaattacagagtctatttgcttttatgaaatctcactaaataaaaatttgacttttgaaaccaaatttcctcaatttgatatcaaaataaccccaagaataaataaatcaaagactcaaggtcaaaacctgtgacctgaagaagaaacaatcccaaaatatgaagaaaacaaaaatctactcaaactaaaaaatggagaatgaaatagagagaaacaagcaaacagatcattaaaacaaatcataaagatttgaaggagaagaaagaaaaatagaagaaaagaaaactgctctgggttgttttttttaaacaagccatgaaaaatgtattaagcttctcatggggagcagaagcagcttaaaatgcactgacactgtcccttgtatcttctccttatagctgaaaccacaagaaaaaccaaagaaaacttcaccatatattctctgtcaaacaaaaaggatgtatcttaatcttccgttngcgactgtgtattaccggatcttttgttg

SEQ ID NO: 34243 - DNA, 1367 bp, Arabidopsis thaliana landsberg
ttgggactctaacaacaagcatgctcttaaacacaatttatgtttctttttatttcctcacctactttgcagtttcaagatgcagaatctcttaataataacttctgcgaaagattgtaactaaatgtatatgttttattttggttgcatttggtatttgagaaagaggaactagtgtcaccatttcagaataatttgcgaattgtttccctcaaggcaacagaaactgttacaatgtgtccgcagggaaaaggcttcgagtatttgatcataacccgttttgttaatgaggttgaacctatcaccatataagctatttagaactcttgtcattgctgaatatgtttgcgaatccattctattgtgtgtttctttgttttgtaataactctggttatgagttttgagtagagagacattcaaaaaggaagcacatttacaaagtcctaaaagttcattacagtcatcgaccaaaaggcttgttaaacaacttagctaattcattacaaccatcgaccaaagacaacttagctaattctcacacgagaatccaaagtcctaaaagttcattaacgtagacagagagacgaatcctaagttagataacaaaagaaggcattacatctccattgaaacccgagattaaaaaccgataaacctataatacaatccaatagcttcctcttcttcttcttagttggtttgagcaagcaccgaagtcacctccttcaaaacatccatcttctccaacaacaactcacatttcttagcgtccacaagcttcatctacattagcatgcatgacttaatataaaggtgagaagaaaggcgaagcttcttaaattgatgggactttacaccaaaatgagaggtgtagagtggaacacatttcgctttctattttgaattcgagaatatcatacacctgatgaggtatatgtattatcattcaagcttaaagatttttataatatattaagataagccatattcatcgatggtgtttttttcaatgtgttttgtcaattggagctgaaggatggagattaaattgatgcaatgttgtatcaacaaaatggttatggtcctcttctataagtatttagagtttgaatgtttcaggtgtgaatgtcaagtagaagactacatgcacgagtcaaccgttctttaacataaatcttaattataaatattaaaagaaaaaataaatacatgaatggtgtcttggtattaggagcactacagagacaactcaactgattttaaataacaaaaatcttaaatataaatcttaaaacaaaaaaaaatacaaaaatgatattttgataacatgagcattatatgcacatatatcaactgagtttaaat

SEQ ID NO: 34244 - DNA, 2916 bp, Arabidopsis thaliana landsberg
cgcttattttcttctttagcaaatcatggttgttaataagatctctgtagtggtcatgtttctcaatatgtttttttatattcagataacaatatatactgcagcagagacgttaaatcattacgaagaaccataaaaagaaaacccatcgacaagttacttcacaaaggtaaaagaattttttctcaaagagcactgaaaaaaatagatttggtgtttccaaggtttaagagaaaaaaacagactctagactcatactctaaatcccaaacaacaactagtctatattttgaggtggaatatggtaaggtgccctgtttgtactagttacaccagtgatagggtcatcatactccagacaggcaaatgctacttcgtcgacatcatatatatcaacgtagttagggaacctggagctgctagaacaaaaaggttcagactttgagagaaaaatgcaaagatctccaatgtcttgagtgtacacagcgtttcctttttcgtctagcttgaacaccattacaccttgtgttttcatttttaccgtatctctggtggtggccttcttgtaccgctttaccaagaaaagttcaccagtggattgagactccaccaaatgttcactcctgtagcacgaatctagaagctcccgcttggccctaggcagctcgggaaggtttcggaatcgcagcctctgaatcttgggattgtgatcctctgtgcggagatcccatgatccgatgaggtggcctccagacccaggaatacgaaacatctcatctttcttagaaaacatgacacgtgaggagaagaagctagggtttgcgatcttgatgttggtccactcggagttgcttttagccggtctgcaaaagctgagttgaggccccaagaacttgacagccacaacacagtcctcatcctcaggagaaggtaaggacattgacacattggtaacgatttgagtttggcaacgaggcagagttacaagaggaggcagagagatgcgtttagggtttgtatctgatgcataagggtttagatcgtcttggagacgcaatattccgtcctccttcaaagtagctacccagccatgagatgcccctatcgtcaccattggatcactatctaccaactccatcggcaccttcttttccaaatcagtgtaatcactctcattagcattcaaaatcacgagttttccgagacccgctccacaaggattggcgcagatgatggaacacggaggagtttgcagcgaggatgatgagaagccattagagagaatcagaacagaggatctcacggacgcaggtttcccaagtcgaagcctcgagaggcggctgagaagtaaagacatgaataaggatgttctgaatgagaagatataaaaccctgatatgttcacattttctccacctaaattaatacagagcaatggccttgcccaccaagtctttccattctccaccaagtctttggatatttctccttccattatgtcaacaagtatcattaacttcctttatctattttctacttttaatgccaaacaaacgactcaaattaatgattaatccgtggaaactttatatctctctattttggccaacactttggtttatatctcctcctgattgtgagttaaaagtgaagacagtacatcttttgataaggatgaaaatgcttggttctatcttaaacaaattttggtcatgacataattttccaaaaaaatatcttacaaaaatctcgattcgttcaaatgctagtccaacataatttggctgagattatcaagtttcaatttgatgatatatacataagcaagaacaatacacttgtacattagaaacattgtaatatgattcagtaaaatcagtcagttaaactaacattcgagagattaaatgggttctttatcacacactattctgttctatgtacttatcagctttggctttcaaaactacacgaatgatgatatattgctgcaaacaggatattataaagtttaaacataataagttgggagacttaattatgagagatgatagcaaattaactccaagagcatcttagcatatgcttatcaaacttcaaaaagaagatggtttaggaggaaagacagactcataatccagactaaacgagtcaaagatagtatgtggtggaatatgataaggggcagggtatgtatgactataactaaagagggaggactcatccagtccgaaagtggcggattcatcgaaatcaaaaagatcgacgatgttagggcacatgccaggaatggagttagcagggacacaaaacggttcagactttgacaggaaaatgcagagatgaccgatgtcttcagtgtagactgcgtttccttcttcgtctagcttgaagaccatcgcagcttttgttttcattttcacgacggccactggatgtggccttcctgtaccacctaaccaagaaagtctcatctgtagttgttgactcaaccaagtgttggcttgtgcaacacgaatgcaaaagctcccttttggtcttggtgagctcgggaaggttcttgaattgcaacctctgaatcttgggtttcttcttgtgtttgtggagatcccatgatccaatgaggttacctccagatccgggaatacgaaacattccatctttctgggaaaacataacaggggaggagtagaaacattggttttgcgattctgatgttggtccactcggagtttctttgagctggtctacataagctcagctgaggtcctaagaacttgacagcgacaacacagtcttcatgctcaggagaagaggaggacatggcgacgttggtgacaacttgggtttggcaatgaggcagagtcacaagagggggcaggggaatgtgtttgggatctaacagaacaactggtg

SEQ ID NO: 34245 - DNA, 2111 bp, Arabidopsis thaliana landsberg
  unsure (1)..(2111): unsure at all n locations
ctcaacctaatagatttaaatacaggtaagaactcgttcgtttgtctaggattggaccaggattcattccaacttatcaaaacttatataaattagagaaacaatccgactaggaaccgattcaggtccctaatccatgaaaaacgaacaaggcctaaaagattttgggcatgtttggtttcctacctaaggcgccacaatctgcctaaccttaggcgctcgaattgaagaactaaggttaggcagaaaagtttggcacattgtggcgtcttaggcaccaaaccaaacaacccctttgactcgtaggcacacatatatctaacccgaagttttacatgtgtgactgtagatttctatttcaattcgagagtagcctgcacccgactcgaatttggtttattatttattttgcanaaaaactattaaaatacatgttgggggccttcggctttggaaggtcctcaaaaacatgatttaacaatgttttccaagagaaatatgcaaacaggtaccttcgaagttagattgcgggtatacaaaagcacggttaaagacgaagcttgactgagacgaaaggtgatcacgacaaaggataagacgaacacgaagctatatgcagaaaagcttcggcataacggcagaaaaggggaacgacttaaagatgaaaagccanattagaccccgataaattactatagagttattatcaaatgcaaagggcctggatgtaattttgcatgggctgcgactcgtgcctataaatagatgaacaatactctcgtactgttcacactgacttggcatttgcttttgcgtcacgcttgtattctttatcatccttcaagccgaagtacgcttgtaatgaattgttatctttacttattcatagtaataaaataaaaataatacaataataataacatatttgatggtttgtagtgttcatgtttcgtatgattccttcttcatttttatatgtcgaatttacgaaggtatgctctttataatcttcgtccgaaagacattatatcctaagggaattaatgctccgaagagcgaaggactttaacgtttaacattctttatgttgccttgctcttaagccgaagcatttaagagcaagtcccaacaatagataaatgcggccttcacaggtagccgactggggggttgccgctaacccacgcctagaactcgttgtagtcttggaactcctggaagtctccttccacagcttcatctttgcctgagcagtggttgcaatgctgacaacctcgggatggggggggtttggtgtgtagacaagggtgagtacacacaacgtactcagcaaatgtcatgtttggctgtagtggactagctttatgtggggttaagtcaagcagttgattttaattggtcagattattattactagtagagagagccatattttagtattaacccaagttgttaacccaaaagtacccttttccaaacggaaagagtaccacttaccattaccatagtcataaacatcatcctcgtcaacacctgtaattcaaacatctctgatcaagtatctctaatcaatggagctcccttggccgctcataaccgtgagcacggttgatatatcagtttcataacactctgcagaggttgcgcactttacccacaagttgtgattccctctctatgcccgggcttgcaagacccttattcactcccaaggtgaatggccagggattcactacgaagcctttacaaagattccctgatgttgtagtcgcccgttaggttttctaaatgcactgcactcctccccaaggggcgaaccaaccttggcagagtgagccgcatacaccgagccccattaacggcacgacggcgaagtgaactacatcccagttcctctaattattcatctaagtgcatcccattccaccctcatggttgcactgttttcccgggcggtcatccaacgaacaggtcttacggagaggcactcaagaaacagctcgagtccccttaagggccacaagtaccatcatcataatcaaaagggaaaacagcgtatcatagataatctcatcatgttcattgattaatgtgaagcgctatcaggggat

SEQ ID NO: 34246 - DNA, 592 bp, Arabidopsis thaliana landsberg
tcataagattacatgtcctttagtttatgtgttgtttggtcttttgttttagatggtagcaatccaactagaagacagaatgaaactggttcatcacccattcaatatttgtgatttaggctactttcgaaaattgggcctattgggctattgtaaacttgaaatttaattttctttcgtttttggaggtctcttagccctcaactgaaataatttgatctaaattacaaagccctaattagtttcccaaaaaaaaaaaaaaaaaattaataagccctaatttaatacgtgtgtcactattacttaatacttattttcgactaagttctttttgcatgacgactagttacgttcacgttatttaacattcaagatacatgcattttgcgttatggaatgcaatgcgaaacccaaacataataaatactaaaacaagacctcaaagaaaaatatagaatataaccatattccggacatgaagatcgtgacattggtactcgtcgtcttcgtcatactttcgacatcattcccggctgccgatcaaagccgaagacacgggagatacaggaaatgtgggagtgacatgtgacgc

SEQ ID NO: 34247 - DNA, 628 bp, Arabidopsis thaliana landsberg
tagaccagagcccgaaatgatgattgcatctacctcgaaggtactgtaccgagagttatgtctgttgatggagcgccctttggtggcatgcctcatccagacgacccgcatcttttcatcatttccgatgattacaagattcgaccattaaggcgggcaacaatttagaaactagagtgccttcaactgcaacgtaagttccatatcaaacattgctagactggagtcattttggagattatcatcgcactcaatctccgactacaaagatgatcaagcatatcatcaactaactatagtactatacttgtatggaaaatacaattattcgttccgtccacttacatcgagatctcggaacctccccatcaccatcataagaatatccttgccaacaacttttccgatgattgagctgttctccaacttcaacaagttcttcacatatggcactacaacctgcaactgcaagacaataaaatagttttgtcatttcgttaaccacatgtatgggacagctgttacattgattttaacagaataaaaaacatacgcgagctttgtcgcgtacgctaggcatactctgggcgagtatgggcagtaatatagagggagcaaggggaactaa

SEQ ID NO: 34248 - DNA, 1172 bp, Arabidopsis thaliana landsberg
gaaaattgctgccaaaacacatcaaatatcaactttttcggaaacaaatatccacgcggattgtatttttttttttattactacactgattaaaaaaaattaaatatattttatacaaaacaatcaaaaccaatgacagacttgcaaaaattatacatagaccaaaccggttctataccacccatcgatgtctaagttattggtataacaaggtctataaatagaaaaaaaactttaaaaattcttataaaaagatgaatcgtttaattgaagataaggtgggcgatttacggtaaagcaaggtttataataatgttaatttatacaatgattgagagtaattttctttatttaatatgtagcagattccaatgatggatatacacattcctcagccgttgatggagatcatcgttagtaaagttgctgaagatggtgttgatgctttaaagaactggttgctagccgggagagagggaaatgatgctattatgtcgacgaaaaccctagcctctgttcgcattaacatggacaatcattttatgtggtggtcaatgcctcattctaagtactacagtttcttccaaaagtatcttgccgcaaataatccgtatgcaaagtttgtagagaagaacaaaggactggcgtatgagtcgacaacagggtactatcagatgagatgccgtggaatgttactcacgacaaacccgtgttcattgacatgaaaaacgagaaaatgtgcattatgcatccttctttccagccaggaagaatggtgaggcgtacgtgccctaggtgtaagaaagttgggcacatatgcaaaaggtgtctcgctttaggtggatctcatgaatagtaacatctatgggtttttgtttttattggatagtaacatctaggtgttttttgtttttgtttttgttatataagattaagttgaacgggaatgtaaaccagtaaagattgtgatcgttaatttacaatgacatctaatgtccaattttgatttaatcatatgttctcattttcgttattggaaattgtttcgtttgttatccatctaagtaaacatataaactccaatgcatgaagtcttatccattaaatgacaattttgtatcatttatataacgaaaattgtttagtttgttatccatataaatttataatgg

SEQ ID NO: 34249 - DNA, 377 bp, Arabidopsis thaliana landsberg
gatttataaaagagtttggatgcaatttctccatccaacttcatcattagcagcatacataaaaaaaaatctaaaaatcttatgagaatgagtttgtattttaaataccaaatttaacatctgaacttgcttgcaaaagaaaacacaaacatgtgaacttacttatatgcacaaaccaatagcataaatgttagaacacggtaacctaaaaacaaagagaaaattatctttcatgggatgcctagatccttaagttatgttcccaatattgctatttgacaaattaaccatagtttttattaatgtagataatcaattactttgggaaatcaacttgaaaagcaagaatcaatattatctatcataagaatattcta

SEQ ID NO: 34250 - DNA, 1771 bp, Arabidopsis thaliana landsberg
gattaaacaaatttataaaagataatacaatgaagagtaaaaatgattaggattttttaaccattggtcatcatcatcctgacaaattcatcataattgacttggccatcaccatccaaatctgcctcttttatcatttgatcaacctcttcatctgttagcttctccccaagattaatcatcacatgcctcaactgtaattatatatcaaaattacaaagattatagaattactatctactaatgatgtttattgttaagcatggatcatggccaatgcataagatatcgtccgtcgaatagtttttgtagataaataaatctatgaaattcagaaacaaaaagatagggaaaaaagagcaactctaactaaattgtaaaaataaatgtaatagatgaatactagtctttgttgagttcttatattccaagagcaaaaatgttgaactatatattcgaacgaaaatgcatgattaagaagaagaaactgggtgtgaaagtataaacatattatttacgcttaagtgagacatatgctctgcccaataaaccaatagaatcataaacacattttactaaatgttatcaatatttttaaatatttcttttgacctcgttatctccaaaaagtcataatgccagctagctcgaagcctcaaacaatttagctttttacgacacaagacacttttcaattaattaagaaaaacataattagccatatcttgttgtcattttctgctccaagttatgaataagacacataaaggatctcttgtaaaactcgaaatatcgtctagacttgtgatctgatgttttcattaattcaaaagattctaaccttgatttagctatcaatttgttgtcattttctaactaaatgcacaattgttgataaaaataagaaaatacataaatctaaattccgagcttgtgttctactcaactcaagtaaaataaaaaattaaaacaatttgttttttgaaaaattggttcatgtaacgaaactagacaaagtaatactacaatcagttagcacataagtaaatacatactccattttatgcttccaatcattaattaaaggagtattagtatgaattagaattaagagaagaaagagtaaattatttgcttgcctcactggcagagatgtaaccattttggtctttgtcaaacactttaaatgcttctttcagctcttcctccgcatcactttcctaaaccatcacatgatcatgacaacaacttaacatacaaaaaaactattgtcataaaagtctttgtttacattatacacatttacgtgtctagttcttcacaaatcagatttattcgtagtgaaaaaccgaaagcaaaacagattttgctgtaatacaaaagctgaatatttccaatatatttcttaagagtttttaataaactagaagcataatgaatgagacagctccattttgactagaacctgttaggatcccatatcaaagagttacaataagggacctataacataatatataagaaatcatatagacaaaaaaatttcacttgatgtaactttttggtttgtacgtggctacgttaacttgatgtaattagttgtgaaataaataagcatgagagatcaagagagagtggaacctgaagttttttggccatgaggttgagaaactcagcaaattcaatggtgccgttgctatcagaatcaatctcagtgatgatatcatgaagttcttgttctgtcggattctgatccaacgaacggatcact

SEQ ID NO: 34251 - DNA, 1582 bp, Arabidopsis thaliana landsberg
gatccccgcgatggatagaggtatcttgtttagcgatcccactaggctgtgattttgaataaaacgaaagatgtatctagttagaaggaataaaccaccaaaaaagcaaaaaaggatatagggaaaactccatgtttctctctcgctctctctcgctaatttgctacctgtatgttgttgctccagtttgatgaagaaaccacattgaagtaaagctaatggcaagccctagaagtccactaagtgtcatgaccatccagaaacttggtaatcgtagaagtggcctgcacaaatataatacaccattttgttttcagatgacacaaaccattttccattgacaggaaacaaggacaggaactcacgtttgatagagataatccatctcgttgaagaaataagaaagaagaagcccaagtggtaatgaaagtgtgttattaagcaagaccatgcagagctcgttcaagtctccagattgagtaacctgcttggccgtatccatggtctttctcaaagatagctgcaagacaccaaaatatgagcaagtcaaaagtgggggcaaattttatgagtatagtagcctagctagcaagccaatcacttggtttttgttgacaggatgtagggataaatatatgggaacctaacagtctaacactctcgttttttgacccagcaatggaaaacctaatgagaactgagaagttgatgatgtcaatttgcattctttgccaaaagtcttctctttaacatgctattcttactttcaacaacgagtgaagtactcaggttaccggtgacaatggattgcaaggctatataattttctaaaggtaacagaatctcggtatctcgtgagcatcttaaaactcaaaagcaagccagtatcgtaatgattatagggaaggctgtttagtttattgacttagtcttaaccaaaaagcatgtaatatattgtgatctccgttgcatatctgtgtttattgtttcaaaagactcccaaccttttgagaaaagaaaacacaaatgtgatcaaatgtttactcacagagtacgatgcagttaagaagcaattagcaatctgccaagcatagccaacagcattgaatgataggtctgttattcctccagaaactgcggaaattatctgcacatgaaggacgaaagaagtacaggttaatcaaaactttatcctctacttattcaagatctatactaaaacaaatagaatatacatataacaatgagtggccgtgacaaaaaaaaaacatgattacatttccctggaagcagtaaaaacatgtatctccaacagtttttgaaaggttaggctatgccacatcactgaaagccgctacgacaactgtaactgtgtacgcacacaaacgggtgggtcacttatcaataagaagatatgctttagactttgttggttaaggtcgatgttcagaaagtgctttgagaaaacaagagaaaaggaatatttcgcttaaaccaatccaaatcaaaatgctttctatgtgcagcttgaaatagggtctttgagaatagttttttctcaggtcaatttacagaatcaggt

SEQ ID NO: 34252 - DNA, 1240 bp, Arabidopsis thaliana landsberg
gacatgcaaacgtcgagttttgttgtctgttctcccatgcttgtatggaaaatttcagtgattatctctattaaatgggctcctgacggttaacactaagctttcactctatgtttttttgcatctgaatgttccagaatgacttggaagagttttttgccatggtcaacttcacaaatccagggagtttaggtgatgctgcacactttcgccattattatgaggtgacaaactttgaattttgatgccaatttgatcattctgtattctgtcatctataaatatgttaaagataaattcttgtaggctattctgtcatctctaaatatgttaaagatcatttcttctaggctattcttggctaaaagttaggattagcccaagttattttgtagtgtatactttgctactatatatattctgttcgtttccagtattgctgcttcatgcctttggattccattacattgtaagcttctttaaaaatagtctgtgctgagagaatttgtttacgctgttatctgtgtcatacaatttcagttcaattgactataggttgtttatgtttcttgcattaccttcttttgatgcatccttgttttgatgtatgaaacctaaggcacctattatatgtggaagagaacctacagccactgaggaagagaaaaacttagctgctgaccgctccgcagaactgagttcaaaagtcaaccaggtgattcttcttagcattttatatctaaatatttgactattattaagctttcatcatcatctggatatatctcttaaaagatatgcaatttgcttagatgattttggtatgatgatcaataaagagcatcgctactgaccttttagaattgttgcttaatttaactgctataccttattaagctttcatttttttacagtttattttgaggagaaccaatgcattgctctcaaatcacctaccacctaaggtgcttttccttctgtatccgccgcaggcttgcaatgcagtacgcttgtgtttcagtagagcctggtcagcttctttgtatgctgttctgtttggtcatattgagtaatacctggagtgttagcagtgatagaatcatagtgtgagagtgcggatagaatgatcatctgtgtgatagtgttatcgctttttttagctacaagttttccccgcaagagctttctttgttcttaaaccaattaaacatcgtagtcttgttgttggatgtttcacaga

SEQ ID NO: 34253 - DNA, 1757 bp, Arabidopsis thaliana landsberg
agcatccggtctatccccataaaagcagagcgaccatttattttaccataaatgtctcatcgcctggacaggggggaagttcttatggcgaatctggtcggacgaaaggagagaataagctggagaatatcatcatgcaacctactgatcaagtcaccaccttctttgatgtcgtagtgacgatagctagagcttcctgtagcggccgtggccgtgaccatctttagtttatcaactgatgacggcaaaagtgttaactttgaagaaacgtgacaaggaatcaaaggctataggagatgttaggaatcaaaggctctaattagtctttatcaacttcgtaacgacccaagcttggcccattgtgatcaacaaatattttaaggcccattttgatctacaaatttttttaaacgggctttctaaagctaccgtggcggtggctcgttcatcatccgtcatcttaagcgttcctgaagatacgtgacaaaaattctaggagagtgcaaccgtatacgtgaactaatgggctattttgaaggcccagtgtgatccacaatctttaaaacagaccggataaatgtatgttccttccttgttatctcggtcaactttttttgtttttttttgtttggtgaaatcaataacgtctttggctttaaacctttgcgactttgtgtacaaattccggagtgtctttctcccaaatcagcatcgcagattcgatttctcatcctaagagagctgaaaaatggaggttggattcaaggcattgctcgatgatcttgatgttctcgagaaatctctctcagatccgacaatgcaccacaaggtgtttgggtttatactgccgatctcgtttttcttaacgctgtgaattttcttagtggatgatttcttccaatactgttgattcctcgaggaattaatactcaaattgcgtttcatggattatgatttttccgttgggaattttcacatgcattggtgtttacgagtgtattgatttgactctggaatcttcgaattaatttcacttatccttgctgcatatttgttaaatgtcaaagccttttgttgtttgcattgcttatgaattctcctgacaatgtgtttgggctttgcagctgcgatcacatgttgagaatctagccactctgtctaaatgtaatcctcaccggcgttccaaagtcaaggtcttgcatttatatagtcacaaattcttctactttattcttctgtgaaacgcttctgatttcaataggaacctctgtttgcaggaactaagctcggaagtggtagatagtaatccttacagtaggctaatggcacttcagcggatgggcattgtggacaactatgagagaattagagagttttctgtcgccattgttgtacgtgtttctctccttgtttttttttgatattttccttgtttatctataagtttgttcattaagtaaggattatctaaatgacagggaattggtggtgttggaagcgttgcggctgagatgcttaccagatgtggtattggtcgtcttttgttgtatgactatgacactgtggaactagctaacatgaacagattgttttttcgaccggaccaggttcccaattctcatttgagttttgcaatatatcttttcatcccttgattattgtttctgatccccggataattgtgactataggttggtatgacaaagactgatgctgctgtccagacccttgcagaaataaaccctgacgtagttctt

SEQ ID NO: 34254 - DNA, 1739 bp, Arabidopsis thaliana landsberg
  unsure (1)..(1739): unsure at all n locations
ttagattgtttctttccaaaaactcggggaaaagattatacatttgatctgatttcaataatataatctttgtgtgcaggagaagattatgcttagtactttgcaattcaatatgtcgtnnnnnnnnnnnnnnnnnnnnnnnnnnnnnnncctcaaggcagctcaatcagacaagaaggtaaagaaacaaatctatcaatgtacacaataatataaatggattgtgaattacaaactaatcttgttattgaaacagcttgagatcttggcgtcgttcttgattgagcttgctcttgtggactacgaaatggttcggtatccaccatcgttactcgccgccactgccgtgtacacagctcaatgtacaatccatggcttcagtgaatggaacagcacttgtgaattccattgtcactactctgagaatcaactcctgtaagtctcttttacccattagcacctataaagactcatctttgtaactaatatgggtttgttttacagagaatgttgtagaagaatggtgagactacatcagaaagctgggactgataaactaacaggagtacatagaaaatacagctcctccaaattcggatacatagcaacaaagtatgaagctgcacactttcttgtgtcagattctcatcattcttaatccaaaaggacagtagtaagtagtttgtacagcttcctgacatagttccctcattcactctgtagcacaaataagaagaaacaaaaaaaaaaagccaattaaatttgtcttatgattgattctgtttttttgttgttactctttgttcacttcacttgtcagtattaaactctacaatgaatgataaatgattgaatcatttcattctttgttcagaatgaaatgtattttgtatcttatttgagctaaatacaaaaacaacgtcgttttcgttgttttcactttgacttctctttagatctctctcccaccaactctcttcttcacacttcactaaacttcagatactttttgttttttcctcaagatcaacgataatggcggcgtcaacgaactcattcctcatcggaaaccaaacccaaatcccttctttgaaacccaaatcaatatcccaatcctttatccacttcactaaacccaacaccatcaacctcaccacccgaaccaaatccgtttcaatccgatgcgcttccgcttcaaccaccgtcggatccgagcagcgagtcatcaatttcgccgcaggtccagccgcattaccagaaaacgtcctcctcaaagctcaatcagatctctataactggcgtggatctggtatgagtgttatggagatgagtcatcgcggtaaagagtttctctcaatcattcaaaaagctgaatctgatctccgtcagcttctcgagattccatcggaatattccgttttgttcttacaaggtggtgccactactcaattcgctgctttacctctcaatctctgtaaatctgatgattccgttgattacattgttactggatcttggggagataaagcttttaaggaagctaagaaatattgtaaccctaaagcgatttggtctggtaaatctgagaaatatactaaagttccaacctttgatggattggagcagagttcggacgccaagtatttgcatatatgcgccaatgagactattcatggtgttgaatttaaagattatcctcttgttaaaaaccctgatgggggtcttattgctgatatgtc

SEQ ID NO: 34255 - DNA, 1781 bp, Arabidopsis thaliana landsberg
  unsure (1)..(1781): unsure at all n locations
acatcgagagttactgaatcaggtaagctttaagttcacaacattcataccaaattcggagtatttatttacctacacaaagaaaaaccaggggaataatgatccttccataatttttgtttgacatgtaaaaaaccaggaannnnnnnnnnnnnnnnnnnnnnnnnnnnnnnnnnnnnnnnnnnnngtggatcaagtagttctaacagttctagtagtgactcaggatcttgctctagtggtaaatgtttaaactctgtgttaagctcttttaccatattagcatcacaactcacataagttttcttctgatctgcagatactgacagtgacagctcctcaggacgtggatcagataatggtaattaggccaacaagtcgaaagtcttttagctttagagtcagaaccgtcatgctgtttgatctctttcaatagcacagttagattgattacactaagtcgataactcttcccaaaaggattgattcctgtattgcgattttttactgtacagaaaaatgaaaccatttaatgttttcttcccctgcttttggatctaatcagcatgcttgttccttgcttcttgattggatcaattgattgtttaaaagcagtaaacgaaactagaaggaacagaaagaagaattagatatttccatattagtaatagttacaaactaaatattggtattcatcatcacatgagtctcaccaaaatagaacacattatatcttacaaaatctcccactcagaatcttctgatacaactggcacatttgactgcgagcttctggagtctatagatgttgtagactgttccttatcgtttaccagatcacaacccatatctgcatctccgaaccatatagcaagctgttcatattccatctctcttcttcttttcgatttaatagcatccattatctttctctgatgattatgataaagaagaaacatattaggaataaagacacagggagaacagtattcaattttatgacagatacatcatgaaagagaaccttgaatgatctgagttgcttagtcctgtcacgcattgcatatagcacattgtcgtcaaaatctgaggggtcttctcgaaatgtcatgtcatacaaatcaatggtatccattggaccaacatcgaagtcttcaatgaagaactcatcttgattacctacacaataagagttgaacatgatgaaacttacaaaactgcagagagaccaatcccaaaacatgtagaaaaagatgataaaactcacaaacctttcacagagttgttgcgtaaaggatctagtgtttgccattttttcttgaacaggtgaagctggagtctctgtcgcgaatgggattagatttgaaacatccctagaaatcccagagacagatacaaaagtatcatcatcacatgttattggagtcctaaaactttccggggtctggtgagtagattgagaagatactggatctgtgtgagaacaggaagtggttgttgtttgatcacaatcactgtactcttcaagcttctcatctatcaacacagagtctgataacttctccttaaaaccatccccctccatttgttcctccctgagtttctctggttcatcctttacagaatccaatcctgaagaaacattaccctgtccaacatacgaaccaagagacttcaattacttctactccatttttaaaccatcaaagactcgagagacttaggaactagcaaaagtacctgagatgccaatttacgggagattttatcataccatgctc

SEQ ID NO: 34256 - DNA, 6723 bp, Arabidopsis thaliana landsberg
accatggccgtctaactctctgctcacctttcaagcaagccactgtaaaaaaaaagacatttctttccatagttaaattcctgcaacaacttaagctgagagttatagagagaacgatagagtacctttaatccttctgagttctttacagagggtgatgaagtctccccacttcatgtgatgcctccttatgaagtgaaggatctgctcggtagtaaacacagacatgctttctagatattctccattgacaccattttctttgaaaatctggcggtagcccccaaggtttatctcctcgagccaagacccaacatcctgaagaaaaaaagaacaaagcttctcatctacaagatgctcgccattacacacgagcataactaagaaaatccataatagcatctgatagaacaaaaccattcagcaacacacaacctccagcttctccatatgagtggactaactcttaactatttttggtatcaggcacaggttatcgagttttcatcaactaatcttcatccaatattcaaccttttctgaagagcaaatcaacaagtgacatatgcgaacatcactctgcagtctacacaccctgaggtaaaaccacttccggagtatatgtacatcaacaaacacagattccttggactagagcgacaagtaacatagtaaactaaatgaccactaatggaacttcaatagctagaggtgcgtcaaattcgagcttgcctgatgtaattgcaatcattaaggtgagatttattcttgtaataacaagcagagtaccaaaagagcaaaaaaaataagtaacatagtaaactaaatcaatcagtgtaattggatcaaacaacaagaacaagcctaaggcaaactagggtcatacctgaaaaaagatcaaatcaaccctgtaactggttaaataggctgaattcagatcaaaaataggctgaagaatttaataaacatgattctgcaaccaacaagtctaataacgaagagctcaattccaagaaacatgcgaattgaagaagtgatcatcatgaaaggcttataaagaaggaatgattgattgaatatacctcaacagtccagatgaagaaatcaagaggctcgggaggatgttctctggtcatcctttcctctgcacaaaaatcccaatacaatttaccagcaatcattttacaaaatcccaaagaagcaacatatcacatgaatttcgtgtaatccaaatcgaaaacgaaacaggagaagagaaagggggggaaaagaagaggaaatacctaccgaagcgacagctgtgagatccgaaatttgagctttgatctgagtgattttcttggggagagagacagaggaagaggaacgggattcagcgaacttaactgtgccaaaatgcgtgaatttttagggtttgaagagagagagagagagagagatgagaagagagagtctgggggagggacaaatgggtccaccaagtgaaagtgtttgcttttttcctctcttttggctctttttcttttcctccacgctcctctcccgcctccacgcgccaccgtctctccgtaccacgaccatttttgctattaaatctttttctctttttttattttatttttagaaataaatatttttactgtcaaaattaacttttacagttaaaaacctttaagtactgtagttatcaatttttttgtgtatattttattagggtaaatcatagactaaatatatttgattaggtttgactctttttccataatgaaaacaaaataagagttagtggccaataagaaaagaaaaaatcactttagtcaatcaatttagtttcattttcttttccaattagttaaccgactgattttcaaatcttactttttaattgtttatgctagtcacaatttaaatgtggaaacgatgttagttgattcgcaaaaacagttatcaatatcattgttagttagttcatcggaatatacgtaaattcgttgagttttgccatttaacgctttctatttgctccctccttttgttgttttgtagtatgtaccatatcataattctatgacataatagatgactaccaaattttctctgccagcttgcttgttatgaaatgaaggaggaaacaaatgtgaatagtatcggatttgggagttttacagaaaacaattgaatgtttcaaagccatttttaccaaacccgaagctgagatacacgtgaccaacactgctcacacactcttttgacctttgagcttaatcatggaccaccaatcttctcttttttccaagtccacttaatttcatttgctgacctcatctccattctcatttcctcctcccaaaatatcacaaatccttttgtaacttgttatgtctttcactttaaacacagagatccaaggaacgcctcttttaataatccctagatgagatataatgttactaatactataatggcaaaaatatcacctttactatcacaaagcatggaacattagaacataggaaaaaggattttgattagcttaatctgttctgacttcgtataagattttccacagatacaaatattgttgatcccttgctaacatgtttcatcttgaaactttgattctctgagactcaagagtcaagattcgtcttcgcaggcctctgcggctgaaatctctgaatcaagtttgctcatcagagtctctgtcacatgcttggcaacagagatcatgtcaaggatgacgcttgggtctaagccagacccgcctcgtttggttaacccacatatatggcctgtccgattcacagatatagatacagctgagctcatctgagactcctcttctgctgttgcatcaactatgtaatgcgttcccacctgcaaaaaccaaggacagcatggtaaaagattagcgaaatgtacataagaagatgtcgatgtgaatcaagaaaagtgagattcgattacttttgttaacgtgactatgaccgggacactggaagtgtcaaattgaagatattcctcgtcgctgatgtcaatctctggttgctcatcatctgctacttcagctgaaacattgacttttgggatggccgtgttggttaaagcagcctgcaggagtatagtcaacaagtgcattaaagcatgtgatcagccttgaggaaagatgacttttgggttgcttaaactatcaattggaaacatatcgtaaagctactaaaaccaataacaagacaactacattgagctaatctatatacacttaactaaagacccattccctttcgtttcctatattctctggcctttcctttctcatgattctgattgatgggtatgatttactcactaacattcgtaactaaaacctgagactaagggttaagagagaaaaccaaacacacatcacaagaattaccttaatggcagcacccagggcatccaatagattcccatccgaactaatgacaagaccatcaatataaaggtcccagcaaacttttccttctttgattaaaagcgaagataaatttattccagctcctggtaccaaaacatgaattgctataaacgttacaaacagaaagcgtaacagtgtgcaggtaaaaaaaagcattgcataaacatgattgcagacctgctccacttttgccacccagaagacatctttgaagagccaaagcaagctcagaagacaattcctcacctcctctcccctaagtaacaacatatcacaaagaattagccgcctaaagacttaacacagtagaatttaggagattctgaagaaaagtaatgataaccaaaatctcatgttgaacaattccactagtaagagaaacaccaatagaacgatagaacgggtgtgacaagtgctagatagaaccaaaaccaaacgaaataaaagaaaagctcaccccaaatgtcggttcagctgttggactgcaatcaatgaaaactgcaacctttcctttatcgggttgaagtgaacttggcctcccaatttcagcctgcaattacacaagattactgggtaacatctacaatagcgcttcccattcaacaatagaacagtagcagagagaacaaaggaagtacctttacactagcaatcacatcggttccaccaattctaactctcgctgaaccattagcctagagccaacaaaaacaagagaaagaacatatctgttaaacaactgggaagcaacaatgagaagcggacgagctctaggagattacactacctgcggaataacaccggtttcgacgtagataggacggtaagtcaatcttttcctaccatcagttcgaagatcttgagcaatcccacctttaatgaaatcgttgttccccaagagaaagccccatcactaatactacacagagaacgaattagatcaactgctgaggaatttctaccggaattacaaacttcaaggttcacggattggtgctagggtttaagagacagctcaaacaaagtacacatctttatacagcacaatcaaaacccactaatcttctttaccttcccggagaattcaatagaagacacaactctgaagttttccggtgaccctagcggcaactttggattggttaggttaagagagagacgtgaccactgacaactgccgtagggtttaaagatggcgtgaacataattattgacacttgttaagggtaatttagtcatttaccgacttaccattttttcactgctttttagcgttttctcgctcttctggttttttcttcaatctgccgggaagaagtgcgagcttggtgccgatgggtcgttcgaaactagcttctcgtcctgctgaggaagacctgaatccagggttcgtttaaagtttcgttctttgtccatcttagctcgaagtcgtctagggttttctctgttcaattacttgtctttgcgaaaacatttcaatatctggtaatccacttagctgtgtttgattatctgaatcggagttcttttggtacttgtgggtggctcttgatttcatactgctgtcgtctcttgtctttatcctaattttgatgattttggctgtttcagaaaatcaaaaaggaaaaagatatcattgggtcctgagaatgctgcggcatcaatttccaccggtaggtttccgtttacttgtgcaattaggtgtgatactgataggactaaagtttctgctgtggatagatatgcattgatgtatcatgtaccaagctgcgttttccaaaagttcttacatgtaccaatacattgtaggaattgaagctgggaatgagaggaaacctggcctttactgttgtaactattgcgataaagatctgtctggtttggttcgtttcaaatgtgctgtttgtatggactttgatctttgtgtggaatgcttttctgtcggcgttgaacttaatcgtcacaagaacagtcacccatatcgtgttatggttagtttccaacgccgagcagtatatttgaattcaattcaacgctttgtcagctgaaaagtaattagattagtgattgtgtttaaaacaaagaaaatgttctatggttgtatttttgtttgtattgaatctacccttttgtttgacaggacaatttgtcttttttgcttgttacttctgattggaatgccgatgaagagatactccttcttgaggtaatcattaatcgtttctgattgtacactcccatgtctatatagagattccatctgactattgggaagtaaattgactgtgttaggccattgtgacatacgggtttggcaattggaaagaagttgcagaccatgttggtagtaagacaacgacagaatgtattaaacacttcaattctgcttacatgcagtcaccatgctttccacttccggtaaggactgatgaaaacacatgatcgtcagatagttgaacctagcttgtttatttactctagctccccgctctgtaggacttgtcccatactattggaaagagcaaagatgagctgcttgctatgagtaaagatagtgcagtcaaaacaggtcagctttaaaatctattagcggggtttcttgttgatttgggactcgtatattaaccttgactgaaaaaaggaggatgctgagctctgtttactatttgtcacagaaatacctgcatttgtgaggctatctccaaaagaagagttacctgtgtcagctgaaatcaagtatatacttatgcttgtaacaatagtttacctacgtttacaatgttgaatgcatctttttaaaagtactattatgtttccatgggcagacacgaagcttcagggaaggtcaatgaaatagatccacctttgtctgccttagctggaggtatgtgaaaatgcttttatctatataaaattgtagacattatttgcacttagatttatggctaaggacgcaaatcatccgcatttcatactacgaccccaaatattatctcttccatgattccatatgtaaagtaatactttttattgtacagtcaagaagaaaggcaatgtaccgcaggctaaggacatcatcaagttggaaggtttgttatatactggaacaagtttttatgcaaagtgatatttaagcgaacaaaaactaaaggtagttaacggcccttgtgtcttagctgcaaaacaacattctgacaggagtgtcggggagatgatactcagacttcctggagagaaagttccattagtaacagagttatatg

SEQ ID NO: 34257 - DNA, 851 bp, Arabidopsis thaliana landsberg
  unsure (1)..(851): unsure at all n locations
tttgctttcttctcaaaattcaatgtctcgtatctcaacccgtcgatacttttcttcagttcacaagaacttttaaatatgcattgtatcttggggttatatgtggcgtaaaggcctgtgacctgtcgattgtggagggaaatggagtctataaatgcaacctgcaatcttagaattttgacaacattaatgttccaattttcaacagacagctatatatggacgaatgaccaacaattggaccgatcagacagactcgtttgcgttacattgccttctatcttttcacctatgttttccttatttcttaattacgaaggtcgaaaagattttaactaacaccaaactatgttcgattctaaaacattaaatgatgaaacattgaattataacatatgaattgtggcctattccactaagtatcattgctgaactagtaaaactcttagccgaagcttaaaaatcgtagttcgatattttttgaacgaaactaatattacatgttgtggtttcgggtctggggggattacagaattcgacccagaacctcctggtattcaaaaaaaaagaaaaaaaacaaaaaatgtggctggtggttctagtttggacctatttcttacatcacattctaaactcttgatatttttatttttatctgaaccgttataatattttcaatcgagtaaattcttaaaaggtgggtatatatatcttttatatagctggtcttataccatgttttttacagctntgcattggttcctgacagctaanaaatttgtacaactnttggttgctaatcagatttagtatttttatactcataaacgcantatttttcattaataaat

SEQ ID NO: 34258 - DNA, 1105 bp, Arabidopsis thaliana landsberg
aagtgtgtcgatcagatgttgacatgtctttgaaaagagttttctttttgttctctcttaagaaatataaaaagtcacaatagaaaaaatttacatatactatgtgtaaatctaaaaaattaaattttaattttattaaccaaaaggaaaattaacaaatgttttttggtcaattaactttagcatgtctaatttctttctaaatcatttagtatgaataataactaacaaaaatgcaatctgatatttgtattgtaaaaaatgtttgttttccaaatattttgtgtacctaggaaagctctacccaagattagaggatccttgagttcttcgtcataggccaagactacaaaataagtaggaatgctgcaattgccaactttcactagaaagatcccgaggaaaccttcatggactcgtttggaacgatccgcgaagggaagagttatatgtgttggcttgtaggtagtcatgcctagtctcacagcaacaaacatgggcatcaagttgatgcttcatcccagattgcatagggagtggctgaacacttccgatgatattgagcaactgaggacaaaactccctcgatcaggcagcttttttgtgatctgacaatcgataatggaccttacatgctcagaaaacaataccttctttgtcttgtccttcttaacctttttcaacaaaatggaactcatgtctttggttagcaaattcgcttcgttggaatgaaaacctcataaggtgcagctcatacccattgtcgatcgacacttggagtatgtcgatcgacactctatgctttcgtcaatccatctctcttaattgatgacaagtctacattgttgaacgttgacataggcttggtatgggtttggtgttgataacaccctgatggtgacagtcgacactagctttgactgtcaatcgatgctcacgttctctattcgagaaagcttcattagcagattcgtcacacaaatgaccatatggtgtcgttcgacactagtaggtgtcggttgataccagcaagttccatctcgtcttctgtattgagtttttcccaaacattgtgtccttctctgaccaagatcacattgcagct

SEQ ID NO: 34259 - DNA, 5524 bp, Arabidopsis thaliana landsberg
ttcttgaacgcaaagattttttatcaaattcaatctccgaaataagcttcgggtgtatatcttcacgtccaaaccctcgcttcgaatatacccgaactaagtccaagacttgtgattcgcggtcataaatgacgtccctactaccaccgagtctacctcgttagggaagtcatctttcttttgcttaacttaattttctatacgaaggataaaccgagcttagctcgtaactcggaaaataagttaaaatcaagcaaaataaatggtctctatgacctcaaaaatcaagtacttcaaaataaaaggcctccgtggccgaacatacaattaagtacttaaaaacaaaaagcctccgtggccaatttaaacaaattcaagttaaggaaaacaagtggggggccatttcgggccaaaacaatcccattattttgccctctcggattccttttcaataccaacaggaaacatagccgcgattccagcctccaaggtcgagcccttgttggagcccctttcattgatcaccatcgcttcatcttgaggagcgctttccgcaatcgtctccgggggagtgtcagctaggagcgaggtaagctcaacagggtcaggtcggggagtcttcggttcggtagctcgttgcacgaactttgcttcgtcagcgcgaaccgactcaagctccatagcgatgtcgggaatttcacccttttgaatctcttcgagcaattcccggtttgccctggtctctgctacccggaccttcagcgtttcaacttcttcggattcccggaagaagttcccatacttcgacgagaactcgtgaaaccgagctttaaccttcttcctctcttccttcctggcgacgtcaatttttgcggcctgctcctcttcgagtttccttagcttctcctcgcaaaccttgagttcagctcgggcctggttctcgttgtcgaccgcagcaagataggcatttttacctacttccaattttgccatgaggtcaatattgctcacctcgagttcctggacccgcagctcggcgtctttcatccgcttgagcaccctgctggccctctccaccgtgtgagcgttctcgtcttcatttcgcctaaagctgtcaagttcgctatccttgtcagaaagctgatcttcgtggctgcagaagacggagttgaattccaaaattagctgcaaaatcaaaggtgactttagtctcagttttgcgtcgggtttcctggtgaatcaaatgaggctttttaccttgccgagtttcccagcgaagcgaaggtagttatccttgttcacctccctcatttcgtcgaagggggcgatggcagaaccgggggccacgagagtcctcatgatgtcggcaaaggaagacggggtagctacggcaaaaggataacaatgtgagatgccatagtataccgtcatgtcaattcggaataaaaatacgttctgggggagctgcgaggttccgacctgcgagcttcagattcccgagacgaaagaacgaggcttggaggaacctctttcgggtcttctttatttttcccgcaccagtattcttctcctcaagtcggggacgagatgagcgaggcgaagggcgggagtcgtctcacgaagctcgtcagttcgtccgtctcgagtagctcgtctgtctcacgtagctcgtctgtctcacgtagctcgttcgttcgctcctcttcgtcaagctcttaagctcgcctttaagctcttcccatcactcagcgaccatctcctcgcctagctgtcagctagtcagctcgtccaactcctcatctagctatcggctcatctctcgactgcaaaactcaagtaggacgagcttctcaagtagcttgttagctcgctcttcttcgttaagctcttcagtttaagctcttcaagctcttcagctcgtcctcaagctcagctcgtctaggagttggtcagctcgtcctcaagctctttagctcggtaatcgcgcgattcagctcgtctaggagttgatcaagaattttcgttctcgaggtgacgatccgtgattcttgggataatacgattcggattttcttaagtccccgaactggatcacttcgaggacttggggggcaaattgtggatgtcggattcggtccacttcggcccaatccgcattcaatgggcttcaaggtgaattgggcccaattcccagcccagcgtgagcctggccgtttaaagaacgatctgacattaatacagaaacgtaacgtacgacgttaataacgtacgacattaatacgacgttacgacttaaaccgcgcattaaagtcccgagttgaagattcgtgacgtacgacgttaataacgcgagatccgcggcgtgaagtcggcaagtattttaatacgtttgattcgatgtattgagtataaatatgagtcgatgacatttgtaaagtggacgataaaagaaaacactaatactatacacaaaattcaaaagcactttcttctcttttcgattcgatagttgttcgtttaacaagaccaaagatccccgtaaaaacaaccacaagattctaattgcggattccgacatccacagtcacctgacctgttcaatgtcttaagtgcattaaattgagtattccctcaaagttacgacataaccgtctttacgatcatgtcctgtaacaagaaccacatcgggtcaactgatctggtataggcctgtgtagatacggagattggtcttaagatagagaggcacactcttaacgtgagctagcttaagaatgaacaaattcaacatggttagaagttttacgagttaaccatgcaacaaaatgactttatattaaattaaaaattaagaatattttagatattcagtcttgaggcaggtaacagagtcataaatttcttcttagaattggtgtgtgttgcacgtcattatgaaaggggtattgggtggacgtacaaggaggtcataaagtgttcgattttgcctttgggttcactgtatccatcaccctccgtgtacatcacatcgaagaggcgtgcaaagttgaggcatcgcagcagaacctggcgtggcacatggtcatgtgagttcatgaactcctccataaccacttttttgttgttgctgtatattttacgcaactcttgggatgcttcttctttggtgactccatattgtttcatgtaacagttgagcccattagccacctctcctctgtttatctcggtctacaaatataatttattcatgagaactaaaaaacaaaaatcacaagaaaaccaaagacatccctatatttaatgtgccgtgtacctcgtaggttcctacgtcatttgctaacgggaacattacatttagcgcttggatgattaggggattggaattgagccactcaaaagcttccttctcattgatatcttccattcctataaagcaatatcctgcataatcacccatcccagctgtcaccaatccaaccttcatgtactcatcaaaggttggtacgtggcctttccgtgcccactctgtcaactgtttgtacgccttcgcaatgatcttgaactgatgtttggaatcaaagaactaattagagtccactaactatacatgtacattggttagtttcatgttcagcttatacattaccctttccaacacttgtttcacgctgtatgatcttcctttcggtgacatttcttgttcaatctctcccataactttaaacacactttcgaggacgattctcaaatagcctggtagtttatcatcggcaccaatattcaacctggtcatgccaagattttcacacaattgaacaaatataaaagaagaacaaagaggcatatatttatgaataaacacataaatatagcaagcacctctgcaaacattccgtaagcaccgcaacttcgggtacagttgcatgtgcatcataagtgtcatccacaacaaccatggtcatgatgattttagccactatgatcctcccaagagaatagtgtggctcgaagtacggtcccaaacccccgagatggctctctacaagtctatccctgatgtaaggtaacttagatgcaagatctaggtccttccaccatctgcaaccataaaagtgaaagaattggggaaattgaaaccgagactagctaatgtcatcaacaaaaagattgaagatgagtaagtcacttggtcagagttttgagttcttggatgtaacgaaactggcaaaggttgaagttaagctttgcaaactttagcaggatctcgtcgtaaccttcttcttgttcgtagtaagatatatattctcttgccactagtacttctatgttacagtatcgaggcatgtataatgagttttgtatatgcttcaagagatggggagttgcaccggatacgttaccagctattcaagactccaagtgattctgggcgaaactcaatgcttcgtccataatatcttcagatggtgtccctagatgtgctgcttcgtacaactgtagcattcctctaatatcctcagctagactttccttgaacctcccatcttcacctttgaatctattgaatgcatctacagtgaagtcgaaagccaaattatatatgtgtatacatatatgtgaatcaaggtcaccaatactcttaccgcaaggcatatagtaaccgcgtagtctgaaaacctcaaacatggtggagattgtttccaaatcattttccttggctattatatcgtccaaattgccaaaagcttggccaggaatctcatcaatctcaatctcgaaatgatatgcgattccgaggttcattagcaaatggatgagacggatcctctcattgtcgctgtttttggaagacttgagcatgtctctcacttttggcttcatcgtcacttcaatctctcttgagaaatcatcaaattcctacaattattaaatatacaacgcaatttataaaaaaaatcgttcatgttgtctgaaccaacaattattggggtcatcttgtgcttcttatatctatctacttacagcgacatggaggggaacagaaaggaagtgatctccccaaagagtgggagaaaagtgtgccaagggacgactactttcaagattatcattactctcagtagccctaacgcagaccaagtggtgttgttttgccggtttcaaggaaagagtgtgcttgtgaagccaacgccgaggaaaaagagagaggtttgttgtggggcagagaggggcgttatgaagaccaaaactcgttcttgttgcttccatattgttgatgtaaaaaaaaagatacaggcgaaataatatttagaggtactctgttttgaatgttcgatatctgttccaaaatttgctctgttttattatgaaaccctagacgtggacgtttttaatggctgatttgaataaaaacaatataagttaactatacgaatcggatatatattttttttttttttgacccgggaaacattgcgagaaaaaatgttagacgatgatttaatttgataatttccatggg

SEQ ID NO: 34260 - DNA, 1192 bp, Arabidopsis thaliana landsberg
tctgctaattcggtgggagccatgcggtatggtctctttgcgatgggtgcagtgccgggaattagatctatgtagaactccacttctctttctagcggcattcctagaaattcttctgggaatacatccatgaatttttctactacagttatgctttctgctgctagattaaacaccatttgatctttggcgggtggctgagcctgacatgaaactgactttccttggtggtaagtgagaagaacggtcttatttgcgcaacttatgatgcccttgtgtttggttaaccaatccattattaagatcacatcaatcccttaggatggcaaggcggctaagtctaccaagaacactaccccacttaaaagaattctgacttgggggcatttgagctggcataaaaggtctgaccctagggttcgggtgaccaagggaatttctaggtgtgtagagggaatgccatgttttccacaaaactagtggctatgaacgaatgagatgctcctgaatcaaaaagtacagtagcgggagtaaattcaacaagcaactcaccgagcactactcccggagcttgatgagcctcctgagcatcggcgtgatttactcgagcccttccttgatactgggtcttgttctgctagctgatggaggagggtgccttgggggcgggtgctgaggtattcttggggacattcaccgagttggagtaagcaggtcctgatgccttcaactgggggccgttgttcttgaagtgactagggtctccgcagtgccaacacacattcgctggtggttggttgcttgcaactgagggggcataaaaggagctctgactgtgctgactgaaccgtgatggggtgggtccagttggtctactgaagcttggtcccttgggtggaaatccaaaggatcgagttttctggtgccggtcttgctgctgagctcggaggacttggaatttcctcttgagatggcctttttcttcttcctttgccctttccacttgcatggctttgttggagagttgtgagaaactgaggaagtcttggctggctaggatggtcttgagttctggtctaagccccttcaggaagcgggccatcgtcttgacttcggcgctgacgtcatccggcgcgtagcgggctaactctgtgaatttgtgcacgtactcactgacggatcttccgtcttg

SEQ ID NO: 34261 - DNA, 781 bp, Arabidopsis thaliana landsberg
  unsure (1)..(781): unsure at all n locations
tttgtgatatgtcacagtatatatatgaggtgttcaaatgtgtctaactactaattattgtcttctcctatttattttataggaaaagatggaatgtaactcaaattttggtggccgcgcaagtgtggagacttgaattcatatatacttagttagactcaatgttagtgcaaacagttgataaccaagtttttcaattagtatttagttttgtctttagagtacacttatgtatgagttatttgataatgtttatttatgagatattgaatggtacttatctatattatattaattacaatgttattaaatatatgtgtatgtatatttctctttcaaattatgtataatgtgttatctcaaaatgattataaattgaagaatgtattttaaatcttaataagagagttcctaaaacgtctaatatcggtctcctaaataagactcctaaataagacggttactaaaacgtctaatatcagtctcctaaataatatggttttcctattgcaaacgtcaattattataggatattctagtcagcttcataaatactttgagacttataatgttcgtattctcgacagttctttagaaggagtgtcttaaacaaaaacctaatgtaagacagtttatcagacaaaatgacttaaataaatacctttctagacggttataaattaaaaattgtcttatataatatctnttaagacggtttacaaccatcttaaatgaaggatttcttttgcgactccatcaaatttggacacttcataagtgt

SEQ ID NO: 34262 - DNA, 910 bp, Arabidopsis thaliana landsberg
cctttttcgttctcatagaggtcacggattgagcttcgtgcgcggtgatcgctaggtcttcctcatgctttgagtttgcctgcacggaggaagtcgtcggtggtttggtagtgagggccgcctgaatggccactcagaaacattccgcggagccttggaagctagcgcacacggtgatgatcccttgtggccctggcatcttcaatatcatgtacgaatagcgtggaatggacatgaatttgaccaatcccggcctaccgatgatggcattatatccacagtcgaagctcaccaccttgagcctgaagaactcggttctataggttctcgaagatacaaaggttacaggcatgtagatgtgtccaagcgggtattctccttcagtcggcacgatgccgaaaaagggtgtgtccgactcgtggagctctttgaggggactcccaagccttggagcgttcgggggaaggtgacgttgatgttgtttcccccgtccactaataccttctttaccctgctctctcggatcaccagatcgacgaggagcgggtacttgcctgggtggtcgaagttgagccactgatctgcccgggtgaaggtgatcgggtgctcagaccaccggtacagggcgggaggaccagtagtcgccaccagtatctgatgatcgttgagcttttgttgtctcttgctttcttgcgacccgtgtccgccgaagatgatgttgacttctctatcaacgcgcgggaaggctccacctcctccctcctcctgctaatggggttgtcgcggttctcctggtcctcctcgcagtgggggaggaggtagaggttggaagggtcggtcgttcccacggaatgcttgaagtctctgcagttccggagggtgtggcgcatgtctttgtggtcaggcactg

SEQ ID NO: 34263 - DNA, 1960 bp, Arabidopsis thaliana landsberg
ggagaagctgtagacgttaacccatggattcagagatggtgtaagagaaaagctgcagacgttcatgaaccaagtaggagggcaagaagttaactcaaatggcactgtgctagagaagcagcagtttccaagtattgcagcaatggcaatgatgaggaaggctctgagcggtataaaccctaccggttgtagaaagaccaactccctcttcgtttggaatgctgaggatttaagttgaacaaattctgtcatgccaatcttgctggtgtcagaacacaactcaaaactagaatctacctacttcaaataaacttagaattgtacctgcaaaagctatgagtatcaactctcattactgctggaattatttttactgtgtgacatataagtaaacttcagagagctttgtttccaaacaatgttttgaatgcgcaaaatccatctttttcatctccaaattctcattgggttaagtagtatagaccaatgtttgcaagtaaaggtgcattctagaaagataatggttcataaagacattgagtaaaatacaaggaaacaactaaaacattcgaaggaagttagccgtgggttgccctagtgtagatctgctggcttgagtgagcagagaccatcctgattgttcccttagccatcaattctctgatcgcccttctagcaagcgatccattgatctataccaacacacaagcgcatgtcaaaactagtagaaatctggaagtcatgtgtggtcagagttttgcactaaagagatatttcttacagaaacaagatatcagtaagaaaagtctgtccacacgaaatgcagtaatcaatcaggggaatttactaactagtcaagcatcactaaaaacactcttttcactacaaacgagtcgaatcatacgcgatacaatcactaatcgcaaagaagcaaatatctaagatcttaatccaaagctatcaagtaaagaccattcgatgttatctatcaagaagtactaacacacattctcaactaatgtgtcagcaatgcatattatatcaaacaaaagtttgcaactttcagaaatcaaagaaagtgttgaccctcaaacggtcagagaggatagaaggagtgataagtttgaacttgggagcctcagagagaagcttgtcgtaagttgcttggtcaaacaaaaccatgttgttcactttctccttttgctttcctttgctccacttctgttacattccaaacaaataacaatcaaatttagtgtagaaaaacaggggaaaatggatcatagcaatcaattaatctgatttcatggatcaaaataggacattgcaagacaaaagatgagatttttagaagaaaaaagtgacctttttcttttgcttgccgccaccggatttggcgggtttagaggacggaggaggaactttgtctttcttgggtgcctagaatcagacatagaagacattgtaagtaagattatcaggcaaagaaggagagagaattggatagtggagagagtgagagagcgcacataccattgaatcttctggagtctggacaagagaggagcggcgctacgatgaagtactggaacaatgaattgaaaccctagacgatggtgattgttctttctctcacggcgaaatactttactttattactttttttgatgacgggaatttattttaattattaataaatagtttaataccgtctcaaattatatacttttgttctgttcagattaagcctagcttggatcgaacaataataatgttgaactgggcttgttacttgggttagttacacaagaagagatagaacttaagcagatagtcacagtcccacgttcccaaccaatcaaatcccttagaagaagacatatcaaacttagaaatcctttatgacaatggatcgcgtaagtcaacaatgaattaagcgactaatatgtaaatatgatgt

SEQ ID NO: 34264 - DNA, 1561 bp, Arabidopsis thaliana landsberg
agacagccgagttgttatgatcctttagtgttgtaactacgcagttcgattcaaatctcttgctatgccgctctatatctgaagcctgcattatatataaataacgaatgattcatttataacatgaactttataccaaaactatatagatattaagtaaatgaattatttaccgaaagttttccaacaatcatatgagctttgtagaatatatctttaacatcatcatcatcaccccaagcatcttcaaacttggagatcaaatcttcagtaacaagctcaactccacgttctttagctttcattgcgggttgccacgatctcaagaaaccgataaaccctttaagcgatagcttatgaggaatgtcaagcattataggctttccttcggaacccatccctatggtctcaaaaggaaatgtcaatgtcttgtaaccgtcaaatgctaaattcataataggagttctaaaaggtagagtagagtcgacaaggcgcttcattatgggatcgatctcatgcgagataatgatatcgttgtatacccaaacggcgattaggcctccttctttacgaagaacacgttttgcaacattgtaaaatacgttgaggtcgaagaaatggacagcttgagcagcaactatgagatccacggagttttctcccccgagtagatccaccatctcatcttctgatatcgttgttggagtgtgatggtaactgattcttgagtgtttgattgctcgttgaagttgtgcttcgtttatatcggtagccactacattctcgtaatgctccacaagctgtaaattatagatttcatggtattgtcaagcttagttcacctactatattctatatgtgcatgcataaacatcaataggcaatctgcaagaggcgagttcacttaacttattttgacaacatatatttcagtttataacttgagtggtgacgacagtaatacttatcactaggttgcaagtcttgaacaaattcacttactatacattatatatgtatgatatacccacaattccacatgcatggtctcatttaccgttgatgaaatattaatgttttgtgaatctagtaaaacaaaacaacatctaagctcagttttgtctttaatttacattttcttccaaatcagtctaagctcatttgctaaagactatataagttacgtaacttcatttttcctacctctttttgatgtaaatatttttttaaacattattttaggttaaaaatatctataaaaaattatgcatatattaaatacgtaataaaacagcaaagatcgttgactaaaaagataaaaataacaagatcaagaggctgaataacaacaatcaaatttgccgcaaccaagtttgactaatctttagaatgatagacatgatcacatgatgattcactgaaagaggccctcctaagtaaattagctaccttgttgctagatatttatcagcaaatctcagtatcacaaatcatactaactagaacttcatactaaagggaaaaaaagaaaaagaaaaaaaaaaaaaaggaacttcatact

SEQ ID NO: 34265 - DNA, 791 bp, Arabidopsis thaliana landsberg
aaaatggtgaatcggtggatgaaaagtaaagttgccctaatttccatgccttgaagcccattgtaatttgaataataacctacgtaacgattgcaagagaattttgcatgaactatcttaaagatatattattattagccctgaatatattgcgtagatatattataaaaaaattgaatgcaaaattatctatgttcccggtaagattagtcaatgagaaatggtaagttcttaataacaaaattttgtttttttttcgccaacaatttttttagtttttttggcgtaaaagtagaataaagaatcaacaattagaattagccacgaatatatttgggtgtagtgaaagtaagcccgatcgaagaagataggtggggaggggataaggagtgagacacattatgttgagttgcctttgttgttaacaaatactaagacctttgaggtttgacgttttttacctcaaaaaacttcattaccttccgttcgtacgtaccatgatgtgccctgcttaattaacacgtgttccttcaccttttcactgttttctgttgtttatattaacactttggctcgagcaattttatctacaatagtcactattaaaagaagttctgataaatcttgaattgaaaattagtcttaaaccttaccgatctctgtcaacatcacacgtacggggtttgcaagaacaaatcaaaagcttaagcgtaaacttgacaccacaattattagttgttattggtgaacaaaataaaaccaataatgaagcacctatatcacaacattac

SEQ ID NO: 34266 - DNA, 868 bp, Arabidopsis thaliana landsberg
aaacgagaaatcttgacatttattagagtaagaaagaaaattctttgttgttagagaacaaagagaaagatgggggatggaggtaagagaccctatgaagttctcagattggtcacaaataacctgaatatccgctttgatcacctcaggcataggttcaaacataagaaagttactcaatgtatcctcaaagttcaaatctgtcaatgaaggagctttgatcacaaatcctttacttccctcaacgtatgtgccttttcctttcgagttcctaatagataagttcctcaaagtaggcacatcaatattggttatcatcacgttctcatttttgatttggtctacaaccaaatgttcaagaacagggcagatttttaaaagacttgcaacagattcatcgccaaagaacttaacggatagaaggtgcaacgcttcgagtgatggcaaactaaatgaaggaggaacaaccttgatacttaattcatgaagtatcaattcttttagggttctgaaagttttcaaagacaagtcgatcctcagctctctcgaggatcgaatagataagctcctcagagaaggcacatagatattgggtatcatcacattgacaccgttggttccgtgtgcagccaaacgttcaagagcagggcaaattcttgatatacttgcagcaaatccgtcactcgagaacttaaccgacaaaaggtgcaacgttttgagtgatggcaagcgaaaccaagccgggacaaccttgatacataaatcatgtagagtcaattcttttagtgttatacaagaacacgaacaacacggcaattctagggtataagccaaacaagtcgattggcagctctctcacagatcggtt

SEQ ID NO: 34267 - DNA, 5078 bp, Arabidopsis thaliana landsberg
gcttgctacgttcaaaatggagctgccgctgaagcgttgcttgtcttcaatgatatgatggatgatggaacagaacctaatgtagctaccgtgctctgtgttttacaagcttgtgcagctgctcatgatttagagcaaggtaggaagactcatgaattggccattaggaaaggtttagagacagaagtgaaagtctctactgctctagttgatatgtatatgaagtgtttctcccctgaagaagcttatgctgtattctccaggataccaagaaaagatgtagtctcttgggttgcgctgataagtggctttacattaaatggaatggctcacagatcaattgaggaattttccatcatgttgctggaaaataataccaggcctgatgctattcttatggtgaaggttcttgggtcatgttcggagttaggctctctcgaacaagctgaatgctttcatagttatgttatcaaatatggatttgacagtaacccattcatcggagcttctcttgtagagctttactcgaggtgtgggagtctaggcaatgcttctaaagtattcaatgggattgctttaaaggacactgtggtttggacatctttgatcactggttatggcatccatggaaagggcactaaagcactggaaacatttaatcacatggtcaagagctcagaagttaagcctaatgaagtgacatttctctcaatattatctgcttgtagtcacgcaggtttgatacatgaggggttgagaatatttaaattgatggtgaatgactatagacttgctcccaacttagaacactatgctgtattggttgatcttcttggtcgtgtaggagatctagatactgccattgaaatcacaaagcggatgcctttttcaccgacacctcaaatcttgggtactcttttaggcgcgtgtaggattcatcagaatggtgagatggcagaaactgttgcaaagaagcttttcgaattggaatctaatcatgctggctattacatgttaatgtcgaatgtgtatggggttaagggagaatgggagaatgtggagaagttgagaaattcagtgaagcagagaggaattaagaaaggactggcagagagtttgattgagattagaagaaaagtacatagatttgtggcggatgatgaattgcatcctgagaaagagccggtttatggattgctgaaagagctggacttgcatatgaaagaagatttggaaaactctgtgtactttgaatatgagggagacagcttgtgatactggtatgcttaagcttgaagccaagatctctgtcttagccaagtaaccactttctattagaagagatcaacactaagaatatggagatttaagcctaaggcggatctcaacaatacatgatgtgaatacaatcacagacgatttactgaggtttgctgataagatcttgatcagtctctgcatcatctgtttaacaatctcaatctttgactgtttgctttcggagccataaacagaggaatccttattcccttttataggagcaatacaccaagtattatttccatggctgaaattctcttatgggaacctcattgttccattgaagctgtaaaatcgaatctggtgaatattctcgagcaaagccgcatgctaattatgtcaattcagaagagtttgattaggagactcgaagcgagtttgatgatctttcttgttgttcaactctgattataagggtataattgacttttcatgtattacggctccaccacctgacactaaggtactctttgtccatctcgttggtatcatcggattcggatggtaaaaataaaaagagcaaacgaaacttgttactcatgcaagcttctcaggtgccacgtcactccattacgtgtcatcttcacacaccatctcgctcaaaaccgatctcatttttcaaaccttaaaggcagaaggaactgattaagttaacactcttgagaagctctcgattaagcgtgaacttggaggatcaatggctgacgttcgcacacactcgcaccagcttcaagtgcaccctcaacgccagcatgaaggaggcatcaaagtcctttatcctcagagtggcccttcttccactcaggtcccttttacatccctccttcgaatctcagttatgcatatgtatgtggttttcacgtgacgcacgtgcatgcaggtgctagccgtgtttgtcggtgtaccgataggaggaacgctgctgactatagccggtttgacattagccggttcggttattggactaatgctagcattcccgttgtttctcatctttagtccggttattgtaccagcagcctttgtcatcggtctagctatgactggattcctggcttcaggggccataggtctcaccggactatcatccatgtcgtgggtactcaactacatccgccgggccgggcagcatattccggaggagcttgaggaagcgaagcatcgtttggctgacatggccgagtatgtgggacagaggactaaagatgctggacaaaccatagaagacaaagctcatgatgtccgagaggccaagacttttgatgtccgagaccgagacaccaccaagggtactcataatgtccgagacaccaagactacataaagcgtgtgttttgagtgaaccatgttgaataaaaatcgactgttagttcttaatgttgatgtgttttgaatgtttgtatttgcttgtaagcttattttgggtttagtttcctcttctttttttttcatgtaacaataatgtcggagacgttttgcttctatcagttctttgttttattgatgcgtaatagatttgaaatgttagctcattcacaaatggtcaaatacaagaaaagaaacgcaagctttcaagcttcaaacacgaaggagtaatagacattctctagaattacgcatcaaactgatatcatatatgaagtcgcaatgggttacaacttacaagctcttgaaatcgatatttggtcacaaaggtgatccttaaatcgataactgatataaagtactgtacagagttggctaaaccgatggctaccgaccaccaaaaaaacctgcaggtggagctcctccttcgttcatcaacttatccagaaccacgttgaggtcaacagcttggccgttttcagtcagttttctcactgttgctctgacttggtcccttgggaatcccatggttgtcaccctgtcgattacatcatcgattggggctctgctttctgatctaggggaactagagccaccaccgctgctgacggctgaaaccattggcaaagcgtgtggcaatcgacgtgaatttgagagatgtgggcaaccagttccactgctatttatatgtggcggtttcgccgagaacattggtgaaccactgtatgtgtaaggttcagacgagtagccggacggaaaacctgaattagatctaccacccgctccatcgtacattgatggttgtggttgaggagggttgtagaactgttgagaaggggcagaaccagcaggtggctgttgacgaggagggtttggcgggtaagattgcatctgatatggtggttgttcttcggggttgtagcctgatgatggtggtggctgttgggggtactgaggcggtgactggtaagatggttgatgcggcgtttgggtctgaggagcttggtaaggaggctggtttgatggaggtggttgaggatgacaaggcggaggacaatacggctcttgttgagaagaaaactgcgtaggtagctgaggtggtagttgcgaggaaggtggctgggaaggagcagcagtggaagatggtggctgtgggaaagaagtaagaggaaactgctgcatagggactggtgcgggaaattgagcagtgggatcaacgtgtaaagagtgtgttttggcatgctggttggatacctgatgctttgaaagctgagcttcgagaatctcttgtttgtcctttaatagttgcacaccactctgcacctgcacacaattcgcataaagaaggaactgaagtatcaacaaaaagtattataagcctggttcaagaaaagacatgttcataaatgagaaaatttctgtataagaaagatcaatagttgccaggaaaagctataaattctagtttcgaaaagcaatcagcaaagttacctctacaaggatatttttaagctgtctcattttcccatcagtgctgccgtgactattgtcaacagaaactttgagatcatccaccaggttctcgaggttgtgggttctggtctccagctgtgaaagacgtgcactaacaccttccattacatgaagcaaggtatcggtatgtttcttcattgtcctatctataatctcggacataatagtcgtgttaaacacattttgacccttgtcaggaaccaacttggaaggttcagtagactcgaggggatccaaaaattctggccgaataaaaaaaaacaaatcaatcagaaatagacaagtcctcttataggcttatgatgtagaatcatgtacaaaaaaaaaaagagaggaagattcgagaagtagtagtaagtacagtgttaggcgaactagtggaaacgggtttataatcagaggcggaccaattaaccctagtcgtggatccggcgagatctaaagccgagtgagacaatcgtgcggcggtggtgggacgtatgggatggaaatcatagctaggaacgatcacttctttcttagagtccaatccattatcgccgatcacctgcttcttctggtgatcatcgccgtcatgattgttcatcagatcgatgaaatcagtggaaggtgaagatgaagaagaagatagatccattatctgcttatccataaactgacaagtattcatcgatccacccgacaatttctccgactcccgaatttcttcttttctttctaaaacccctcagatcgatttttatttttttatttttattttatttatgtcataaaattgaccaagttgctcatgtcgacgtaccttctgattggcgtagaaaattatgtacccaaaatgggcctaaatgtatttagaactc

SEQ ID NO: 34268 - DNA, 578 bp, Arabidopsis thaliana landsberg
taccaatgtttttgcaaagtcaatggctttctctaattcaatacgagaactataatatttgttatagctaatcaggttttcttatccatatatttaactaacaaaaaaattctctttcacccacattatcatcaattattataagatacaaaccgacactaaatacaactagactaagattcaaaatgtttgtagtttatagatgatacgaaataatggtccaaactggtcttccgctcttctttatgtaaccgattcaaatggatacataattttacatatatacaagtggatttagcaattgaaaatcagtcactgagtcctaacaagaaagaatttcacattctatagaatagaaaatgatacttcgtatttagttaatatgtataaaatgcgaagtctatatctatgagatatatatgagactaattgatatatgagattagtctatggttgaatattgtcataattaaggttaaatgtacgtacacatgagtgtctaaatccacacgggcatatattgatgatcgtatttttgaattattaattgaaggcaccgggagagtttgaaaaaaaca

SEQ ID NO: 34269 - DNA, 578 bp, Arabidopsis thaliana landsberg
taattaagaccatctattgtaatcacataaaatgatgcttattatttatttagaaaaacaatgtctatataacctttaatttaatttagattctttagagaatatttcttaaatgtatattcaagtttgaagtacatatagagataaatgcttattacttagcttctttaggagaagtgaagattattttggttccaacatttttaaatttctatttcaagttcaaacctgttgaatctttctgttttcaatttcccattctcaaatataaacttaatgtggattcatgttctactgtttataatattattattcattcttgtccccattatttatttatgaaaaggtcttaaatgacttcattaaaatttctttcctcagttttcagtactcaagtataatttgattttactatttcatttcttcatatttttattttattattatttttttatacacattttggaccttacaaatcctacccccttaacagaaatctcgtcctcgagatttgtaagaatagggtatataaccaagtcatctcaaaacatatgcacaaagaaaaatctcagcatgat

SEQ ID NO: 34270 - DNA, 1067 bp, Arabidopsis thaliana landsberg
  unsure (1)..(1067): unsure at all n locations
tttgatataccaacccaagaagcattatttcatgggaatcaaagtaagcatgagcatcaaattaacttaagaaataaagaattcaccaagtatatacttaaaagtatcatgatcaaaacaattgagtcttttaaaaagataggaatgtgcaacactatataaaccctaagtgagccttataagcaaaatgcaagagaataagaaaaagggaatgaaaagtttaaaattatgacttgagccaattataaaaattaaagtatatttaatgagcaacaagaaaggttgagaaagcttagccaaaataactaaaataaatccccaaatcagcccttgaactttgaacccttagagaaattcagatttctgaatttctgaatttcagacctcttcccaaagatcatctgcgttctttgttttttgaaactcgaaaccaaaatgtccaaatataaaagttgtgccaaattcccttgaacatgctctggaaaagtttgaactcaaaccaatttcatttgannnnnnnnnnnnnnnnnnnnnnnncgggactcaccttggtacactgccacctttgtgacacgacaactctctgtacactgccccaaaccgctcgacttccacacaaaagcgacaaagctcggtcgggggagcaaatcttgggtagtgatcatgcccaaattcgcgaagatcttcaacctatgggcgcttgaactcgggcagaagcaaaaagccacgtgttcgatcgattgcctgaccagccgagcgcggactggccgcggcagcgcgccctgccgtggtcgccccgccccatgcctctacgctttgcccttgcctataagttccccagaggccgtagtcgtatgcacttgcgcacccaaagccccgcccgagccagagatcaccagagttcgccgttaagagcgagcgccaccgcccgcnnnnnnnnnnnnnnnnnnnncgtcatggccagtcttttctgacgatccccagcctcgccctagcccctggacagcttcccgagaagccgtgaagcttctccaagcttgagccgaggcattgctcactggagaagc

SEQ ID NO: 34271 - DNA, 971 bp, Arabidopsis thaliana landsberg
cggcagtttcttctttctgataaaacaatttccttcgttttttggattaaagactcatacttccgtggaggataatcaatcaatatatcatgatgctcaagttgataaatcaatggttcaagcaataactcgtccgatacaatacttgatcatctcttacctccggtatcttgtcggccctccttcgctgactcaccatgataatcaagtcccggttatcatcgaagagacttctgagaacggaaggatcaacgtgatccatggcgccactcaggcttatcttttcgacaaaatcaaccttgacttcgtggaagaacgtgagttcgatgatatataccaaggggccaagctcaagtggaggattttcgtggataaaaataatattggaaacatccctaagcaatgcttcgagctgagatttaacgaaaagcatatagatttgggcttcgactcttacatacctttcgtggagagcaaggcaaaggagatcaagagcaagaagagaatcctcgagatgcatacatactctcagagctctgacacttgggaaaccaagatccttgaccaccattcaagctttgaaacgattgttatgaacgaagacctcaagcgtagactcatcgacgatattgacctgttcatcagcaaggaagatttctacaaaagagttgggcgaaattggatgagatattacttgctgcatgggctaccgggggccgggaagactagtcttgttgctgctattgctaaatatctcaacttcgatgtctataacctaactgaaggggtgaaaactgacttcgacactcggagactaattcgcagagtcgaggatagctcgattctcctcgtagaagatatcgacacctccctcgaggttagtgaacttgtgctaataatctatacagtcaagtcaatgggccaaattacacacagttgatgattaattttattagtatatattttcaaac

SEQ ID NO: 34272 - DNA, 1341 bp, Arabidopsis thaliana landsberg
ttgttgtggttgaaagtatcggttgagagttcgaagtttggataatcttggaggagtgaagttaggtgctttctgatgagccatttttgatcaggatctgtgtatgatagagcgaaggagccggtggcgagaagagctttttctatgaatttacttagaagaagatgatgatgatgccgccattcaaaaggttagtgactttgaggcttaagctggttctgtgatatttatgacgtttctttggttttgagttcttcagttttattgttttatattgagaaatgacttgaaatgttttgggtcaagcactcaagcttagggaacaagggatagtttttgttccgttgtttcgtggaagtttaccttcttggaaagaaaaacacttttgctaattgtctttatgttagattattagtcactggatcattgattaggtttgtatgtattaaattaaattatccattttggcttggttctaacttcactaatttagtctcaatactttagtctgatgctaaaaaggcattttgacttgaatttggtgttcattgtgggagatttcaatatgaaggatttaattctggaaattaacttcttatgaaaccttttccttgtaatcacttgaatgacgatataactggagactgctatgcctttctttgtttgaaggaactttaatgttttgatcaagccccaaattaattcattacaactcatcatggtaatttatcattcaacattttgatataataagcctcagggtatgtacctatcttcctatcatgcgttttcttcgtcccgaacatgatttttctttcttcgtcccgcagtcccgcaagttgttcctttttcttctctagatgcttcaccttttgttcgagatctttatatttattctttgtatattgctttacatgttgtttttcttcccagtctttttgaagctctctgatcagcttcttcaaagcctagttaatttgcaaacatcatcccattggttagtttaaagtaagatagactagtgctcaaatgaaagaagatgagagatcttacttttatttccagctccacagattttctcaaactgtcatgacttgtggggttacaaacatcttttaggagatcatgtgcagcttttctgcggtcactcctaggcatttttttccgaatgcagtctagctatttatatggtaagtgaaaatttcagaatggttctagtaaataaactttgatgaatcttgaggtggatttaagcttaacactagtaatagtacctctctgctaaattctctgaattcccattttccatgatagtctacctcttgaaatttgtgcttttgg

SEQ ID NO: 34273 - DNA, 5276 bp, Arabidopsis thaliana landsberg
  unsure (1)..(5276): unsure at all n locations
ttccctgaaactcgtttgtgggtcagtcgctggattgcttggtcagactttaacataccctctcgatgttgtccggagacaaatgcaggtttgatctggttcttcttctatcgaatagaagacatccttgaatcttcataaaatgatcctgagtagtattataaccgaaactccctgtaggttgagagactatattcagccgttaaggaagaaacaagaagaggaacaatgcaaacccttttcaagattgcaagagaagaaggttggaagcaactcttctcagggcttagcatcaattaccttaaggtttgagactagtttcatcgatctatctttgttttcggacaatgaacaaccaagttacaaacactttttctttcgggtttctttaggttgtaccgtctgtggcaatcggattcacagtgtatgatattatgaagctgcacttaagagtcccgcctcgagaggaacctgaggcagaagctgtgacgacacgaaaaaggaaagttttcacctaatactaagatcaaccatatgatctgattctttgtggtgtttaaaaccacatattattatactagattgtacattccattttttggtagaggaaactgaagctaacactcctccatataaacagtgtcagaatcccaattgaaaactctaggacctctctatgtaaacacataattgcttatacgtttttgttgaatactttccaatgtatcttaccttacgaaatactgagacacagattgttgattctcaggatttcaaaatatttatcatgctcatcggtttcttaactcaaaaagacaaattgcagaagaaattttcccagttctatcttgcaggttgaaacaatgcatacacatcatactatttctgttcaggaccttaaagtaacaggacccctcagattgctatgacttagaatggttctgcagatgattttcaagtgtcaaaggcaacacaacagaaccagtagacaaaagcagatgtggcaaaaaacaagaaggaggtccattaagttctagagtgatgcttacttaaaacaaatgtgtatcaatgttgaaagttgatgagaaagaagacagaagttgataggctgaacaactacacatacgagtagtgagcttgttttctacattatggcagatagcaacaaaatttattacagagacaagacattgatggagaacatcgaagctgcttcttacagaaatgcatattcggttcgattaaattgcacctacttagttaattcatacaaccttattatctagagttaaaggtatgatacggcaaatcaacagattttaccaataccaaaccggctcgatacataacattttggttaggtagttacaaaaggagttatactccactgctttgaattcaagatgtgattctcatccccttgtgctcctcacatctcttccttcctttcactggagatttctcgcatgctgatccattgtacagcttaaagccacaaattacttgacttgcagttgctgactgaacattttcagatgatccgtggttcaatgttttatctttgtgctgccaacatcttttgctgccctcaggagcacttcttgtacaaggcaatccattctttgttgtagcttcacataaaagacccgaaccctcttggttcatgcctgtacttgtctcaggtttggatttgtcctcattgacggctttatcacgttctgttgggttcagcagaaaaaagaaggcgttaactctcattcccttgtgatcctcgcatcgttttctccnnnnnnnnnnnnnnnnnnnnnnnnnnatcatgtcaggtaaaatcactccacatatattctcagtttcttcacattctcttacggtaggaacttcacacggtatgtggatcccgggggaaacacgagaaagtctcttccctttatgctctgtgcatctctttcttcctttgactggagttgtagtgcaagtagtaccatcttttagtaagactccacaagcagaagcagaatcagactcatcaactatgtcatcatgtttctctgaaaccggttgaggtctagaccgactgagtctaagtatagatggaagcgaattactctccttgtcagcagcatcagaactgacctctctctcttcttcagaatcagacttcttctcttcggttcggttgtcacttttgttctgagtagtaggaagaattgtttgagagaaaccctgcttaagcaagtcatgatgagcaaaagatctactataagaccggagcctagatctaatgctttcaggttgaccaagattagccacaagaacatcatcttttctgccatggtcatgactgagctcatacagaccctggaaggctccttggactctgtttctaccaacacgatctttaccttctctgaaattttccttatcgttggctccaaccagaatctgttttcaagtataataagtttgacatttaaaaatgtgtgtttttccaacttcattacttaagataaagagcttatattgatgacaaacatgagactaagccacctagttatcaaccaaagatacaagttacaatgtgatgaaggagattaaaaatgtgacctttggacctaaatctcgagaaattaaggagtagtccgcaaaagtcttgcgtaattctgcagtttctgaaatgggtttacgcagaaacatagatcgggcgaaaccctgaaagaaacccaagaatcatcaatggaattactcagaatctccagagatccaacaaagaaacgttgaagaaaagtgtggtaggcgttaaaagttagatctttaaataaaaattgcagatatttccaagagaattcattcgaaattctgttgatctcgaaagggttttcaacggaatgaaagatggagcaaaaccctaaacccagaatctctaaatttcttgaaatgcgagagtacctgccactttgaaaaaaaggggtcatgattagttcgaatgtagtcgtctctcttgaacatggtgaacacgacggcgaaggaaacgccgtcaccaaaatccaatctcttttcttttgttctcgtttcgtttcctgatcggacttgagagtttgtctgctgcccgactaaatttgaccgttaaggatggagaatttacagataaaagttttttttttcaaatttgaattcgtcactgctaatgaatacttgcagaaacttttgaagtacaggcgttggtatagtcttaaattgaccaccgttggatacttcaacttgagccttttttgaaattataattttcttttatatgatctattaatgatgtacatttggagctacaatactaggaaaaacgagcggtggaagctactaacgaatttgctactgaattctcctcaactacaagttctcaagctcagaaatgttacaggatagagcgcatgtttaatctaccattttacaaaactattaacccgccaattagcaaaccgatttctgttcctccttgtttgttattccacctacaaagattccagtgggaaggatacaatggacaacgtgaagaagagagacaagttgcaacttaacaaatgccaaacatttgaagaagcggcaactttctcgacgaaatacaaatcctttactcggattagaaactcgacatgttaaaggagttggctcgtgagcctaaggcttcaacttcttgttatttttcttcgagtgaagaaaaaatgctttcttagacgagatgcaactgatgcatttttgtttgtgtaataaatatgtagcttttgattactttcattcgttaatacagactttaacgtttatagatgaatgaatttgtaggacaactaacatgttaacgtttcttcttacccaagacaaagcagtggttttattagggcatcctcttatctatctaaaaacggtggatgtgtgtgttaactgttaactcaccaagttaattttgaaacccaacacttcccggttttactcggtttagggaagctgatacttgataggcgatgaactcgaagtcagactcatttatttatgtacaaaaattatgatgcaccacatggaaaatgcagtcaacatatatacagggaagcgatttaacaaaataatctgtgatcaatctgaaccaggcattgattattcacttgaatcttcaactttctcagaagctgaagaagagatgttactgatacttcctacattgtgtctctctatcgcctctctcagtttctggaactgcataaatgtttgcagacgcttattagacttagaggtcgccatcaagactatacaatgcagtaactattctctggtttcgtgatagacaagtgacgtttgaaattaaagaaagctgggacaagaagaactgaccttggcaagagagcatgagaaggattcgacttggccatcagcaccgcggtagaagtggaaatacggtaacaccttgacgtttaagcttttgcagagagacttgttctcgtcaaagtttactttaaggaacaagatgtcagggtgttctttcgccgttttgcagagctggaaaagaataagaaaagagtctcagctttagaataagcaagccgataatttgagcaagcttaagaaacataatggttcaagactcgcgaactgaataaaatgagagatgatcgagtatacacgaagagatacaatcgttaagtagctaatgggaaagttacctttgggaacattgcacggcaagaaccacaccaagttccgtaaaaatctacgataactaatctatctcccgcatcttttaacgcgttgagaaactgctcagctgaggtaatgtcaatcatgtttggccctgctttcctctcccaccattttggctgttcggtttcagcagctaacgcttggacctatcccaaaacacacatacatttcatcaatatgtagccacactgacaacaccaaacactcataaagttagatgttatttaaaagcccttaacgcaacttagcttcaactacagagaacttaaagacacgactgatgtaatcgtatacaaggatcaaagtaaataattgtgactagaactcgaaatattaagcatgaaaatttttgagatctctaaccataagaaagcatcaattgaaataagcaatgtgaagaactttccccgttaaggaaattatgagcaaggcattttacggaaggggccatttcctattccacaaaggctattagggatttcaatggtcctccatcaaatgtgtcttcttgaactttaaaaaaaaattatttt

SEQ ID NO: 34274 - DNA, 699 bp, Arabidopsis thaliana landsberg
aaaggtttcaattattagaaaactcaggttttgcaagataccattccatatatatatagctttgaaaggagcaaaacttatttggtttgggatggttttgatatcaagatgttgtagtagaatccattatgggagctcgaaatatacagtaagtctctctctactacattccaaattagaataactcaaatgggttatgtttactgtatgatagaccatctatagacgagggaaacattttcaacagactcttccgatttggtagagatggattgacttttagaggagtttgtgaggagtaaggaattgttttctttggttactattttgtttattccacaaaaataaataacttaaaaagcgggcatggtagcatgcagtgcatgactttatctgcaaaatattagctatgttaacttcgttcttcccgtttggatatccaaaccgtttaaattataagctattgacaaaaaaagtttccaagatcttgagatgtaatggagaagagtatcagactttggaagatgtctttgtaagatgtttacaaagtagttgcatgaactattattaaccacttggcttgagcaaaaaatatattatagcacactttgacagagttgaatattacaactttatgtgtggtattacgtaccgctggacttaattaatgttttactccactcaattgatgggacttat

SEQ ID NO: 34275 - DNA, 1833 bp, Arabidopsis thaliana landsberg
gtttcgtttcttcttcagtcatcaatctttttcctttttcttgaacagtctcttagcatagggtgagatttcctcaatcaggctcataactttccttagagtggagatatatttacaatcatcaccatgcaccatattcatcgtctcaacgtcgaccttttgtttcagttctatcgcagaggagaaagacggtttaaagaggtaaaagacttgataaccatcgcaccactctggaatccaacctatgacttcccacttgttagctctcaagtcgtacccaaaaacatctccgtcgcaagctaccttgttcatttgccacaacaccaaacacttaccgttgtatgccgcaacgttccagcacctcattgtctttttgtgcaacactccgttctggatttccttcactaagacccacttaggatcgataagaatagcctcgagggaataaacgttaatcgattcctccgtcgctgatatcaatgctagttccttctctgtggcctcgaacaagaacttgttcgccaccgcgcttagttctaggggaaacttgattggaatcagccgtgcttgctctgtttctggattgaatgctaaaatgcttccgtcctttctcaaccagtgaacagatccgttcaaagtaaccaggtttcttatccataatgaggacacttgcgctgcaagtaatggttgttgccaacaatctccaacaccaatctcctgtgagaatcttgatctgacacatggtttcgccgggatccgaagtctcagtttcgttcatgcagacaactttgaatctctgagttatttgatcaaccgcaagaccaaggcgattcattttttccgatggaaggtcaaaatttagaattccccatctgtcaacacgactaagaaacattgatttagagtaattcaggaatcgatacctctttgtgagcggattcgcgacacagagaccatcgatgaagagtaggaggaggccagaacaagagccgagaatccttgtcgtgatatctaagaaatcgtggtgcctggatgaactagaatcgccgaaagggttgcagaagaggtttttggagccgaagctggagatgtgaagcaacccggatctgaccccagacaagtacttggatttaaaatacggatcttcagatatatgggagttgaaagatcttctcgtgcatttcatcataaccagagatatgggatccaatctgaataagatcttttcgaagagaggcagaggtaagcccaatgtctccatgatcgacttaggggagaaaaagggagagggagagagtgatacaggaaatgattagggttttgcctactctttgatgagatatttttgtttttctaacatcttcgaatcgacaaggcccgatcaatactcaaatggacttaaccgcttgactaaaagcccatctcgagtttttttatgtgattattcgctgtatatgtgtatttatcgacgtaattaattatttttaactaaaataaatccaataatgtaaagtttgaacgtttgtttttgaaaaaatggaatatctcgaatgaataatattttttcctctttttacaaaatggctatgttttctgaatctatatatagtgattacaaaatgactatgttttctgaatctatatatagtgagaaatctttagtattaacaattgtcccgtagactcatgatatactattacttaataataggtgtaaacaataaaatataaatatcttataaatagatacaatttacaaacttttcgtatatactaatttttaaaaataaattattttactggtgttcgaatgactaaaatctagtacagggg

SEQ ID NO: 34276 - DNA, 500 bp, Arabidopsis thaliana landsberg
aaatttgcagtttttttactggcaattgctataagtgagtttcttatgtaaaccaactgtttgtttttatttattaattatattttatgaatccaaggtatccgaatgttaaattaaatagacttgagttttgaccccaaacatgtcactgtcctattaatgaaataataaattttacttaaaaagacgttacgtcgtaacgtagctctgtaatagttgtactaaccactagagttaataatataattaatgccacaccaaaaaaataaccattcacgcaataagagtacacattaaatgcaataaataatgcttctaacgccaattagcatcgtcgtttctcttagcaaaaaaaatcagcatcgtttcggtgagaaatgtaacgctattaaactgttagcttatttgcatttgcacatgcactgatgcacatgtggataaaaaaacagtaatgtgaaaagtaacgcttttaacgccaagtagcaacatttcttcgagaa

SEQ ID NO: 34277 - DNA, 1318 bp, Arabidopsis thaliana landsberg
aatcgtcgtgagtttttgtgcctcctccatgaattggttttttgacttgaatcgcaattatagggaaaatgtgattttgggcagcttggttgtggtggaatcgctgtagatttcttagcgccggtggattcttatcctcaagctgacgacaagatccgaagcactagcctaaaggttaagtcttttctgatcccacctacggtcttcctgttttggcagtggttttaggttttacagtggacaatgtgtttcaggtgcaaggaggtggaaatgctgcaaatgcgttaacttgtgctgctcgtttgggattgaattcgagactgattagtaaggtcattgctttctcttttctaaatcgaaaaatttgggcatgaacagattcaactttcgtgtagtgatgctaattgatttagtaatgaacattttctttaggtagcgaatgactctgcaaggaaaaggcatgttggaggagcttgaagctgatggtgtggatacttcttttattgtggtcatgctcaccttcttgatcattgtgacgagtcttatactctaaagtttgcaggtttgtcttcagtttcctaatcttgactgtaattgatgtctttttatctcatctcatggcaggtctctaaagagggtaattcaccatttacctatatcttagttgacaaccaaacgtgagttttttgtgtgccctgatgctgtttgtgaatttgaggacctgtttcattgacttctgttgacttttattgtatcaaatctatttgttaagtattcaagcaaaaagttactctatcaactagaatgaaatggtagtcctatggcatggaattgttttgtttgtctagatcatcagatctttattggttattcttttcaggaaaacgcgtacttgtattcacacgcctggagacccacctatgttaccaactgacctttctcaatcgagtatgctatcagcgctagaccgagccagcattgtatactttgatgtaagattacacgaaacagctttggttattgcaaaagaggtaagcatgcatctctttaccttttagatgggttgtagatttcacatgtttctaaatttctcccaaatacatacaccaaaacaagtgtgtttttttaattgttatccgcagtcatgcaagtagtagattgattgtatgtatgtaagactagtctttgatgtttgaagatttcacaagatttcctttttcttctgtgtttccaaaaacataaaatgccacacaacctacatgttcatttcctcttgtgcttgttgcgtttatccagagcaggcaagtcgcaagaagat

SEQ ID NO: 34278 - DNA, 565 bp, Arabidopsis thaliana landsberg
aaacaaaataatattacgaaactaacaaatgtaatttctcttacactagtccatgctaatacagagacgagatttaatttaaaatcaaaataggtccacatgtccaggaaaaaatcaatagtgaaggaaaatgttataaattaccttcagtatggattctggtctagtgtagattcttaaccatgaaagttgcacttataaatctcttgttgttttactttgggattatccattaaatttcttgttaatgttaccattttgtgcttttcttcaacttatatttttgttgactgtccaggttcgaggtgctttagaaactcttcttggtgctctaacgccaatcgatcatgcaagggcacagaagactgaagtccatgcagctcttatgaactctgacttgctatcccgtgaagctgaaaatatcactcttcttttgagtttgctggttagagtttactcaatattttcgaaatagaaaaagttatgttttacgttctgttgtttttttatgcctgcatcatatggtttattttcctggtggtatgacaggaggaagaagacttta

SEQ ID NO: 34279 - DNA, 5670 bp, Arabidopsis thaliana landsberg
tcataagccacacaagaaagtcgctacgagttctactccttttgttttccctggtctcccaggagacatagttattacggaagaccaagccaatgttgccaaagaagaaacgccaatgggaaagtttatgaaagaggttagggaatcagagaccaatagctttggtgtattggttaatagcttctacgagctggaatcagcttatgctgatttttatcgtagttttgtggcgaaaagagcttggcatatcggtccgctttcgctatctaacagagagttaggagagaaagccagaagagggaaaaaggctaacattgatgagcaagaatgcctaaaatggctggactctaagacacctggttcagtagtttacttgtcctttgggagcggaactaatttcaccaacgaccagctgttagagatcgcttttggtcttgaaggctctggacaaagtttcatttgggtggttaggaaaaatgaaaaccaagggaatttttttcctccccagccattattaatcaatgtagtctttattagtatatttccaaaaatattaacatttgtgtatacattttcctattgccaaatatgctatgatgccatagcaatgagtagattggtttgtgtacttgatatattactttgtagaagttctagcaattatgacttggtgttggtgtagttgggacaggtgataatgaagattggttgcctaaagggtttgaagagaggaataaaggataagggctgataatacgcggatgggccccgcaagtgctgatacttgaccacaaagcaatcggaggatttgtgacgcattgcggatggaactcgactttggagggcattgccgcagggctgcctatggtgacttggccgatgggggcagaacagttctacaacgagaagttattgacaaagtgttgagaataggagtgaacgttgaagaaaccgagttggtgaaaaaaggaaagttgattagtagagcacaagtggagaaggcagtaagggaagtgattggtggtgagaaggcagaggaaagcggcatatgggctaagaagctgggcgagatggctaaagccgctgtggaagaaggagggtcctcttataatgatgtgaacaagtttatggaagagctgaatggtagaaagtagaggaagagaatatgtttaatgttctgagatagattattgactttgtgttcctctttggagttgttctttatgtcatcttagcttttgctactgtttagtaagagaaagtccattgtgtgtttctatataataaagctttatcaagtcaaaaagaatagacctgaagataggcattttcaagtttctgctttaagataccaaatcttcgttgtgcatactttttacttcttgtgatcttactatgtgatttatatggcatggattatataggtcggattttctttgaattttaagtatataaatttgaagtaacaaagtatgtgtagtaatgatgcgatggtaaattggtaatgaatctagggcctaaactagtatagtttcaggtttattccaccaaactcttagcgtatgtcacttggatccaccaaacttgatccaagcgttttacaaaattgtataccgagctaaaaataaaacattctttgttgtttccacaaaccttattttctaacatagcctacatgtgtttctccttaagcactcattcttttggcctctcgactctttgaaaatctctcacattaagacttaatgttacccaaacctaattaaactactcgagaaccccatgttcgtgtccatgagaattctcactcaagtcttccctttagccacttacaaaactacttgtagaactatggctatgaatgatgacataactcgcacccaaaaccgcatcataacagtgctgtaatagtatcaaaatctttacatatacatatatatctatatatttttattactatttaaaccgcaccgcacttctcccacaccacaaaacgcagtcaccattaagacaatatgtttaaaaaacgctattttgccattccccataggctcatggctttaaatgcaaagccttcgaaatttatggctcatagcttgcacaatactcatcgctaagtgagaagtcaaagtttgcttctacgagaaacagaacacatgtgctgactcgattcccggtttgtagccaaccaaagatgacgaaccagaatacggcaacacaaaagtaaaatatgacgtatgcaaacacgtaagtgatcttcgttaattaattttttatctgatcttcctccactgtcttcttttaagtgcacacgtgcgtgtatatatctcgatatggccgaaactggaagaaacaattcagacaaagtcccaagctaagaaaagagactctctttgctttgactggcagaatattttccattcttgttctgatttcttttcatttatcttcttaatcctaaaaccaaacatgaacagagagcaaattcatattttgttcttccccttcatggctcatggccacatgattccactcttagacatggccaagcttttcgctagaagaggagccaaatcaactctcctcacaaccccaataaatgctaagatcttggagaaacccattgaagcattcaaagttcaaaatcctgatctcgaaatcggaatcaagatcctcaatttcccttgtgtagagcttggattgccagaaggatgcgagaaccgtgacttcattaactcataccaaaaatctgactcatttgacttgttcttgaagtttcttttctctaccaagtatatgaaacagcagttggagagtttcattgaaacaaccaaaccgagtgctcttgtagccgatatgttcttcccttgggcaacagaatccgcggagaagatcggtgttccaagacttgtgttccacggcacatcatcctttgccttgtgttgttcgtataacatgaggattcataagccacacaagaaagtcgcttcgagttctactccatttgtaatccctggtctccctggagacatagttattacagaagaccaagccaatgtcaccaacgaagaaactccattcggaaagttttggaaagaagtcagggaatcagagaccagtagctttggtgttttggtgaatagcttctacgagctggaatcatcttatgctgatttttaccgtagttttgtggcgaaaaaagcgtggcatataggtccactttcactatccaacagagggattgcagagaaagccggaagagggaaaaaggcaaacattgatgagcaagaatgcctcaaatggcttgactctaagacacctggctcagtagtttacttgtcctttggtagcggaaccggcttacccaacgaacagctgttagagattgctttcggccttgaaggctctggacaaaatttcatttgggtggttagcaaaaatgaaaaccaaggtaatttttttcctccttaaccattattaatcaatgtagtctttattagtatatttccaaaaatattaacatttgtgtatacattttcctattgccaaatatgctatgatgccatagcaatgagtagattggtttgtgtactttatatattactttgtagaacttctaacaattatgacttggtgttggtgtagttgggacaggtgaaaatgaagattggttgcctaaagggtttgaagagaggaataaaggaaaagggctgataatacgcggatgggccccgcaagtgctgatacttgaccacaaagcaatcggaggatttgtgacgcattgcggatggaactcgactttggagggcattgccgcagggctgcctatggtgacttggccgatgggggcagaacagttctacaacgagaagttattgacaaaagtgttgagaataggagtgaacgttggagctaccgagttggtgaaaaaaggaaagttgattagtagagcacaagtggagaaggcagtaagggaagtgattggtggtgagaaggcagaggaaaggcggctaagggctaaggagctgggcgagatggctaaagccgctgtggaagaaggagggtcttcttataatgatgtgaacaagtttatggaagagctgaatggtagaaagtagaaagatagagcatgtttaatgttgtgagatggattgttaacttttcttaatctttgatgttcgtggtgtgttcttatataattaataaagatctaataagccaatagtctatactgaaatacatttatttggtatatatatcatctatggcaaatttaagtatatgcgtttaaacagaaattgcatcaagtagaaaggctacctgttactttaacataatcttgtgctaggtagttgtggaattttcaggacaattaaaaggctatgggtttgtgcaatatgaaactgaagaatctgcttggaaagctatgagtaaattgatcggcatgttgttaaatgacaagcaagtgtatgttggacctttcctaagaggcaagaaagggattctattggtagcaaaacaatattcaccaacgtgtatgtgaagaatcttgctgaatcaactactgatgatgatttaaagaacacttttggtgagtttcgtaagataacaagggctttgggtttgttaactttaaaaatgctgatgctgcttctaaggctgtggagtctctcaagggaaacacgtttgatgataagcaatgggttgttgatagaggtcagaagaagtctgaaagggaaatggaactaaaggttccgtatgagcagagtttgaaggaaattgctgacaagtttcaaagttataacttgtatgttaagaatttagatgaggagaaactcaaagagctctttacaccttatggcactgttacgtccaaaattcccttctctgctaatctaaattgtactatattctgttggtggcatatataaattccctttcctaaaacataacaggtgatgcagaattctaatggcataagcaggggctcgggttttgtagctttttcaactcaaaagcagccaaagatgtaagccatttgtaatgttttactgagtttgtacatgattagtagtgataactcttcagcgttactatcagtggaatctgtaaagatgtcatagatgagtggtaaaatgattgaaaacaaatacatctattttttctattcactgtttccaattctgtttgtgtaatagtggataaattatgaaagaatgcccacatatatacccttaactgttgtacattctataatctaatatttagatgataccttttggaactttatatgttcctgtgaactttatagtggtgaaattttcatgtaacaatgggtacctgcaccacaatgtcaacaagctcagttttcccaaatgagatcagttgcaatgccaccatctgttggtcctcgtatgccaatctatccccttgaaagaactctttaacaaggttgttggatatttctctatgcattggtcaagtaaagctaacaaataatggtctatttgattgttacaaataaaaaataaatctaccaaagagaaattattttgtaggcttgttgcatagaaaattggaaaattttttgctagctacacgaaatatcaaaaaatacatggtcacacatgccaactatactattatatcctcagctaaaacgaaatagat

SEQ ID NO: 34280 - DNA, 1695 bp, Arabidopsis thaliana landsberg
ggatccccagatctgcatagcatcttgttcgtcttctgcagcagtttcatcgtttttgattggttcactgaacatatacggactctgatactcaacaagatactgcatcgatctcctcacatccaagaacagtctgtaaactctctgaatatcctcaacctccacgactttccctttccgtttctggcatgacaatgcagctgcggttataagatgaatcgcataccttagagatgtatcacgtccgatcaatgtcaaaagctgtttggcctcttcgttcatctcaacgtcttcctcttggcaacggatttctaatatcttccttatgtcatcgtctgtgtaaggttgggtagtgatgatgagaagacggtcaaggagatcgatcgggatcccgtggggtgatttctggtttgtgccacggattgtcgtcactcctcggtttgttgccaccacaaggattggtgacatttcgttttctagagctcggttaaggaatgagaagcattcgatgtcgagcatgtggacttcatcaatgaagagaactccgggaactatctctgcttttccttcttctctccattcagctacttttgtatcaatttgttcccggacttctgatcggatttctccagtatcgccagtgaaaagggcaagaaacccttgtgtcctgcaagcaaacaaagaagaagtacacaaagttacttttttttgttctaccaatcatgtttcaaacattaaattccgcaaccaaaattggttctaacgataccacaaacagatgagttagttatagttataaagagtgctctgactacacactgctaaagaaaatgagcttgagaatttcaagagcatataaagcaatgaattaatctcaaatttgagacatctcatctgaaattagtgagccaaatcaactaaattcccaatcacctaatcactaaaacttcaattttgcaacctacattggtattgcagataccaaatcatgattaccaatgtttacaattcagggaatgttaaaagtacctgctgttgataacatcaatctcgtgaagagtgacacaatgtacaacctctttcctcttctgcaactcaccttcagggcactgcacaaacttggtctgcgcacccatagcatcataatcacgagacctcgaaaacgatcttccaagcttagtaatcttcccagtagctttatcaatggcaataacatcaccactctgcactttctccttgttcaaagcctcaatcatcttagctcccatatcatacacagtttccatatcagtcgttttcatagtcatcttccctgacttggaagcaacaccagaagaagcaggcctatcaatctgaacctcaacaacttctccttcaataacctctgtctcttctttgatcctaacaccaatcgctttacgaaaagactgagtcaaagcttctgtctttgacatctctaatgagaaaatttcacttcctgcaatcatcgcaaaaggagtttccaagccaagagatttcgccatacccattgcaatcgctgtcttacccgttccgggttgacccgctattagaatagcccgacccgcgattttcccttctctaatcaactcgaggattacaccggcggctttacgcgccttcacttgaccgaccataccttcggaaacagctcgcggctcgagggcagagtcgaga

SEQ ID NO: 34281 - DNA, 3929 bp, Arabidopsis thaliana landsberg
ttcaatttatgcaggagttagaaaagtgtttcctctagcatttcatggcgcatgtgctgtgcacattgaaaggaacgtaagggcgaagagtccggggatatgaatctcagcgcttgttggtcgagctgctcgggcattcaattttggcgactttaaagaatggtacaatgagattgtcaagcgaagcaagaactgttcagcctatttggatgctattctacttgaacattggactcaagcgtattgtctggctaaacgctataacatcatgagtagtaacattgctgaagtgttgaacggtgctatagcaaaaattgttgagctaccaattgtgtctatagtggagtctatcagaataaagctgatggagtgatttgtttcagacgggagaaagcaaaaaaactaatttgtttgtgagaaatcatcacgccaaaggttaacgagctactccttcggcaccataaggcttctgctggtttacctgttaaagctgtttcagaatggagttttcaagttgggtctggcgtaaagcagtactacgtggacctcgcaatgaagacctgtacttgcttgcaatttcagaagctggaaatacccttctgccacgctttagctgcagcaagaaagaaagaagtccttgtgacggaattggtaggtaaccattacacggttacacaattctgcggggcatatgaaatgtttatttatcatgtgcctaatgaaagtgatgaagtcatccctccaactgtgcaagagactaaatttctgcctcctaagaacgagaatggtccaggacgtagaaggaagagaaggatccctcctacgggggagtatacggtacgtcaaagtatatatattgaaataagtagacccaatgttacactaatagagattttaatgtgacagggacagaagagcctcaaccgtggaccgcataaatgttttacatgcggtgaaacaggtcataacagagctacttgctctaacatgcctcgttaaggttagtgcagctgtttatagattactttgtagttaattatgcggtattggaattgtttgtgaactttggctgttaatacttgtggtaggttctataaaataaaaggaaaactttttgaaacataagaagctgaataatgtgtagcgggaaagtaattttttttggaacgctaggcagtggcgaatggacacagccctgcagcagcaatatcttttgtttctcgggaagacacgcctgagaataagccctactccatcaagtaactttaatgtatataccaaggatggttatatccagtttgtataattaagatgttgagcatcaaaaacaaatgatgtgtccggttcctatgaatgaaaatgcttcttatggtgtacctgcttattgtaagaagcgtgcaaattgaacaaggaatagaaatacattaaggcgggtacagaacaggctggaaaatatgacatgtcgagataaaaggtgatgagaacatggcctaaaacgtaaaggaaagtacatgagagaaacaaagtagtcgattagcataattcctgaaagcgaattgcaaaaaaatacacaaaacaacgacgacagaggttctcgacagtgttgttgtttagaaaacagtgagggagatcatagccaaatacaaacgtatagtcaaaccaaccacaccttggtaagcggaaggtagcagtttgatgtaaaaccatttcagcaattgacacagctgcctcattagaaggaatccaagaaaaaggcctacatcgcttgcatacccccgtcataagaacctgaacaaacaagaactagacctagtgaaaaccttgcataaatgctggctggacatgtcgcaccaaggaggtcaaccgaacgcgtaagccttcaacaaactgtgcatctggttgccacgttccaaacaacgcaaaaacaaagggcggtacatagaatctacatttgcatgcgaagttacgaaaacaaactcatcaatatcagcttcggcaagaacactgcgatcgaaaaccatagtcaggaagtcaggtccagaggctatcaaagaacctaattcccaaaacccatgatgtgctacacggcggacaatgtcaagtgataataggtttctagtcaattatcctaaaacttcaatcatgtcgttgtagtattttaagttgtcaatccaaatgggtgtgatgctagcaatcaagatgcaatcagagttcacaaaatcaagccaagcaataacatgttttggggtgttctagcagtcctaagtgaacatgcaggaaacagaaaatctagaagaatagaaaagcactcgaccaacacagcttgttgccaagccctggggggggggtcgagtgataggtcgactaatagacagaaaatgtaacaaggatactcaactgcacagtctgtttccagacaactgggtggtcgagtatgaggtcgagtaacaagaaagaactgcagaaattaagcgacagataacaagatgcagtaaacaacagtagagtaaacaaagaattcaatcagataaagaattcccgaggatggggtaattgagtagtttcgattcctcagtttacaggtgattgacatgctcaataaattaaccctagacaacaagttcattaaccaaatctaagtgccaccgcaacagagaccctcaagttaaccaagtcccagactcaatcaccattgacgagagctaacctaacaggcattacgaatcaacaagttaaagccaaaacgctccctgcaaccaataccttggtacagggtcacgaatctctggaattagtggttcagacatttcatcgaacactttttgtgcgcggaaatgtctgggctcaaattccagttgatccgaaaggaagaggcattaagaacaactaattcagaagggatctatcaatcaatactcaatcacctagcatactgagaattctacactactctaacccatcctcagaaacctattcactactcagacatcataacagaaagcataaacgttgaacaagttgaaaacatgatagcaacagtgtaacagcaggatgataacaaaatgaacaacggtaaacgaaatcaagaaaaaaagctgaattctgaatactgaatagataaagagaaatccggattacaaaaggtctagaacacaaggtctgcagaataaaactagataaaaaacttgtttgcaaaaatgtgaagtacatgctacttatagccaaatattctgaaaccctaatacttaaaacgacgcagtattgggacggattaagaactgtactcgactcatgtggtcaagtgggaggtcgagtgaatagttggagtcttcttttcttccttgtgctcgagtgtctgattgagtgcggaatgaagaagaatctgaagcttgccatcgagtgtgtagtcgagtggtggtgatggtgatactcgacttccaggtagagtgatggggtcgagtgatgatcaggtaatggtggtaaagacactcgacctcagggtcgagtgatgtggtcgagtgatggtcaggtgatggagatgaggacactcgacctcgtggccgagtggtgaggtgaagtggtgatgtcttctacaagacctgggggtcgagtggtctcttgagatcttgaagctcctactcgccctctaggtcgagtggtttgtcatgatcaggtccacttcttccagttagctcgtcaacagctccaaatcacctgaaatcaacacaaatatgcaacatgcatgcaaacctatcctaaacatgtaaagtgatgataaatgatgagaaatggtataaaacagtgatgatatgatgctaaaatgatgacaaatggatgcttaaaacatgttaaatacacacttatcaactcccccaaacttagtctttgcttgccctcaagcaaacaatcaagcggggactcagagccga

SEQ ID NO: 34282 - DNA, 547 bp, Arabidopsis thaliana landsberg
tttatctcttttgaactgagtatgggcgaagtcgggctgcataacattgaagatattatggtacacaaaacaagaaaaaacatcaaaacagtagtaatataaaaaactataatgaaaatagaaattttggaatttagtagtctacctgctctcttacttcatgtgataactaggtaaatacccgtgcgttgcaacgggaaaaatattacaacaataacatatgtatagccatgtgttgtgatgttaatcaaaattaagctgcctctaaaactttgtagagaaaattggtttcaatcttgaagggtaagaattgttgatgttcttgatcctaaccgcgctccagacttacttgtcgggttcatctataaagtaaaaattatagaccaaaatcagacgaaaagaccagctgaatgaaaatttccttttcccactaaactgcatatttgcccttgccttaaactatccagtgctataaccttaatatgcgaacagtcattcaaagtttgctattaaaaaaatccatcgcaatattaccaaaacctttttt

SEQ ID NO: 34283 - DNA, 946 bp, Arabidopsis thaliana landsberg
  unsure (1)..(946): unsure at all n locations
cctatggctagtagtgctcaaaagaaccatgccttcatgtatcatgataggagacattccagaaatgtttatagaagttatgatgcttttgattctcatgccatgattgcttctagttcttctattatgcatgatagaaatttagctaggagaaatgttgatcacatgcctagaagaaatgttgttcatgtttctaggaaaataataaatgaaccttcnnnnnnnnnnnnnnnnnnnnnnnnnnnnnnnncgatttgtagaaaggataggaaagtgattgctaggaaactaggggcaaaatgcaagggagataaaacttgcatttgggtccctaaggatattgtcactaaccttgtaggacccaacatgagttgggttcctaagacccaagcctaaatttgccttgcaggtttatgcatccgggggatcaagctggattatcgacagcggatgcacaaaccacatgacaggggagaagaggatgttcacctcctatgtcaagaacaaggattcccaggatacgattatctttggagatgggaaccaaggcaaggtcaaaggcttgggcaagatagccatcaccaacgagcactccgtatcaaatgtatttctagtagagtcgcttggttacaaccttctatctgtaagtcaattgtgtcacatgggttacaattgtctttttacaaatgttgatgtatctgtctttagaaggaatgatggttcattagcttttaagggtgtattagacggcaaattctacttagttgatttttcgaaagaggaggccgatctagatgcatgcttaatagctaagactagtatgcgctggctgtggcatcgccgtctagcacatgttgggatgaagaaccttcataaacttctaaagggagaacatgtgttaggactaaccaatgtttgtttcgagaaagataggccttgtgcagca

SEQ ID NO: 34284 - DNA, 950 bp, Arabidopsis thaliana landsberg
tcgattcacagaccccgcaacacaaacaaaacagcccggttatatttaccagacacacattggcattaatttatacgctctctctctctctaaaccgaagataagagattctctgcagacaagacaatatagaatattaattgtgatctctctctcaccctctctctttctctttctctctctccctattaggtttcattgaatctaaaacggaaaatcctcgggattacttgccagtaaagaaagggtttacatatagttgaattggtccgaaactgaggcgatgattattatcaaccttggtgtggtggtggtggaggcatagacatgtgatggtgttggtatggtggttgttgttgttgtggtggtccaccttgctgctgcatgtgttgcggtggccatcctccatgttggtgcattcccatggcttgaggtggtggcggcggcctcggaccaccgaaaccttgttggtgatttagaaactgaggaggtggtggcggaggcataccctgaggtggacggaattgcatgggtggtgggaccatgctgtgttgttgtggctgagatggccaggatggtggctgagtttgatatacttgtggaggaggtggtggtggttgacggggagcgggaatcgggacaggttgcatgctgccgttagcaaacggacgtggtagaccattaacttgaggagcactggatggagggcccattgcgaatagcgtatggggtctgcttttctgggcagttggatttgtggctgccaaaagcctctctgtaattcacaacagtaatgtgttattgatccaatggtggagagaaactgaatccataagttaagaaaagagaaagagtatgtagagcctaacctgctggagtaccatggcgctctcctttggtgtctttcttgtatgcgtaagagactgtgatttgacgattactgagatatt

SEQ ID NO: 34285 - DNA, 986 bp, Arabidopsis thaliana landsberg
  unsure (1)..(986): unsure at all n locations
tgatacatactagtcttatattttaagaaaagttatagactattcattaaaaaaagattttgttatatatttacgttttattaggattttatctttgattaatattatagaacgcaatatgttttcgataaagtcattgaaaaaaactcaattttaacagtgtataatgttaaaaacatctttgtatccactagagtcaaaatagttttttctaaaattagatatgcacagactcatcacgcgtgtgccacttgcactagaagcattttggataggaggtggtgaagacatgagacactctttcatatgctcatccctagcagtggcttccacaaagacttgaagacaaagttcacaccctttttcagcgaaaatggttttgcatttttctttgaatggtcgagagggatggttcggaactgacattgttcaaaataatcatcaatcaaacaccaacccaaaaaaaaacagagaacaagaagatcatataagctcaagccataccgtgaaggtgttctcgaacagattcgaatgatttacaatgtttgaagcaaaccccacactaaggctgatgaatcgaatggaacgcaatcttgatgtgaaaaaacatattctctataagaattgtacctcttgtagcaagcaactcatttcttggttttgctcccgccagcttccatggctttcacacaacaagaacatgaaattatggtttagacacaaaaaacagaactcggaatgatatgttggctcagatggtttctctctctacttaagtgactcatgaggttttgtcttcggtacaatccattttttgtaacatttttcttttctatataaccacaaatatattttcttcttcttttttggtcgctcatacgtcacatatacatatcaattggaaaatattaaactcttattttcattagaaaatanatcatttacaataaactcaatacatatgacgatatgagtttcataagaaa

SEQ ID NO: 34286 - DNA, 639 bp, Arabidopsis thaliana landsberg
gttttgaaaaagtttaatatatagagaaaaatgcaagatgataaacacatcttcttgggttttatttaggaaaaaataaaagccacatatcatctatgttttgcacatgaccaccatcatgatgtgcacttgcaaaaatggttttgatcgttattttgttgatagatcactctctcgaagaactcatgtccccatcccctacttctactatctccttgggatatatctgcatgttaacatgatcgtctatgaaattcttcttacaaagtctaagattcaactcaacgatctatatacagattctttacccaaacaaaaaaagaataaaacctggtggcctttgtcttcgttatgaccgagtgtacggactttgagctcgcctctgctcgttgttaactcgtctagaatctcagcatcacactcttggacccctctcgccgagttattcgactttaaaacagggttaaatcgataaacctcaatcctttaaactactctagacaaatatcaagaataaaaagaatgtacatattatatagacattgactcaccctgaaagacagttcaagcgggtttctaggagttccagggatctcctcatactccgccgcatcgagttcccggagataagctggttta

SEQ ID NO: 34287 - DNA, 2641 bp, Arabidopsis thaliana landsberg
tgtataacatcaatactaaaagatttaagtctaacgactcgaatcctacttttctttagcattgacgttttggccatataaatgagaaacacatccaaaagcttcacagtgatggacttgaactcatttgattatgaatcatttgaaaaatgtgaatcttgtttattgggtaaaatgactacccttttactagacacaatgaaaggactggtgacttattgggtcttgtacatacagatgtatgtgggcccatgagtttaagtgccagagaaaactacaagtacttcattacatttactgatgattacagtagatatgattatgtttatttaatgaaacataaatctgaatcttttgaaaagttcaaagaatttcagaatgaagtacaaaatcaacttggcaaaacaagtaaagctcttcgatgagatcgtggaggagaatatttgagccaagtttttagtgatcatctgagagaatgtggaattgtttcacagcttacttcacccggaacacctcagtggaatggtgtgtctgaaaggagaagtcaaactctattagatatggttagatcgaagatgagtcacacagatcttccattatccttttggggatatgctctagaaacttatgcgtttacgctaaacaggtgttcatcaaaatcaattgaaatgacaccatatgagatatagattgaaaaggttcataatttgtcttttctgaaaatttgggattgtgaatcttatgtcaaacgattgattactgataatcttggacccaaatctgataaatgctacttcataggttatcataaggaaaccacaaattattacttttactatcctactgacaacaaagtgtttgttgctcgaaatgcactacaagaaaacagtcgttttgcgagggaagaattactcgttaatccctcgcaaacagctatacgcaagggatttgcgaggaaaacgagttcctcgcaaatcgcttctcgcaaatggttatatgtcgcaattccctcgcaattgttgcgaggaactattttcctcgcaaatcacacgcaattgttgcctagtacttccctcgcaataactacgacggatttacgattctgttttaccgcatagcacatctctagcagaatttgcgatggatttgcaagcgttctgcaacgttttttctgatatattaagacttgattagtgtctaattagtctctaattacctagttaattagttgttaactatagatgattttgtatgcaattcaaagctgaaatttcattaacttgttctaaatagataaatacacaattgaagcttaaattcaaaaacaatattagattgtttgaaactctaagaacttgttctaaagagagataacaaggaaaaagcaagacaatgttttcaaaatacagttgatggaggagaggatcctgttgcaaggttagctagggcagcagctgctgtctcctcattagccacctgcggttctggagcagtagacacaggtggttcatttgggttggcctgtcctgtcagtgtcgaaaaccacgtcgaagaattgcagccaaagcaggatctttgtcgcaaaatagtcaaacaggatatcgaagctgttgatcttcttagccggattttgaatgcaagcttcagcggcagccagcttctgagaaaatataaccggatcatcactaggaagcgttggaccactatgggctgaggatgcttcaaactgcagagatccaaccccataaatccttcctttctttctcggaacaacctgcaaagatcacaaaaactcacaaggacacaacagaaaacaagttcaacacaacacaaaagaattcaaacacaactagacaacgctaacagtgactatcaagtacacaacacaaccacacttgcaatagaaagcaattcaaacacaacactacacaaagtataatgaataagctgtcatgatttcagacaccatacacaacacaataagctgtcaagatttcagacaccatacacaacacaataagctgccaagatttcagacaccatacacaacacaataagctgccaagatttcagacaccatacacaacaataagctgccaaaaagaatgacaccatacacaacacaataagctgccaggatttcagacaccatacacaacacaaggacttgcaactaaagacacaaccagcacaaaagaaagagcacataaagtcgtgaccggctgctggagaagaagagacgcgacggagaagaagaagaagttagatcgaacggtggaagttggattggaaagaagaagttatatcggagaagaagacgttaccttggagaagaaacagatcgactcgtggctgaagctggagaagaagagtttcggcggctgctgaagaataagagacgcggcggagaagaagaagagaggcggcgacgtaatcagatcgaagaagaagagaggcggcggcgaagaaaatagatcggagaagaagagaagccgacgacgaggagacagatcggagaagaagataatcgaagaaaaaaattaggtttagggtttgaggcggcaggtttgagctccgcccgagctaggttatcgagtatatataagaaaaaatttcctcgcaaatcactcgcagaccttac

SEQ ID NO: 34288 - DNA, 1570 bp, Arabidopsis thaliana landsberg
aaacgagcgtagaagatagagagaagagccatggcttacccactgaaaacagttcaccaagaagcattttaaaaccagatattttaaaaccttgtgacaacactgccattgatggatctgaaacttctcaaaattgatcagctccttctcctcctgaattaaagtttctgtctttcagtgtctccttcaatgggtggaggtttccaaacaaaaatttcaagtcttgggctagaaaaatggctgctttacacgaacccatttggagaaaagctggcattttcgaagccgtcacagcatccacatacaaaatcaacccaaacacagagctcgttctgggtattgctgagaaatggtgtcctgacaccaaaacctttgttttcccttggggtgaaacaaccataacacttgaagatgttatgttgcttttagggttctctgttttaggttcaccggtttttgtaactctggatagctcaggagagattattagggagaagctggagaaagaatggaagaaggttaagaaagataaaggcaatgcaacccaaagaacatggaaggagagattcatggacagtggtgatgagcttgagcatgtggctttcttagtgttgtggcttagctactttgtttttccatcgcgctattatcatatctatggagctattctgcccattgctgttcatctttcaagcggtactaggattgctcttgctcctgctgttcttgctcatttgtatggagagctaagtctcttgcaagaccacattagagttttcagtgaatcgcttattaaggtgcagcttgatcttaatgctttgtttaagctggttcaagtttgggcatgggagagattcagggatctacaactaaaacctttttcgttgctaaggggtgagccaagattggctcggtggtgtgacatgaaacagagtaccagcaatgcttggaggattttcaacaactccaaaatggatagttttgagtggcgcccctacactaaaactgtgaaaaactgggattttcctcgattttatcctgagagagcaatgcgggtgcctgttggtcccaaccttgatgatgaatttatctcctttgctcgatgcatcaaggtgtctgagcttgttggtattgacagtgtggagcattactttcccaatcgagtggcttcacagtttgggatgcgtcaagatgttcattgtcctgttaaccagaaaaaactctcacgtgatgcagcttggaatgattacgacaagcctattgatggtttgacaatatacattccttcccgttctgcaatatcttgtgttacgcctatgtgcgagccgcagaggaagggttttgttgaatcagatgaaacattgaaatcaagaaccatcataggtgatgacactagttttgtaacttcaggctctaagatgaacagaacaagcgaggatgaaatgaagatagctgagaattcaacaaacaagagacgaaagtacatgaagcaagctcataggagtacaatgggtctttgtcagaaacaggttccatcagacaatgatgaagacgatgataacctcaccgt

SEQ ID NO: 34289 - DNA, 613 bp, Arabidopsis thaliana landsberg
  unsure (1)..(613): unsure at all n locations
agttcggaagaagcaagaacaggatcaataagaaccaaagcttcgatggaggatgaagctgattatcaaataacaaaagataccatagaagggactagacttcaagccatagagcacatcaataagtaccaggctgaaacaataaaatggcgtgatagaaaagttcgattgaaaaatatcaacccagatcatttggtgctccgaaggatagccaacccagatactgtggggaagctacaactgaagtgggaaggtccttttctggtagtaccttcgtcaagacccggttcttacagactgaaggatatggacggaaacgacatacccaggtcttggaatgcggatgagcttcggcgatattatgtgtagttgatgtaatctttttatcctttcctatggcacccttttcctttcaggaggggagaaaggtttttaatggggccatagtttgtactttttaattttttgtttagcctatgcaatacaagggccaaattcccccaaaaatgtaacgtgtaatatcagaatccgcaccatcgagtgcataagagacaggggaaaagctcaaagtntgtccctaagggatgcagagttgtaatactccgaagtgaca

SEQ ID NO: 34290 - DNA, 1359 bp, Arabidopsis thaliana landsberg
cctatttcctggccaagggtgtcaattaagagcaaaaaggcaataagagcatagatatgaacttggagttaataccggagtgcagtggaagtctttgcatggtccaagttcaccttttccttttaattcacttttgagactaaatcaagtaaactcaaacacaaaggttagtctcaaagggccaagttgtagcatgcctccccctaaataagtgcatcacttgcaaatggacttgtgaggtccgggatcatgtgtacaacttgagcaccacaaatgaacaaaaatagattgaaatgcataaattaacatgatcaaaggcataaaacacatatatgctatagatcaatccaagttacgtgaatctaagacatttagctcactacgcaacctgcaaaaccttttctcaactaaaggcttggtaaagatatcggctagctggatctcggtgttaatatgatacacttcgatatctcccttttgctggtggtctctcaaaaagtgatgccggatgtctatgtgcttagtgcggctgtgttcaacaggattatccgccatgcggattgcactctcattgtcacataggagtgggactttgctcagattgtagccaaagtcccagagggtttgcctcatccaaagtagttgcgcgcaacactgtcctatggcaacgtactcggcctcaacggtggatagggcaatggaggtttgtttcttagaactccaagacaccagggaccttcctaggaattggcacgtccctgatgtactcttcctatcaatcttgcatccagcataatcggagtctgagtatccaatcaagtcaaaggtagacccctttccatacccgatcccgaagcaaggcgtagcaactaaatatctaagaattcgcttaacgaccacaaggtgacactcccttggatcggattgaaatctagcacacatgcatacgcttagcataatatccggtctactagcacataaataaagcaaggatcctatcatagaacggtatgccttttgatcaacggacttacctcctttgttgaggtcgacatgtccgtcggtgcccattggtgtcttcgcgggcttggcgtccttcatcccaaaccgcttgagcaagtcttgcgtgtacttcatttgggagatgaaggtgccgtccttgagttgcttcacttggaacccaaggaagtagttcaactcgcccatcatcgacatctcaaatttctatgtcatcaccctgctaaacttcttacaagacttttggttagtagaaccaaatattatgtcatcgacataaatttggcacacaaataggtcaccatcataagtcttagtgaaaagagttggatcgactttccc

SEQ ID NO: 34291 - DNA, 1255 bp, Arabidopsis thaliana landsberg
  unsure (1)..(1255): unsure at all n locations
cagcatagcacgatttgagcgatgacaagttagcataactcagacgtaaaaagaattgttcgatgataagtcagtaattacatcgatttaacttataattaacttaatagatttatacggacataattctggttatgaatcctaaagcgtgaatatttagtacaatcacatgctaaaaatcccaaaagacacacacatatgttcgaaaaagccaatcactgctacaaaaaccgtacagccatccttttcggtgcttcatcgaagatctctgttgccatcctaacccatagagcctggatatttgcatcagtaatgccatcaaaacaaacaccaacaaataaacattcaagaatctttaacgtgtaagcgctgtagtcccctctgatatgtttttgcgggacctttttcttgtccctctgcnnnnnnnnnnnnnnnnnnnnnnnnngcatacggacttcagaaggtatagaatcatcatcagctaccctctcaccatcagctttttccttggcttccttaggcttattcttggggacagaagaagtatcaccgtcaactttttccttggcttcctcaggcttatttttggggccagaagaagtaccacagtcagctttttccttggctttttcctcaagtgattttggcttttttattgtcacctttagaagcacctttggaggcacctttgtaggtggctttgtagcagcatttcttcctcttttggctggctctttcacgattagctcatttaagattttctccttaacatttacctttcttctttggtgatgtcttcgctttggaaattctcctcgccgccgtcgtagagcgtaaacggcgggaacgaggagacttctcaatgaaatcaatatcagaattgtttaccaacctcagcaatatcagcatccttctctaccacggaatctacaacttctttcgactacataaacgtaaagaaaactcaagcgttaaataacgaaaactcaaacctatatatcaatataacgcagcagtaactaaataaaaactataactcagccgtataatatgcagataactcaaccataactaaataaaagttataactcagccgtataatatgacgataactcagctaaataaaaagtaacaactcagccattagcttaccggaggaggactagtaaaagattggtataattgtaggtttccttggaccttttggtgtctgttgagtttggggtttagggttgccatgctgctctttggtttc

SEQ ID NO: 34292 - DNA, 1719 bp, Arabidopsis thaliana landsberg
  unsure (1)..(1719): unsure at all n locations
gatatcacactttatttgaatatagtataaaaacttatataacacagagatttgtttttttttttaatgttgaatgcttttttttgggcgaatttttatgtgattaagatttaattgatttcgtatataaaatattaaattgttttacgaacttatttgtttataatttgataacaaatagatatttgaatattcggtatattttgcttcagtttaagaaatctttgatgatccgtttttagatccaataaactctatatttaaaaaatgaatattgtagtttaatgattttggtaatcttaatgacgtcattaaaggagtttttttttgattaaatttttctaatggcattgtcatgtaattaattacaaaaaataaggttacatttaaaatgtactttccaaataatataggaagatgaaaaacaagtctataaatgagtgtatgatttgattatactgatctaagcacagataaatgaactaactcaaagtaaacatttttaaaacgaataacaaataacaattaatcgtgtcgaataaatccctccaaattgcaaaaagaaaaccaaacaacaacaaaaaaacaaattatataaccgtgagcaatccaagaagaacaagtccaaagacgacgaatcttccgaacacaaagttgatcctgaaatcatcacttccactaacgatctgaacagggaacaagcaacttcccacggatgcattgaccttggtgatcattgcagctcctttgaaatcgcaagccctaacgtcttggtcttgtatctggaaatacatgttaaatgcgtatgatatgttttggactttggttannnnnnnnnnnnnnnnnnnggcttccatcgcggtgcagtccccgtggtaacacgcatagtctagatcaggaccaacttcgtctagattgaccgtgtctttgttcactacgcaccattgtttttccaagtactgcacacctttagctgcaacgggcaccatttggcgtccttgtcccgtgaaatctagcataaactttggtgtcccatcgtatctaaagattccccaatgtctctcaaaaggccctggaagaatactcttcatgtcttcgtcgaggaaaccgaagagatagacctctaatctttcaggcctcgttggagtcccaccgtccttagcaagtcttttcataagccctgcatagaatttctccgctagcttcggcgatgcatatttgtgaccatccgttggccatccaacctaaagaaaaacataaaccaaactcaataacattcttgataaatatatctaattaataacttgcttgtcacgttacctctccaacgataatcttcatatcgtgaatcccagccttcttcaacgcgtaaacaagtgtgtcgtaattggcgtcaaacacgttatcataattctttcctttgtcagtcattgtctgaccatcaccgtcaagaaaagcgaactcaacgggaaaatgctcgtttaggtaaagactaaggaaagggtaaatgttgacggtgaaaggtaagtcgttttcgtggaagaaattgacgatatcaagcatcgtttgtttgacatccttgcggaaatcaccttctgatggcttgtcgttggctgattggtaaacttctgcgttttgtgggatcgtggctctcattatattggtgtgtccagcttctttaacgccttgtgaatgttctttaacgcttggaaatgtgtc

SEQ ID NO: 34293 - DNA, 2698 bp, Arabidopsis thaliana landsberg
catctgcagttttagcactgaggttacaaaaagcgaaatcaacagtatctgcacacatagagatgtcaatgcttcattgtgctttgagttcttgaactcatctcctcaaattgcagcactggattttgatggccttaccaaatatttacttacttatgaatctcgaaaattttcagatatgttgaaacaattccagtcactcgtaaacagcacaacggatcctagtgctaaaggttcctatgatgtatgcgtaggaacgtttgacaaaggtactagttgttttgatgacgccttcaaagatttggcatccaaggactatatcactttggaatggagtgttgtttgtacgcttgacatggcagatgggtgtgaagaagagctgtcaactttcaaacctaatccacaactcttcaaagatatttctattgtcaaaaatctgtctcttatgggtttggtgattgtgaaactatttctgaaaaaataaaaaacgttatattagtgttggtatggtgtgttgttattgcctctttttaagatatcccataaatctctacaaaaatatcgacgattgaattgagaaaagttaatggatctctcattatgagaaagttttgacttttgagaaatcggtatgacaattatcttcacatgatttattaaacttcttcctatatatttttaattgttaattatataattaggcgatattaagacttgaaagaatcttcaaccaatggatatgatctttagattttattagcagaattgtgaaaaaatcaaatacttttaagactggatttttagcccctcctttacagccattaggtcttataaccgattaatctagcggtccttaaaaaagagtcaaaaaatagaaaaagagtcgctgtaaatactcgactagggatctcacctatacaaaattcgtaaaaaatctaaaattttcaaagctcacaaaaccgttgaatatttgccatattgccattgatgtaaaattacacattgttttattttgcactattcacctaccttattcacctacctagcaataagaattttgtgcgattcatcccagatttcctttatttttacatgaatgaaatctacgactgtaaaacctcacatatctaaattacgaaaaaggaaaccgttgaatctttgccatattattgctattaatgttaatcatgtcattacttattagttattactaatataatgaagaagatacgtaatgttagcattaaaactgtagattattattatttgattaaagatgtatatcatcttattatggtagcacaatgttagcattaaaactctagattagatacgttcccctttccactatacaaatcacacataattctctaaaatcctgaacaaaaaaatgttttcaaacgtcaaaagttgtttattaattcatatagttttttttttcttgtttttgttgtttcatcatctgcaagatttagtacggagattacaaaaagtgaaatcaacagtatctgcacacatacagaagccaataccaatgcttcattgtgctttgagttcctgaactcatcccctgaaattgcatcactggatttctatggccttaccaaatatatacttacttataattctcgaaaaacttcagatatgctgaaacaattccaggcactcgtaagaagcacaacggatcccaacgctaaaggttcctaccatgtatgtgcagaaatgttcgacaaagctactgattgttttgatgacgccttcacaactttggcatccaaggactatatcactttagaacaaagggttgtttgtacgtttgacatgggggatgggtgtaaagaagagctgttaactttcactcctagcccacaactcttcaaagatgtttctattgtcaaaaatctttcttctatggttttggtgattctagattattatctgaaaaaataaataaaagttattttagttttggtatagtgtgttttaattatataattagaatgactatatattaccattggagaatatctatggttttggttatatatttttacagccgttagatcttcaaaccgatcaatctaacggttcttaacaatatccaattctcataagaaaagagtacaaaaataaaaagagtcgctgtcactataccgtaccgtacagagtcaattgaagaaaccgagagagagagtgagcggaatcatgacttctccgggaaaatctccgagatccgaccggaaatcaccgacggttgtcaccgtccagccgtcttcttccagattcccgatcagcacacctactgctggagctcaacgtaagatcgggatcgctgtcgatctaagcgacgagagtgcgtacgcagttcaatgggctgttcagaactatctccgatcaggtgacgccgttgttctccttcatgttcaaccgacgagtgtactttacggcgccgattggggcgctatggatttgtcgccgcagtgggatccaaataaccaatagtctcagaggaagcttgaggacgatttcgacattgtcactaataagaaagcgagcgacgttgctcagcctttggttgaggcggatattccgtttaagatccatatcgtcaaggatcacgatatgaaggagaggctttgtttggaggtggagaggtagggctaagtactttgattatgggtagtagaggatttggtgc

SEQ ID NO: 34294 - DNA, 4121 bp, Arabidopsis thaliana landsberg
tagtcttctctggtatccgacgataccactttcaccggaataatcaatctcttcgattcttctttcttctccgttttcgttagtctttgtaaatttcatatccgcaaatttattttccaatggctagagtaaaagactcatctggagaatatgaatcaactagggttgaagcgaccggcgaaattcctccatcagtcgacgagaccgccgccgagattctccaaagagatgaagaaggcacagagcttcttacaacagaagaggaagccggagaaattcagcctacaaccggcgattgtgacgccgccgatttgggtaattcaaacgccgtcgcatgggaatcaattgacgatctttcagacccaaatgccgattcttgtgtagaagaagaagaggcaacgaatgcagttgttcaacatgatgatggagcaaataaggtatgatagaagaccgttatttttttgattaggctcgttttagaatattatgcattggtaaacgattggatttgtgaatggtgcttcagataaaacaagtagtacaactaggtcgtaaatttgtgaatggtcattcaggaacaagtagtacaactaggtagttaatgtgaaattgaaagtattttgaattgaatatgcaggatgatggtgatgatgataacctggcggagaatatgcaggatggtgatgatgatcttcagccgcaaaatatgcaggatgatgatgatgatgatgatgatgataatcaaccattgccgccagaagttatgtactttgatccaactacctacacgaaggtgtgtaagataggaacgaggtgtcagttggtacaaacagtggaatttatagagactttggatgcagaactgaagtggtttaggaatcatgaccaatttaagcatatattccacatgcctaaggagcccaatcacatgattcaaggcatgtggatgcttatggttcgcacggctaagacagaattggcgagagagtgttggtttgttgccaatggagtacctataaggtactcaattaaagagcatgcattgttgaccggtttgaactgccgtgagtacccaaaatactataagactttaggcagtttgaagtttgttgagaagttgtttaagaggactgaggacatcaagattaaagacgtggaagagaagctagaagagtttaagagtgagaagtctactgctaggttgaagttggcaattctgttattcttagctaaggttatgaaagctgattctaaaggggattcgaagatagaggagttgcttcttaggattgtggataatgtcagagcttgtgagacattcccgtggggacgtttttcctttgagaagtgtatggaaggggtgcggagagtaatgaagaacatgaaaggtgtggtgaaacccaaggcacagactgctttttatggatttattactccacttgaggtaagtagtcgagtaaattatatgagtggctagattttgttattgtgaactttcatttacttttatgtttttgtgtctagattctggcatttgagtgcattccgcagcttgggaagagatttagagaagctgtacgtgcagacaaggaatgtccaagaatgtgcaagcacaagttcagtgaaagttgcatgaagggatttactttggaagaaataaatgaagcacttggagatataacggttagctttgttctcttgaaatctatgtttataatctttgtggtgtttgaaatatatgtttacttgacaggatatttcaagcatcttggaacctgatatggatgagagaaaaatgttgtcacgcgttgtagagaagcatgttgatgatggtattggatatatcgatccaattgttgatagttggagagataggcttatcgtagagaaaaagaagattttctggcgtagtctctaccaagcagacattgatggtagacgtattgaaactgttgatgatgttccagctgtacctgaaatccctgggacatctattctctcgttccaggaagctatggagacaggatttgacaagctcacggacaagcttgctttgatggatagcgaaatcaagcggatttgtgtgagagtacaaggaatagaggaatatgtggcagatcagcttgagaaacaggcagaaaaagcctgataataggtttttagtcaattatcctaaagcaccaatcatgtcgttgtagtactgaaggttgtcaatccaaatgggtgtgatgctaacaatcaagatgtgatcagaagtcactaagtcaagccaagcaataacaagttttggtgtgttctagcagtcctaagtgaacatgcagaaaacggaaaatcaaacagaaacagtaaaacactcgaccaatacagctctttgcagagcactgggtgaggtcgagtgacaggtcgagtaacagacagaaagtataacacagatactcgactgcacagtttgttgccagacaactgggtggtcgagtatgaggtcgagtaacaagaaagaattgcagaaattaaacaacagatgacaagatgcaataaacaacagtagagtaaacaaagacttcaatcagataaagaattcgcgaggatggggtaattgagtagtttcgattcctcagtttacaggtgattgacatgctcaataaattatccctagagaacaagttcattaaccaaatctaagtgccactgcaacagagaccctcaagttaacctagtcccagactcaatcaccattgacgagagctaacctaacaggcattacgaatcaacaagttaaagccaaaacgctccatgcaaccaataccttggtacagggccacaaatctctggaattagtggttcagacatttcatcgaacaccttttgggcgcggaaatgtctgggctcaaattccagttgatcagaaagcaataggcattaagaacaactaatccagaagggatctatcaatcgaactaaaccacctagcatactcagaattctaaactactctaacccatcctcagaaacctattcactacttagacatcattgcagagaacataaatgttgaatggaatgaaaacatgatgacaacagagtaatagcaagatgataacaggatgaacaacagtaaacgaaatcaaaagcaaatactgaatactgaatagataaagagaaatccggattacaaaaggtcaagaacacgatgtctgcggaataaaacttagataaaaacttatcctcgaaaatgtaaagtacatgctacttatagcaaaatattctgaaaccctaatactcaaaacgacgcagtattgggacggattaagaactgtactcgacccaggtggtcgagtgagaggtcgtgttataagctggagtcttcttttcttccttgtgctagagtgtctggttgagtttggaatgaagaagactctaaagctagcagtcgagtatgtagtcgagtggatgatgatggtgatactcggccacgttggtagagtagtgtgatcgagtgaatgatggtggtgatactcgaccttttggtagagtgattggtcgagtgaatgatgatggtgatactcggtcatgttggtagagtgattagtcgagtgatgatggtgggacacggccatgttgatagagtgattggtcgagtgaatgatgatggtgatactctaccttttggtagagtgattggtcgagtgaattgttgtagaggttgtggccgagtacttcaggaactcttggatgactgtactcgagctcgtggtcgagtatgttgatttgatcaggtccacttcttccaattagctcattagcagctcaaaatcacctaaaaacaacacaaatatgcaatatgcatgcaaaactatcctaaacatgcaaagtgatgacaaatgaagagaaatggtataaaacagtggtgatatgatgttaaagtgatgacaaatggatgctcaaaacgtgtaaaatgcacacttatcaactcccccaaacttagtatttgcttgccctcaagcaaacaattaagaacaagctggaggtgaggtttgaaagtggggactccgaaccaaagcatgagacatgacaattaagataaatttataagctaacagttctaaaatgcgaggtgatcg

SEQ ID NO: 34295 - DNA, 2804 bp, Arabidopsis thaliana landsberg
  unsure (1)..(2804): unsure at all n locations
caggttccagaccttggcttctcacggcccacacgaagatattcatccttatgattgcttcggggataagttggtgtagatagatttcaaatgttttcagtacttctacgacaaagctgctcaggggaaatcgtagtccagctttcaaaaagcttcggaacactacgacttcattttcctcaggagtcggacaagtcttttctccttcgtcggccctcacaacggacaagtcccggaaatatcttcccctcatgctgacaagatgattttctttgatacttgatttgccgaaaaccgcatggcttggtcgccaagggcgatcttcggagtcttcaccaccactatccacatcataactttcactatcatcagtatcttcagataaaccttctaaaatctccttggtgatcttttctgtatttgtattcgacatggcttcaagaaaccccaggtttttctcttcagatagacttagcttcatctcgacagcagctcttttatctcagacatcttcgcaaaagctgagaaagtgctctcaaatccgaagcttaaaaatttaaaaagccaagcaagtgttgttgcgcacaggctaaaagtcaagtgagcaagagcagatggcaagaaagcgtgccaaataaactcgtggtgagctcttatttatacacctagtgcgttgaaaactggagggtcccgcttgtcaatgactgttgctattctagcaaagggaaggtgttttttcggaccttcggcttaaagccttcgtccatgtcgcaatatgaatttatcattccagtaaattaatattgtgaggggctactgttgggggccttcgtcctccgaaggtcctcaaaaacatgatttgacaatgttttccaagtgaaatatgtgaacaggtatcttcggatccagaattatgaatatggagcacggccaggacgaagcctgaaccagacgaaggtcgagtgtagccgaagctgtgcgcagggaagcttcggcacgatggcagaagggggtaccgacttaaagatgaaaagacttcgggggcctcgacagatttccataagccgttaacaaatgtaatgggcatggatgtaattttacgtgggctggtcccgcgtctataaatagatgaacagtactcccgtactggacacgcggacttggcacttgcttttggcatcacgctcgtacttttcaccttctctcaggaccgaaggtatatttgtaatttagaatcatttctgtttttccatgttaataaaatagaaatgattctatggtgatgcttatatcatatttcatgctttatgtgagtccttcgtcattacttgttatgtttacgaaggtatgtctctcatgaccttcgtccgagactcattatttcccgaaggaacataatgcttcgaaggacgaaggactttaacacttaacactttttatgttgccttgttcttaactcttagcacttgagaacaagtccccaacattggcgcccacctccggtgaactcacttccacttcgagtcttcgtgaacaccttcggaagctatagaccttcgctatggcgccgaagaaagcttcagcggctggggctgcagcactacaaccgctggaccacaaccaggagaccctttctcttcgggaggcccgaagccagaagagaaaagctgttagcccgacgcttgaggaagaagagctggaccaagaaatcagaaacatggagatgctacatcaacaagtacagaggaagaaggagaagatggcccgactagctgaccttcaaaggcaaattgacgaagcttcggaagaggttcgtcaccttgctcaagacgagcaagatcgaaggcctcagcacatggagcttcatcaagagggcttgttcaacgacgatggatggtatgaagattttaatcatggaaattttgcttttgatgatgcttctcctctatcaacagaattgcaggctacaccatggccccagtcttacaagccacctcagctccccatgtatgatggtcattgagacccgaagcaatttctgatgagttatgaagcaactatatcttcatatggaggcaatgcagctgtcatggccaagtccttcgtcatggcagtttggaatgtggcccaaacatggtattcttctcttcggccagggaccattacttcgtggcagaagctcaaggatatactggtgacaagtttccaaggctttcagacgaagccagtcacaacccaggccttgtttcaacgcacgcaagatcatgaggagtaccttcagacatatgtccgaaggttcttgtgtcttagagcacaagcgcccacagtgcccaatgaaattgtcattgaggccatgatcaaggggctttggccaggacctatggcttagtattttgccaggaaaccccctcaaaccctggagaagcttctttagaagatggatgaatacatccgggctgataatgatttccgccaaagaagggaagaagcatacaggttttctgagatgaccaggggcttcagaggaagaatccaccccaggcacgtcagatcgatccataattccaacctaagtgataatagaggaagcccgcctcaaaggccacaacacagctcccaatcttcaaggcaacaacaaagctctttcaggccaccagtcccaaggggcagaggcgacaggagcttcagaggaaggnnnnnnnnnnnnnnnnnnngctatattgtttattctgtggtgaagacannggccacaccacaagaacatgccaagtcacaattcagaagcaaaaagagattacttgagc

SEQ ID NO: 34296 - DNA, 526 bp, Arabidopsis thaliana landsberg
ctctcaacggaagctcaatatggtgtgggggaagaattgctgggtatggcgaatatagccaggaaagggcttccaggaactacattcatcgtgaatgccaagctacggcttgtggaccgaggtaccatgactaatgtgaagaacatagtacttgcactaagtcgatgaactaatcagctatgaagagttacaacatgttgatgcatcagtaaggtgacttgaagccatgatttgaactcatatatggtgaaatggcacaagtcacaggctcgatttgtgtttgcttcaaaaggtgagacaaagatgtttgtgatccttatgaagcaacatcatggagaaatcacacttgagacaccaatgactcaaggagtttacttaattatattttatttaacttgagtataggaatcgtcgtactatcaagggggatccaaaaagaaggttggtgttggtactaaagctcaaaatccttgatctaaaacttccattttacccttgttaatctttagtgaaagtatgtagtggg

SEQ ID NO: 34297 - DNA, 4649 bp, Arabidopsis thaliana landsberg
ctcaactaatgtcttactcacagatatctcgtaaggcagttaatattcttcttcgaaatccatgaatagagggaggtgagaaacaccgcgttgcaacacattacatatccaacgatccacacggtcaggatcaacaccagttttaacatttagggagaatttcttaatgggagaagcgccctgcaatgccaaaaccctatccacgaaatccatgaaactccgaagaattccgtccttttcccgtttaccctcttggggatgaagaaaatcagagtcattgaaatcgagacttgggacaaacgcaaacagataacgccacttctttgcgagaaccgatgttgaagcagcctctttggttggaagggatgacaagatatgagaaataacctcgtccggtaacttgctgaagagatccatcttctccgagtccattgtctacacaaatctcctaagcaatagaaaaatcaagcatacatcagtaccaaacagtaatattctaggatctaaaaactgagaaaggaacagagcgatttaattcaaacaagaagcaaattaaaatccctaaattatagcagaaaaatcacatatacgcaattgctaaatcaatgacgattgatttgatttggggaaccctaaattaggggggattactgaatctcccaataaatggccataaagaagatttgagttgatatggagtacctaccacgttatgaagaacaaagttcaaaactttcagatttgagggaaaagcatacgcatatttttgcacccaatatttcgtaattttattaaattttcggaaaacggataatatacaattcagtatgataaagctcataaattttagaaatgttttctttgtaccattagagatgcgttgaattcagaagggtttagcattcgtaaatatcgtaaccatgatctatattcatgatgatcatatgatgaattactacttgccaaaatgaaattctcatgatgaattacgttgtacaagtcatagctaaaatgttttgttatatttacttgatgatctcacttaaacctataaatgcaagcaaaactcgcatgaaaagaaagaaagaaaactgtgaagataaaatcaatacacgagagcttttctaagaaaggcacaatcgttgcctcgtttcaagagcttctctctctctcttgaagaaaattttctagatctagatttagttttctgggtagtgttcttcatcgcaggccaaagtctttatacgatggttcaggagtgagctcgttactcttcgccgtcaacggtggtgaggtttgtctccatcgatgtggtcgtcgctttagattggcggaggaggagctctgcagcgtgggtttctcggttgtggacgccgaggagtgctccgtagtttctcttgcccggccgttgatctattgttgtgcggctacggcggaagttggtggtggctaggtgggtttcgttgtttggcgtggtggtcaactgtggatctgtttggatcttagatggctaatgtggaggcaagggttcagtcggtttgggtgagctccgacttctggatccgccgcgtttggcatccatccgcccggtttggagagtaacggcttaaggaaatcggcgaagatccggtcatagaagaaaggggttaagccccagtgtgttgggatgcttggtatggaaccgacaccgtcgatccggtgtgtcggagtggctagttttccgggagagttgtagttggtttggtgcgtcggcggagagcgtctatggacggaaaccggaaccctccgtctacggttcgcgttccttcgaggcgttccagttctaatctagccctaaaaagtaaaaacaaaaaaataaaaaataataataaaaagtatgtagaaagaaaacgtagcgttttggatcggttttgaaaaaccaaattaaccaaaccaaaatcaaaaccattcatacgccaaatccttagaatcgacagtcgagcatacttaacagcttaagctataaaatgtataatagatttacgattctttgatttcgaaagcaagttgatgtattattggcatgctacaaaccgtgcacaaattaaacagcatcgtatcaagttcatcactcaacgtgtttgatactcccaccaaaaacaaaaatacgtctttattaggaaaaacatcaaaggaagaagttgactcttttagcttcatagctattaatttggaaaataaaacttccaccaagacttcattgggtagtccacaacctatgtcaaacaacagtgcaccttgaatttaacattgcgacccgataagtcgttgaatgggttagaatccggcgttataggggactgtggacgaccatctttaacatagatatccagctcctccaagcaggagaaatagtccaagaaatgcttgatcatgtccatctctcttgacgttccttgaaactcacgaatctctaaccttttcaccggacaagatgcgagtgaacggcctttctcttcccgaagaatacaggtacaagcgtccccacagtcatcaaaggttgggagggaaacaaagaaggcgaaaaagatgttttagggtttgccaaagtgaagaaggttttaattttcctttacgtgccctacataatcaagtgaaacgcagccttttataaagtgattaatttaaacagctagcgttttataaagtgttaaaagttaaacacacaaaactagtttagatgcgatatgatgagttccccgaattaagtttaagaaaccaaagctaaacgcaaaacttattgccactcaacctatgatttcagttgtgtaactatgtgttgtttcttgcctaaagttaaatcaagttggtatctgatgtgttgtacattaaagtcaagatgtaggtattttttttttttttgctaacgtttagtcaattcgagtaaagctctattaaagactttgcaagcaaaaggaattgtgaagagttagaacatccaaattttaagcgaggttctaaagttcacgtaactgttttcaacgaggcaagcaaagtaacaccagaagaaaattatggggttttctgcactagtctggtttagttggactgggttttcaaatccagtagatcaaaccgagcccaaatcaaatcaaaaagcactaataatactcgttgttttagtgtgctgataaagtttctttcttttgtttgagagttgagactgggatcccattgttgaagaagcgtcactttaacgacatgttctaggtgattaaacaatactgtgaacaagctttatttattgttagttcgagtatgatcatcgatcatttataaaactcaactaagtagtcatcaatataagatagatttacgattctttgatctcgaatgcaagttgatgtattattggcagactcggctacaaatcgtgcacaatacggcatcgtatcaagttcatcactcaacctgtttgatactccgacgaaaagcaaaaaataaaccatttttatcagcaaaaactatcaaagcaagaagttgactcctctttttagcttcggagatattaatttggaaaagtaaacttaaagttccaccaagaccttcattgtgctgtccacagcctatgtcaaagaaccgtgcaccttgattataacattgcgacccaataagtgcttgaatgggttagaatccgacgctaaaggggctaggaactgtggacgaccatctttaacatagatctccatctccttcaaacagaggaaacagtaatagaaatgcttgatcatttccatctctctcaacgttccttgaaactcacgaatctctaaccgcttcactggacaagatgcaagcgaacggcctttctcctcccgagaaatgcaggtacaagcgtccccgcagtcagctgcgacacagtgtacgagaccaccctaaaagcagaaaggagacattagggatttccaatcgtgaactgtatctctgcaaacgtgttattcaagtcatttgatggtttatattttataccttaatgactagagtttctagacgtggacaatttttcaagagaaccggcattgcttgccatcttatatccatgctactctcaatgactaagaatgtgaggttgttgaacaccggcattgcatgagagcattggccaagcacctgaacaacaaaaagacccaaataaacattaaccagctgcaaatgtaacttcaatgtttggttttataagagagaacagaacagcatactattccaagagtccgaggagataagtaaagcttcttaacattggtgacggtatgcataagcttacgcacgttaccaagattgggaaaaacatgattctttcggatgcttagtagcttgatttgtgcatcaactaagtattccaaattaactaatggaaagttgtcatgaacaaatgcagtgtaatttaagcaaacaagattcggtgtatcaaataaataaacccgtgaacacttcatcgttagattcttgaggcttgcacttgatacggtctcaatctcatgattccgatataaacaacgtacattagccaaatctaatgcctcaagcacagggcaagcagaaagtagactctgaaactgaccactatcaaaccgaattgagtcaagaatgagagtcttaagcataggtaa

SEQ ID NO: 34298 - DNA, 2470 bp, Arabidopsis thaliana landsberg
taaaaatatcaaattagagtaactataattttagctttttgatctattaaattttgggaaatttgcatcaataacctacaaaaatttaataattcactaactaaacaaaagaaaaaaagtggatgatattcgatatattttctacaatatttgtcattatacccttgtttcttaccatcacaaccatctccaccacaaccaccaccaccgccgctgtcgtcatcaccactaccaccgccgtcgccgccatcatcaccaccaccaccgtcgccggagctaccacccttaccggaacaaatgccatcaccggagccaccaccccattgtcggggtttccattgtcaccagagcaaccatcgtccgccggagaaaccaccatcaccggagccaccaccgtcgccggagccaccaccgttgccggagccaccaccgtcgccggagaaaccaacgtcgccggagcaaccatcgtcaccggagccaccaccccattgtcagggtttccattgtcaccggagcttccattgtcaccggagcaaccaccgtcgccggagcaaccacgctgccggagccaccaccgtcgccggagtcacttccgttgccataaggagtaggttgtaattacatatcccacatgtgttagttactgaattatgtatgttatagtgctagttatttaataacttttgcaaatatggttattcacctaattcactcttaaattttttgatattctttcgaaatattaaatcaaactattttaaaatgtttcaaactatagtatttaaaaagtttattataatatataaaattatgaatttcaaaaaaagaattgtagaaaattaaaaatataaatattcaaataattataacgatcataactcattcatcatataattcattatatttaaccggccccatattataaatattttgaatatatccgtttatgtttttaaaaaatagtatatttataatttttaactttttgatctattaaatattgatgatgttctttaaaaataataaataaacataattttaaatgctccaaactaaaatattttaaaagattattgaagtatataaaaatatacatttaaaaaatatataaatattcaaattctgattcattacttagtcggacttttggttaaactaatttatatttaaaagaaatatactactctttttctttttttttgggacgaaagcatgatttcattcaaaaaaaaaaaaaaacaagtacaaggatagaaggacactaagatcccaaagtttaaaatacaacaaagctaggtattccccaatgccacaaagagataagcaaccaaatagatagagtacatcaacaatggttccatgagagatttgagccaaacacttgaaagtaatttggtacaggtgaaatcaaagattgttgacaattcttccataaacaacacagtggatgaaaggatggtccctgtcagaagacctagtgacgttgagaggtagccaaaagcatggatctcgctggcacgagaagaactacacgaagtaatgttttagcaaggattcgagcaaaattttgggaaatgagggtggagtgtcgaggtttaaagctgagtgctatagtcaccaagagttggatcgtaggtacacccagatcgcaatcaaaactttgacaatttggagatgaagaacaaacgccataaaacttcaagcttggtggttcgagtaacatgaacataagggtaactaaagccaggattcttagaagtttaaagcaaagccaaggtaaagattgtgaattactactccgatggagtccacgaccattgagtttgtaattacaaggttttgacagaaaataagttaggtcatacatgggcttattaaaacgatgaaagagcacacaccttatggatttgggcaacaaaagccttaatgggccaaatttggatttagggcccactcggggaaaccctaatcttgcaatggggaccagcgttttgagctcatggcggctggtcgggaaattgatggttttgcgcaaggatcgacctcattggagattgtagatgcagtgggagcacaagaatagcatggtctgatgtatagtcgagcaaacaagaagtcttattagcaccagggaaaatagaaagtaccctaagaagagagtcgtcttgcgccgacgacgtctccccttggcgcatctgccaatccaagagggattactcctgccagcaacgaagcccagggtgagtgatcttcatgggggataagagatttggctcgagaaggttttggttcagtggattctagatctaatttttgtaaatcactggtttttgggtgcttctgtttggatgttgcggaactagtcggagggaggaggttcaccggagtctccttccactctttgaaggtcactgaagcatagccgctgaggagggttgagatcaataagattttaaaggattgccacaac

SEQ ID NO: 34299 - DNA, 911 bp, Arabidopsis thaliana landsberg
gaaaaagaatttgtagtttaacctattttcaattaaaacaactttttttttttgaaattgtgtagttatccttttcgatgttgtatatattaataaatatttacaatttagcaagaaatccgttgtagcacactggctaaattcgtcttcattgccgaacttatcgggttcaaagcccgacaacggaagactttttttattttgagtttttaattggtctttttggttttgtatttcattgcttaatagaagatgtgttcaaatcccaataatgttaaaatatgtttcatattaggcggaagtaacttaaggaaaaagactatttaatctattatcaaaggaaataactttttttattttaaattttgtaattatccttttccatgttgtatatattaataaatatttaaaattttaacaaaaaatccgttgtagtacactggctaaattcgtcatcattatcgaacttactgggttcaaagcccaacaacggtagactttttttattttgagttttgtaattgttctttttgttttatatttcattgcttaatagaagatgtgttcaaaactcaacaatggtaaaatttgtttcatactaggcggaagtaagtaactttaaggaaaaatactctttaacctataatcaaagaaacaacttatttttgttttaaatttaataattattcttttcgatgttgtatatattgataaacatttataatttaacaaaaatatccattgtagcacactggctaaattcattttcattgccgagcttaccgggttcaaagccccgcaatggaagactttttaattttgagttttgtaattgttctttttagttttgtattttattgcttaatagaagatctattcaaagcccaataattttaaaatatgtttcatac

SEQ ID NO: 34300 - DNA, 577 bp, Arabidopsis thaliana landsberg
actctttgctatcggctggttgtgcccgagacatcctgtccctgttggcctttgttttcgggcaatcccttgttggatgcgtgcagtcttcgccatgaaacaggcagtaatatctgcgcgttgtatgcgcccgtccccggccccggccacgcgtgccattgccgcgaccctggggggatagacttgacgtgcgagcgttcgccggcggggtgctggttggctatgttgtgcacctgctgctgactgtggctgtctcgtccggagtctgactacgaaggccttgtccaggttcggctggactgcggagggtccttgggctttctctgacattcaaccttgcgctgatggagctcttcggatctggcatacttctcgaacaactaatagagctcttggagatttttgggtgggtccctgatgcagtgactatataggacgctagctcgaaggccactgatggcgtagtgtatggcaatttggtcgtcaaccgaaggcagttgtgacttgagagtcaagaacttgcggtagtactcccgtagggtttccttctcttgctgtttgtagagtgatagctcgg

SEQ ID NO: 34301 - DNA, 608 bp, Arabidopsis thaliana landsberg
gacaaacttttgtttaaaattgtatttgataagtgttttcaagaggaccgatatcatcaaaaatattatgattttttctgtcaattaatattctttcattcttttatagagttgatcaacttcatgggcattttttagttccctcaagttttgatcctcttatgatatatctttatttgatgataaatttattttagttatgatctatggaggttgcttatttcaaacctcgttgatcacttttatttctgtataaaccaaaaaaccagtctttgaattttttctaaaaagacaggttttatttcttcaaccattttttaattctaatgttatataatcttgttttttgtagtacatttttttttgtatttcaggaaactccgatggcggatctcttcggtggtgaccacggcggcgagcttatggaagcacttcaacctttttacaaaagtgcttccacgtctgcttcaaatcctgcgttagcgtcctcaaacgatgcgtttgcgtctgccccaaacgacccattttcttcttcttcttactataatcctcatgcatctttattcccttcacattccacaacctcttacccggatatttatcctgga

SEQ ID NO: 34302 - DNA, 745 bp, Arabidopsis thaliana landsberg
tgagcactgaaactgtgtctctttagtgaagttgtcattttgattaacttgatcttgaatcggagaacacagaaccgggttatatgtttcttcaggtcactggaaaaacatataatttacattggcttaaagaagtttcagatcaggaagtgaagaacttggtcgtggcttttgcttcatcagggactactctgttctcaattgccaacttagaagccgtaacctgaaaaccgacagagaaattttgtaagaataaagttgcagattttgttaatgtttcagaggattcaagaagaagaactaagagatacctgaattgtccatagggttaccagcaggagctgctgattcaggctccttgatctccacaacaacacaatcagacatcaagaatgtctttgccacagatgaagcatgctctaggcaacatctcacaaccttgaaaagaagaaaactcggttagcacccgaaacagcagatttcaatatgtgaaaaagtaaggaactttgctcactttggttggatcaatgattcctgcagccatcaggtcttcatacttgccggttgcagcattgtatccaaatttcacattatcgttagccagcacctgcaataaataaatacagctttttaagcaacttacgtagatcaagagctgaataagcatggatgctcttatgttgttataaccgtctcgttaacaacacttccatttaccccagcatttttagctttcaatttttga

SEQ ID NO: 34303 - DNA, 3721 bp, Arabidopsis thaliana landsberg
ccacttttgcttaaacgatgcttattcaatgggattctctccctttttggtttcactagagaggattcagacaggttttccaaaagaacctttactagattaacaagcaaaagcataacactggcctgatcaagtatgatatttgcaatttgaaataacaagttgtattgaatcgtgcaaataaacacccaatatgctaacgatattattaagtgatcagcacggttgataaaacgcatcatttaatttaaacttgttagacgacgatacacatgaaaaaagaaaccccctccttatcctagacacgaaccacaaaacaaccacaacaagaactcaaaccaaaagtcattgcaacgtaatgtccagagaatcaagacacctgttgcttagcaatgccaataagaagaacaacaaagaagaaaaagaaataaacacttactgtgtttcattgatctgcacatcaaaataaataatcttttcccggacacccaacacacataactagaccattcattccaaagatatttgaacaaacaaagctcacgatcaaacacaagatcactaataccattccaaagatccaaagttcctaaccaacaaaactatcatactaagttccatgtgtcttaaacatcaaaacaaaaaatggtgtcgtttcctcaaagcacctcccttctttaacatgaagaacaagttcaagcaccaatgaacatacacaacatcataaaggaagcattaaagttcagtaactcaaaagaagacagaaatgagatcaatgatatatgagtaaccaatcccaagttcagatttcaatctctcaagaacataaaccctatatgagtagtcaattctcagcctagaaacccatgtcaaaatcactctcaagaacataaaccaaatcgaattgagtaaaaaggatgagaatttgcttacttgaagtagattaggattctcaggaggatccatgatgtgatggagatgggttgttgaaggaactcgccggagaaatcgccggagagaagaaatcgccgaataagctccggagaaacgtttcccgacaaaaccaagaaagattttttgcccaaatctatttttcccaaatcgacttaaaccttatttttgaccattgggccgcccatgtccattacgtccagtccgctaatgcccatgtccgctaacgcccatgtccattaacgcccgcttcataatgggcttgtccatgcccggtccattaagcgttggacacgggcagcccacgggccgcccgtccattttgacagccctagttgagcgtgaagacctagagcacccacgccgtccataaccgtgagacaaccgctaaagtatcttcctccgcctaaactcgagccacaaccacatcggagggagaaacgccacaccaccgttgacggagaaccacatcggcccactcctgagctgactgagaagaaaaacaaccagaaatgaagatctaaggaaactacagatctagatctaagaaaaaccaaaaatcgcattcaagagagagagtttcacagaaaccaatgcaacgattgtgcttttctggttacagaacttgtacgcttttaattttattctctgttatataacatctttgaaattcagatacttaagcataggggcatcaatgaaaaactttgtgccttgatgctcaaaaacaagagcaccagcttccatttgaatgtcgtctacactgagtttggtgaatgtcctctgagagtgagtgcacttgcaaatcctcatcaagattatcatctacccttcttgcaatgctcaaatcttaaagaaccgggcaaaacgagataagcaactgtatagcttcatcactggcatatacattattttctaaaatgcatgaacttgagacaagtaaaaaaaaactgacccgaagtcacacatcaaaacatgatggactcttaagtactcaagtgtctaacataaagacttaggggaatcacctctaaaaactaacccttcacatgacacttagcatcaagatgcttaattgtttacggttatctacaaaatttatccaccgcatgacacaagactggtcactctcattgcttgacttgagcttgtagaagcatgaatccctagaggaatctagtaatctaacaacaaaactcactaaggcattgtaaaatgggaatgcattggcgtctaaatcaagccatgggaatcaaaccattggacaaaacactagttttaacaacaccttctgtcggaagttgcaacaagagcatctgacatatcaaagtgtcatgtaatttgcatatcatatcctcttgtcttgcactacagttttcaatttcattgcataatcgcttttctttcaaaaatctttcctcgattgaacccactcaccaaattaaaccaaagatttcaccgaggcaaactcaattactcaattagttgtattatctgcataagttatgtatatctaacattcaatgtctattgtatatgtcactcctccggatacactttactcaagcttgtacaaacatgaatcaaaagacctatgataagctaggaggaatagtgtgagaagctcaaacggattcgttgaggctcgtgaataagcaaagagaagcagagaaacagagtgaaaacagagcaaggagaaacagattgtttaaccactagcttgagagtctagtgagttgtatataaatagatagaagagtattgcacaagttatgtattgatgtgtgtgtaacaaacgtatcgtttgttagagaagagttaagaaatctcttgaacaaatctccattgttagagttcttgagtttgtatcttggattgagaagtgataagagagattcataaggaactattactagcaaaagattacacttaaagctcataaggattaagaaagttctcaagaaagtttcaaaaaaatataagtggatatgttactgttacaaggagctaagacatgacagtctctcaaaatcagtttcagactaactaaggagaaggataaataaatctgttcaaacacagagaagatagaacaacattttgagacagtatatcaactatgctcacctcggtttacccccggtttagctcttctactctgggttcaagaatcgctttcggttgataaaccgttgggatttatgccgacttgatcaatggaatggaagcagtttcccctgtggctgtgtgctgccacttctcatcatcgcgcaaaattcttcaaagtttattcttccatcctgtaacatagttcattacaaggtttcaagaaccagtttaatgtttgagatgttggcttatatgttagagagtgcaacttacattgtcggtatcaacttcggatataacttctttgatgctagcttcatctcccattccatattccttcatggcactttccaactcatctctagttatgtgcctgttgtataaccaagccattattaacattggtgcatgataatagttgtacacatctgatacttagtctccatgacacaagaaatgaacaatggagactaattcataaactgaaaatggaaaaacttacccgctgttgtctttatcaaagtgatggaatgctttgtatacatgctcatctcgatctaatttgtatctatgcattgccgcagagataaactcgtagtagtcgattggttcattacccatcgacgtcagcctgaaacgtatcatcatgtgttcaagcttt

SEQ ID NO: 34304 - DNA, 1521 bp, Arabidopsis thaliana landsberg
gggggctattctactacttgtatacatgttgtgcctgtgcaggctctgatttctataactaatactatattatggagaccttttctctcaaagtgactaccggtgttccagaaccatccatcaagaccctcttgtcgtggagaccaaacacacggttcctttaccttgaacagcaggtttccgttgacgttcgttatcacaaaattaccgtccgtcaccgacatcatcttccgtacgatcgccatatctatagcgtaagcgagcgcagtaccttggatccactaccactcctccggcttgtggagtcggagctcccgagggccactaccttgcgggtatgcgtacacgtacggctgctccattcttctctttctccaccgaaattgattcactctctctatttttttctctctgttttgctttggttgaaattaatgttttctttttcttcttggtcttattatgccgtgaagataagtttcagggtcttcgactttatataaatatacaaaatatctgtatcgaatatgttgacttttaaaagtagacaatcctacgagcataaacttttaattctagatagattaaagattccaagataaagatttcctctaagaacaaaccaaaaaaaacagaagagaatttagactatttaattatttcccgtgttacacttttcttattgatgaagtagacgaatatatcaaaatgttgcattattgataaattaagggaggatacacggttgtcaattgtttttaatacggtccaaatctgtgacgacgcgttttgttaccttaaacacggaaaaaaaagaagatttttactcaacaaacaccgacgtatgggtcaaatcatatttttttggattcttttccatataatttacaaattagtatttttttcaaccatcgaagatttcatactaattaatttccatgttgctacagaattgaaatcaaatttgaaaagaaaaaaaaactccaattgtggtctcccaaataacatttgttaaaatctatcaaatgttcaaatcatttaagggcccgcctaacactcgttgatattgaggcaactgactatttaatattgttgccattagtgaagcccagtatatggcctagggagatatattctaagcccactgacaacataagagcatcgctcgattaatcgttttcagataaacaactttccaatcaaaactattctgcttttgtgtttatcttgaagcaaacaaaacttgcatacatctaacatatctgttgtctcattgcttatgtatagaggagatgtgtttccaaacatgtttgttgagacttcgaactttgaagcaacgctctggtggaattggagtttcttcatgcctcttgctgtgttgttctctccaaattgaattaattgcgattactaatagtgatctaaaaggagctatcgtcatctacaaaaaaaaaatctaaaatataatgataactaataagctaagctcttctttttgttggaaagtaaataatcacgaca

SEQ ID NO: 34305 - DNA, 906 bp, Arabidopsis thaliana landsberg
cagttactgaacaaggaacatgaaaaagcagaggactcaaagcctgtggccatacctgccaccagctagatcaggttttctcgtgacttactgtagtcatcattgcccgcgatgaaggcagctattgtgtgttctcttccccaaaacaaaggtcaagtcagggtgggggaacgaacgagtttagtttgatatcgacattgttgatttctctcagttgttctgattcagaatgtatcaaagagtcttttttcattttatctttcaagttcgttaggcttaggcctctttttgagggggttttaagatacaaaagttcacgtcactgtgtcgaaatctcttcagagatggtcttaacctattgaaattaagatattttttttcacatttagcctatgtgtgttttttttcgtctgttaatactctcacttcgtgactagcagaactgtataatttgcatattacctagatttaaaaaggaagactatacattttgatgagcttttctttaaattgaaaagaaacaacaagaagaaaaagtaaagtgaaaaaggattatggaggaaaaataaagttaataaatggcgtaatgttcgtgaaaaggatatttgatgctaaaagacagaaacgaaaacaagaacgtgctttgatacgcattatacttcttctttttctattgtgtattatgttactccttgttaaggatactcatttggcaaatcaatatattactgtgctgttttacttagatatctataagaaaaaaggttaaaaaatcgaaaccgttacaattttgtgtaaacaaaaaaaaaatcaaaataacgtagctcactacgaaaagtaacaatgtagttgtatactatacagacgtgacgtaagcattcaagaagacgactttcatattagtat

SEQ ID NO: 34306 - DNA, 171 bp, Arabidopsis thaliana landsberg
aggaaaggtagggtggtgtgggtccttgcgtttggctaggggaggggagaggggtagaatcagatccgaatccctaaatacctttctggctattcctcaatgccccggctattcaccggaacgtgagaagcgaatgaataatcatctgcttccggaagggagcgaagaatt

SEQ ID NO: 34307 - DNA, 584 bp, Arabidopsis thaliana landsberg
cttgggttaataacgtgggttaattctaaaacttggctttctctactagtaataataatctgaccaactaaaagcaactgcttgacttacccccacataaagctagtccactacatccaaacaggacacttgttgagtatgttgatgtgtactcacccttgctctacacaccaaacccccccatccttaggttgtcagcattgcaacccctactcaggagaggatgaagccgtggaaggagaccaccaggagttccaagattacgatgagttctaggtgtgggttagcggcaacccccagtcggctgcctgtgaaggccgcgtgtatctacgtttcctttccgcactttgattattgtaaagactatgtggatgtctcagacatatgatgtaatcgactattattccccttttatattattatttgagcactgtgtgatgatgtccagttatgaaactgttgtgtacgtgaattgctgatcctggcacgtacatggttcgcattcggtttgcttctaaaaccgggtgtgacactagcaacactgttatggtgaagaatccaatggtaatggagaatgtcattga

SEQ ID NO: 34308 - DNA, 884 bp, Arabidopsis thaliana landsberg
tcttcttatccagcagaaacgcgtgcacttccttgttgatgacaagcagtatcaagtccaagatgggaaggaaaactagttagaagaagttagctacatcaacaatcaaggtggctacaaagcatacaacaacttcaagaccaacaatcccaacctctcttaccgcagcatcaacgttgctaatcctcaggatcaagtgtatcctccacagcaacaacaaggtctgaataatcaaggttttgttcccaagcaacaatttcaggggaactaccagcagcaaccaccacctgggtttgcacctcagcaacaccaaagtcctgcagctcctgacgctgatatgaaacaaatgctacaacagctgcttcaagggcaagcctctggctccatggagatggccaagaagatatctgagttacacaataagttggactgtagctagaatgatctaaatgtcaaagtgaaaacactaaataccaaagtccgttacttggagggacattctgcatttacttccgctcaaaaacagataagccaacttccaggaaaggtaattcaaaatccaaaagaatatgctcatgctatcactctacgcagtggaaaagcacttccaactagacaggaacctaagctagtcactgaggacagtgtagatcaaaatggggaggatttcagtctcagtaaagatcaagctgacaaacaactcgagcagtcactcgaccagtcactcgaccgaccactcgaccatgttactcgaccaccattcccagaaacatcaccaattgctctgaaacctgttgctgtcaagaacaaagaaaaggtcttcgttcctcctccttacaaaccccaacttccattttgtggtcgtcacaagaaaacatgacaga

SEQ ID NO: 34309 - DNA, 364 bp, Arabidopsis thaliana landsberg
tttatactaatttggacagaaaaactttttcactggggcatactaacatatagatccaatagttagtgcatttcataaggaagccaacacaataaatttcacgaatgtaggagatctaaaactctatatatgaatatttgaacacaacacagaaatctgcaatttgaaacacaactgcacttgaacctgggcccacatgtcatagactcaatgagtcatcttcaaccttcagccatctacgcgtacgcacatcagcatgcaacactgtattttctttttgcgtgaaagatgatgtgtagaagtggtcctgcgtgcagctaggtgactcgaggaagacctaacgagagcgtcgagcctatccatg

SEQ ID NO: 34310 - DNA, 2303 bp, Arabidopsis thaliana landsberg
  unsure (1)..(2303): unsure at all n locations
tgtgtgcaatgcctgtttcagtagagatggtggagttaatcatcctcacaagttgacgaatcatccatctttagctgatcaaaatgctcaaaacaaagaagcgaggcaattgcgagtcttgcaggtatacactatactgttcctttctaaaactgatggtgcttctctcttggtcctgaaatttgtatgcaaatagtaacattttttttttgttctcttcttttggttttgcagcttaggaaaatgctcgatcttctggtacatgcatcacaatgtcgttcggcacattgtcaatatccgaattgccggaaagtgaaagggctattccgacatggtatcaactgcaaagtacgtgcttcgggaggttgtgttctatgcaaaaaaatgtggtatctcctgcaactccatgctcgggcctgcaaggaatcagagtgccatgtacctcgttgcaggtaaacaaacctcatgaaattacatcaaccttacatttaagacgtgaaacatatttggtccatttgattttgtgttgatgatcattgtgaacatctctgtctctctgttcagggacctaaaggagcatctgagaagattacagcagcaatcagattcacggcgcagagcagctgtaatggaaatgatgagacaaagagctgcagaagtcgctgggggctcaggttaaaaagaacttgtatatttagaaagatcaattcaaagttgcaaaaactttcatccttctctcgaaggtaacaccttttggaagaagaagaagaagagccagttaaagagagacagattgtgaaattagattagattggtatttaacagtcacgggtcagggattaacatgcgagctttaaaccaaggatgccactttccagaagaagaagaaagagagcaatgccagccttcttcacagatgacaagagtgttgagagattcaggtttgatggngtttggttggctgatcttctgattctatctatacatacacacacgcgcacacacacacttgcccacttctatttttggtaatttattgtatttttgtaaaattgacatttctgattcgggaatggcaagagtgtaacatatacagtacgttaacgtgttttttttttttttttttttttttttttgggtaagcaaagtaagataagagagaatagagagtctttagattctctaccactctttttttttggtaatttgtattgatgaaatttgtattcacactttgaatcaataataatttagttctttgattagatttgtaaacgtgcatgttttatttgcagttagtgtgttactgtgattgagaagaaggtttagagagacgaatcttaatgccacgtaagcaggagattctgataagtatctaactgggcgtttggtggagtttgagaagtatctaaattccaagccaccagaaacggacacgtgtctaaacaaggatagagtgtagaacgagaaccacttagcttaagcaagacagagagtctgatgagaaaactgcacaagaaaatcagcaagagtaatgataatacactgtccttcgtcatctctctatcgcgcgaaattgttatacaacagaggtagtagtaaatctcatcagtgtcagtgtcagagtcgcttggtgactcgatctgcggctgttcgtatatccacggcgacgatcggngctatagccgcggcggttatgatggctgctgtgtccgtagcttcagcagagcttccaccgccgccgccaagatcgagaaacgttatctaacgtaccgcaaacgctgtcaggggaagactgtaagaaacagaggatccaacgagcaaaatccaaaaacgcagagaaatgtacagtcaaatgcgtaaacacttgcattcgcagcggagacggagaaggaccgatcaatatcagaaggtatctctctctctctctctgtttctgtttatatctctctgaattcttcatgactgatattttgatctcttgtaaatgaaaggccattagtggtattcaagcaaggatttcgtagccgtaattactggtatccttctttctagattaaagggttcgttgctttctttattagcatggatcttaattatcggagctgtgacttgtaattgtagcttagtggaatgctcggatatatgcaatttgatcggagatggtgactatggtccctgaaacatgaaaagaaacagaggagaaggaaaaggaactgattcagaataattttgtagaatctgtttttttggaaagaagattcaaacacggtgatatttggtctcaatataaagaatacaca

SEQ ID NO: 34311 - DNA, 4703 bp, Arabidopsis thaliana landsberg
ctgataaggacataaggggaacgaaacctgggtttttgtattggagtgatggctcatttgttatgatctcaatctcatcctgtttttccaattagtttgctctcacatatgacaaatatttattttgttgtaccttcatagtcatctcaagtggtgcatttgtaatagccgccatgagctattttagttaacaaccaacagaaagggacgtgtctagaatattatagtgtataggccgacatgagctattttgtttttcaatcaattgctatcttattacgtaaggattattctatttcattccaaaagaaaaacctacacatttaagtttttttttttttttaaagttagagtgatttgatttcaggtttcgatcgtaagctgtaattattctggactgaacgtacatttctttttaaagtgctagtgaatataattaactcaccaataaccataattatagggttactttttaatttatagtgaacttcccatgaaatactcattaacgatgttaaaaatcttaaatcacctagaaatagcttcagttttgaagtggatatatcgattgttcctccgagtacattagcttcaaaaaagaaaaaagaagaagattagcatggtcttagcataagtatgacacaaattaataattggtagcacaaattgagtttgatcaaacgacatcgtttggaacggaaaaaaacaatgattaaaaaaactattcgaacggcgtcgttcagtctaaattataacattgcgccgtcatatagaacctctcctccgcgaatatcaccgttgatgaagaaattggggtttttagcgaattcagaagcgatcgatttggagaatctcatctgtcgttcgattattctatgggttactctgtttcaaagagactgtaagatttggttgagcattgttgaggcgaaatcacgacgtaatccaacatgtttgattggtatgaagtgttttggctacggcttctctggatacaagcgttgccgcttctaatcagtaaccggaagagaagagtcgttgatgaagaacaaatactgagtcaattctcaaaaaagggtttgtgatctcttgtctatagtcttgggtttttgtttcacaactgagatttgttccgtgagttctgtgacttcaaaaccgtatcaagatttgagttttgtatgataatatggagttgtttcatctgtgtatggaaattggaaagtatatttttgaacaaggggtttatacgattagagcttgtgcaagatgagaggagcaccgaactgtgggtgagtagtgaggactgtgtaaggcgcgtgaacataagaaggagaaagctcaaaggagaatttccgtagaatcagtgtcattgccatctttgcctcaagcagtgcaaaattttggccaatgcagatcctcggtccccacgcaaaaggaaagaaggagacttggttctttgttgcctttgagagaccgtctttgaatctatctggcttgaactcccctgcatcgtttccccacagctccctgtcgcgttggattagcagaattggtagacttatctgaacgccgcctggtagtgtcaggtcacctagctgcatctctttgtgaatggctcgggtcagctggactactggaggatatagcctaaggacttcatataatatcatcgtcatctgtgagggatcaaatctttcagcttcaatgcaacaaaagaactcacgtcacttgaaggtttttggttcggtttacttacaactttgagctggttcaagccttctgcatcaggttctttatcgccaaaaacttgcttcacttcctctcgtgcacgagcctgccaatcttggtgttggctcaacagaaccattgtccaaaccagaagtactgatgttgtctcttgcccggccaaatagaacaacttgcattcttccatcatatcctcggtactcattccattcccttccgtttgccccaagtttgattcaagaagtatacctagcaaatcgtcgcttggtgcttctccagattctcttgccctttcccttttgttaatgatccctctcagtatatcttggatttctctggctgctgttttcatccttctattaccctttgttgggagataactacacaaacaataagcacatgattatgacaacacaagtcatatctctaatagatagcagcactaaaagttaaagatcaagaatccagatttaaaagcactatattaaagctagacaagtagagttttttcattacatatatccgggaataaaaaatttctgaaaagcttgcatgactagctgtgctagttctgcctggagttcaaatatcctgtgtccttctctgtagctgctaccaaaagcagtacgggagatcacatctgcagtcatactcgtaagcccaggccacacgtccacctcacacgaggaccctttatccgagactaacttgtcccactcaccaacaagctcgctgcagctttcgtggaacacatgtaccatattctatatataatagatagaagcagatccacgcaaaagttgggtcagaagacccaaatgaaaaaatacaacttgatatgtgactgagaaataaagccttaaaccttgatcttctcaaggtggaaagccggattgatgattcttcggtgttgcgcccatttatcgccatcataactaatgattccagtggctagtagtctgcccaaaagaaacgtttgcgccttcggatattcataaactttgttgaacacttctttgattagctctggatccattatggtgatggttggtttgggtccaagccatgtaaagaaagtccttcctgtttcaaaccacatagatatacaaaatttgaaactctttttctcttgatcaacagtttaaaacagagaggaagcaaaaggccaaccaggacacataccgtgagtcttgagcatttggaagggatgaggcaggacacgaggtgtgatatcttcggttagtttgatgggtttggatgttgcctccgtcaacatgttgacgttcctcttcaaatcaccgataagaggtgtgtaaggagttccggcaagaccttgtcttctcaagtaactttcaagcatctttggtttaaaccaaacccactgtaaagttctccatacccaccatgacacaacaacaactacaactacagaaactgttacgcatgcaactgatatctccatttttctctcccagagaagagagatagtttcgaagaaggtatggatatggatattaccacccctcatgttttaaaatactgtatagtttgtgttttggacaaaattgttttattttgactcattgatattttgctttacttgagtcactaattgatcaattttgcttttattggggagttacaactgtgtatttcaaaagttgagagattttaaactttacagattttttccccaaatttgtagattcttatttaaatatcatctcttccactaaggcatttctatttggtataaaataatactcaaaaatagatggattagttgttattagggaagcattctcaattcaaaacatggttaatatgactattatcttgaataaattcctctatgaaattttgtttctcatatgtataagttttgataacatcacgtggagtatagtatcaaagcttgtgcaggataagatgagccccacactgtggatgtatagtgaagactctgtaaggtgaatgaacataggaaggtgaaagctcgaaggagaatctctgaagaatcaaagccagagccatctttgcttccaacagagcgaagttctgaccgatgcaaatcctcggtccccacccgaaaggcaagaagcagacctggttctttgttgcctttgcgatcccttctttgaacctctcgggcttgaactccgctgcatcatcgccccaaagcttagtgtcacggtggattagcagaacaggcatatggacttgaataccgcctggtagtgtcatatcacctagctttatctctttgtgagtcgctctgttcatctggattactggaggatatagcctcaggacttcatatataatcattgtcatctgtaggaacaaaatcatcaaaacaaaattgaagaaatgcatcaacttgatttttttttggtttggttaatacttacaactttgagttggttaatgccttgtagatcaggtttgttatggccaaaaacttgcatcacttcctctcgtgcacgagcttgccagtcttggtgttggcttaacaaaaccatagtccaagccagaagtaccgaagttgtctcttgcccggcgaaatagaacaacttgcactcctccatcacatcctcagtactcattccatttcctttggcttgccccaaatttgattcaagaagtattcccaacaaatcgtcgtttggtgctgctttcccagcttctctcgcccttaaccttttgttaacgatccctttcagtataacttggatttctctagctgctgctttcatccttctattactcttcgtagggagataactacacaaacagaagacagagagaatatgagtatatgacacatcatggttcacaatctgtaatagtttgcagcactagtgaagttctaaaaccaggcaggttgagatcttttattaccgatatccagggatgtaaactttccaaaaagcttgtaagatgagatgtactagttc

SEQ ID NO: 34312 - DNA, 1110 bp, Arabidopsis thaliana landsberg
atttcaactactctactactagaatcattatttatgttttaaaaatatcaaaaaaggggttctgagtaaggataaatttacactgttttaaattctaactccaaaatgctgcatcatatgtttcaaattcaaaagaattaagcaaattatgtcaacaaattgacaaaaaaaagtttaagttactatgaagttaaaatcactatttgacacataatttactctcttcttttgctaatacaatgaatacatttccgtcaatttttcaatatccatcgttatccttgtactatcataataggagaagaaaaccaaatataatacaacttcctcgcttgaataaaagtttgagagaatttcagaattcgagaaaaatatgagttttatccacccacatgttagtccatattcccatgtcatagataatcatattgtaatattcgaatattaatatccatactaaaagattcacatcaccatgaaaagttgaacccattcaagatcataaaaggaaaaagaatgctcattgcattgtctacacacaaacatgacgcaacctaaaaacccaattaggatcgttacaacaaatcgtggtctcatccacaaaaaaaaagctaaaacactgaacaagtcataaaagaagaaagcaactttacctacaaaggctctctctctttctacaaaagagttccttttctctctaaacgttatgaaacttaaaccggcttggttcagaaatcagaaccaacgcatccatttccgtggctggtttttgctagaagatccttttcttggtgttacattgatcctatccggattaactgctgcccatttgccaaaatcgggtgaagaaaccaattcttgaacagcctttgtcgtgctatccttagtgagctttttccattcttcttttgttagttggctcctttcaggagttttatggaaagaggaaggaaatgtatctgattcagacggtggagattctcgcatcccgttgttgattcctgtacagaattattacacaagcttattatttgtttcaacttgtttaatttgtaatttgagatagagataacaaatcaaacctcctgatggagaagcagaagttgccgg

SEQ ID NO: 34313 - DNA, 5067 bp, Arabidopsis thaliana landsberg
  unsure (1)..(5067): unsure at all n locations
acgttaatgtgcaatatgtaatgataggcctcgaatacgttgtatggaagacttggtttatgtctgggagtagcttgttttgtcactgatgatatcgagcttacgatctattctcagatgaacatttcacatagcggtttaaaacgagttcttgtgagtgagggcatctcagtagaaataagggaagctcaagcagtctctctattccactcatcccatcgaagatacgctgctactgtcgatcctgtaaatattaaagaaggaagttctttatggtcgttctggggttctgtgtgtgtgccattgcctcccatacaaatcatagggtcagcttcattggttgcgtttaggacttcaaatgcaactacgcaaatcaagacttcgtacttatcagatgaggcaatccatttatatgcagaaaaatgttattataaagctcacacnnnnnnnnnnnnnnnnnnnnnnnnnnnnnnnnnnnnnnnnnnnnnnnnnnnnnnnnnnaaagttctgaactctttagggaatggaacacgacaaacagtgagttctgtaacagctaaactaaaggcatcaggaatggtccggtttcagttagagatcgagagaagtattgggaagaatgagagtgtgataagtaaaaaagtagcatggagaacaaaaccgaagatcgaacgggtttggtttgaagtaacggcgaaaatcgaaggagataagttgaaagcagtgaggctgagaaaagtagtgcctttcattgaagtggatacagaagcatggagcagtttgatgtctaacatgtcattcacaaagtttccatcattacttgttcctcaagaagctttaacactcgatgtcaaatggtaggcgcaacacttttatacgtttgataatcttccataaggcagaaaccacagtgtaacgatggattgtatttactcgtccttgtatgtatgtatatacttctggttctgtaaaggattatttatcacgaaaatggtgaaaggagttgttacgaatcattgcatatttgcatgaacaagttttggattttgagcatgtgttaattttacatatattttcttcacccctattttcatttcaaagtcataatggaaaattgatccgaaaaactaaactgaactagcttgatataattaactagatactgaaccaaatatgtaactataaaggtttactctccttattggtccacttgacaaattcattatcttaagatatatgaaccgaatatgtaaacactaggtcttgacccgcatgtacgtgacatgtttcatattttaagaattatgaagtaataaaattttattaaatatagatttattttgttgttttggtgctatacattgtacaattgtagtgtataatataaatgataatgtacatcgaaaagtgtagaatgttatttataatttttatgacacaatagctaatgttgtgtataagtcaaattttgaaatttgaaaatgaggagtaaatttaaaaaaatcttagattgaaatataatataggctaatgtaaacaaatgtattttatttagtatttataacccaaactcatatcaatgtatttttcagtttggttttaatctagtatattaatgttagaatatttgagctaatatattaaaactaaagacaaccgttcctggatattccttgagacaacaagtagatctagggttttctactttctttcttcttcgctgctgcttttcattgacaggttttgagacttcttcttgtctatgattcaggagttggtggagagcacttctccgtctacggcggtgtaatttttgtcatcgatgtggtcgttgctcatgattaacgaaggtggagtctcgaggtcgtggatcccggttgatgacctcgtggtgggttctaatttgttttttgatgactttaataaaatcatagaaagtagtgttattggattctgttttaagaagaattttgataactttaataaaatcatgaaactagataaatgaaggattataaactattgcttgagagttttttataatcttgttgattagttttttcataattttgtaaaattttccaaacaatctctgtatttttatgatactacttttcatgactttattttgtgaagaaaagtgtagaaagaataaaccaataacacaataattttaattgattaataatcaaagattcttttgttttagttgaataacagaaaaacagtgattttattaaagtatgaatccaataactctagatttataaaaaaattaaaagactttttacaaatcaaaaactaataacaagaaattttaataaagtttaatcaaattttgactgaataacaaattctaaataatatttaaagtcattaaaacactatttaaatcccaaactaataattcttctttagtagatatcatcaactaaagcgaactcttatttgtcaaagtcgtcctaagcgttataactaaattgtcgttttcatggtcgaatacacattatttaagcatctaaaccaccatgtaaggatatcaaaaacgtgttaatgaattctaaaccataaactcatcctcatatcaaaaacatggcgacattgaaaacaacaatctttatcatcttcattttctatatctcatgtaagctttctctatatatactactactactatatacctcttacattttgatcattcgacctaaaagtccaaataaaatatggtatgtgtttgcaattaataggtacaatgtatgtaaatatctttagagttcaagccgatgcatcatgcttgacaacaaaagagtgtgtggtgcgatgttctgatgaagatgcacagtgtattcttggcgagtgccattgtccgcacctaaaagtcgagattgagccgaccaaggcgatacgatgcaagactgatcatgattttatgcgctaaagattattattatgcatgccttaataatagagaatgtacttgtatttctgtttgagaaaccttaaaccgtgattgttctgattctcatcaatgacctcgatctattctaatattctaaaccttaaaacagaaagctcaaactatacaaaatattcaaagaaaataattataaatactaaaaatccaaaaatatattagaaaataagaatattagataaaaacatccatgtcgaaaatcaataatgttaaataacaaatagaagttgaacaacaacttttcttcaaacaaacaataaaactatatatgttaaaaaattgaaaaatttaaatatatgtacgtagcatataattgattaagaactgaagagaaatggaactttagaagaaaactagatttactaaaatatagtttatcaactggcaaaagctttttgggtaaataaacttgaatttttcagacctgatttgaaagcaaactatcacaaaatcaggtatgttttcagacgtgtcacctaaaccctttcaattgatgcatatcccttcactcgcaatcccatgtgttaaggaacatgttatctctttctccacctcatttctcctattttaaatgtattgcttcaacaaaagggtttacttacaagagaggaaaaatcttgcaaagttaaaaaaaaaaaaacatgtgcagtaaaagtaaaaattgattccttttttatccttacctagtttggtcaagagaatatgtttgttttttttttttggcaacaagtttggtgagaatatgtttgttatatgattccaaatgaaaaagatgaacacgtggaccttatatagatcaatattaattctatttatggtacataattaggaataagacggaattatatcaacacttactttaaatagtaaaacaatttaggaatgtacaaattcctcctaatttgtttccttattacatcactaattatagcaacaaaaatcttgtttgtcaaagtcgacctatgcgttaaataaattgccattttcatgctccaagacacaatatttacgcacctaaatcaccatgtaaagataccaaaaaacgtgtttataaactctaaacgataaactgatcatcctcacatcaaaaacatggcggcattgagaacaacattctccatcattttcgttttctatctctcatgttagcttttctctatatactttaaatatctcttacattttgattaatcgatctataagaccgaataaaatatggtatgtgtttgcaattaataggtacgttgttcgtgaatatctttggagttcaagcaagaaatttatgcaagacagatgaagattgtgtgttgcgatgtcaagatccaggtgcgaactgtattcttggaatatgccattgttcgcgccaacaagttgagactgagctgaccaaggtgataagatgcaagactgatcgtgattgtcccgattctcatcaatgccctaaagattattattatgcttgccttaataatggagaatgtacttgcatctctgtttgagaaaccttaaaccactttaacaaataaaagagaaaccttaaaccatgattgttctgattctcatcaatgccctctattcaacatactaaacttgaaaatagaactatagctcaacctatacaaaatattcaaagaaaataattataaatataaaaataaaaaaatatattataaaatcagaatattaaacagaaacatccacgtgaaaatcaatataatgttacttcataaatagaagttaaacataaatattcattcaaaaaaatataaatctttataactatgtatatgaagtccaaaaatataaatctttataactatgtatatgaaaaagttgaagaaaagtgtaaacgaatgaagccttttgaatcagtaaatggctttatttttctttctaccttgttgaacatttgtgcatgtttatttggtttgagttatgtgaattttttgtttcctttgtaatttgaactatgtagcactcagtttcggttactcagacctagctatttcaatctatacaatttttgtcatactttgctttacaccaactttgatacttttggtgtggcaaatttttattcccatcatatcgat

SEQ ID NO: 34314 - DNA, 442 bp, Arabidopsis thaliana landsberg
tttaccattcattactcatgccccctctcttccttggctcctttttttctattgaattttcaaattttctctatttattcacttattattacgtctaacaacttctctttcacaaatatattacgtatgattcacatcattatataggcactttttaccggttaggaatcttccgttttagaccgattatggcagcgctgatacaacttgattagtagttgactaattcttttttatgtctaaacttcaaataaacgtaattgtaaagaaacaaaaatgagatttatcttctatttacatgaaataaactctgtctaagacttacttattgggggctttgattattcgcatcatctgggggaactaaatcgcattgttttatggttaataatgactaggacttgaatcataagaggctcaaacatctgacatgcttgcatac

SEQ ID NO: 34315 - DNA, 1444 bp, Arabidopsis thaliana landsberg
tgatctattccggtttgcaaccagtgggcattttggttacttactgaaatgtcctcgtgttttggtgttcacttaattgttctgtagatctttatattattgtggtgtcaatatgatttggttctattgttgcttcttctacagcgatgttactagctcgtagttcactttaatttatggaaataaaattgttctgtaacgttgaactgcaagcaaattcagcatctttgtttgattgatgataatctcactcatccgttctctgtagctaaaagaattttctcgaaagtacggatctgttcattaatcatttaggaggcaataagccaatgaacgtgtatttctcatgcatttgtagttagtaatactagcttgttgtttggattacaggatttgagattctagcttttccctgcaatcagtttggtttccaagagcccgggtcaaactccgagatcaaacaattcgcttgcacccggtttaaagcagagttccctatacctgataaggtataaagaatccaaaacattcattcaaaattattttcaggttgcagattctaaataagtttgaattcgacaggttgacgagaatggaccaatcacagcgccgatctacgagttcttgaaatcaaacgcaggaggattcttgggtggtctcattaaatggaactttgagaagtccttgattgataaaaagggaaaggtcgttgagaggtaccctcccaccacatcccctttccaaatcgaggtatggctaatggactacttcctatttggttcatagcggttctattccctgttagtaaccaaaccgttttgtttctgttttgcagaaagacatccagaagttgcttgccgcttaaaaacttttgctcatgagtgagcatatagagactgatggttaaagtaaccgtaaattgtgacataaagtttccggttattgcttgtataccttcttacattctaagttgtactaatcgcttaataatttgcgtataatggtaatgttatatacattatattataaaaatggtgttatatatacaataagacaatctcgctcgcgcacatccaatcaacaacgatggagatgatattacaaaaaaaagcattgaacccttcacctcttacatttcaaagtgtttattaaactagattagttacagttccttatgtaaaaattcaaatatatatagtttagtgggtgcaccaacgtgagtccgccctacttaatcttatatacattattttattgaatttgaaaagtaatccgcaatataatccttgaacgtgtatagattttgtaaaccgtataagtttgtatatagattaacaaaactacttcgctttgaacacttgaaaaaaaaaagaaatgagaagtagactcgaactaatgacctatagaacgttcataacatatataaccaattttgcttcaatag

SEQ ID NO: 34316 - DNA, 466 bp, Arabidopsis thaliana landsberg
tttatgcttttttacgaacgcagatttacctttagggggcttgagtattttccatattacatttgattgataatatcggcccaaatgagtcactggctttctcttcaagctcgaccaaagaagaagaactgttctgaacgcaggcagagattcttcgaacttgatatttgggaaacttgcaatccgattctgtcaccagtgttttgccttcataaatggagtttgttgttgaagaaggaaagctagtgaatgaagattgctcgactttagttctcgtaagttgttgtttcgtttcctttgcttttcttcgatttccaatcggtctttggttctggggattcggtccctttcgatatttccgtctctaaagcttaaaaactgtacctttattggagagaaaatagaaattagaaagtccccaacttttcttgggaacattgaaatcccacgaaacagtcatgaaact

SEQ ID NO: 34317 - DNA, 480 bp, Arabidopsis thaliana landsberg
tttattcgttattcagatggcctgaccgagtgaggcgaaacggaattttttctcaattccatatcgcaccaatcccaaacacctataacaaagttgttcctctacaatggctctccaactttgctatattgacttatggcaaattctttgaacctctcaatctacagagctccaaagttgactcagtaccactgttagtctgaattttcaaactccaataacctgacagttcgactttgagtgtgtttttcttccatttcttcataacaaccatgcttacactcttaagcagagttgttccccttccatagagctacaaagttgatgtggtgccctaaggtgaattctcactattttgaaagttattaagctccaaagttgaaccaaaatactgattttcagactcatgtgtatagggtttaagcggtgctttttgcaattgacccaaacttatggttaacttgcaaatcacattttgtg

SEQ ID NO: 34318 - DNA, 1967 bp, Arabidopsis thaliana landsberg
agcatcaaatctacgaaacaagcgaagacagatagcgtgccaattcgaggctcgtgaacaagaaccatacctttttggccgcagattcagcctcagtccacacaccatcagcttgcttgtaaagcttttcagtcgtttgtttcgttctgcaatagccaattcattcataagcttccattgacatacaagtgtataactcttaagtaaattcaaattacaaatgtttaacttacctcactttcaggtcctctgttacacctttaaactcttctgttctttccttgagctcctttactgttctttgaaattcaggattgctgcaacatcaaccatgttaacaaaaattgaactaagaacatcaaccactgattacaaatttcatatgcctcacatacataacaaatacacattacctatgagcttctcctctaatattcttcgagaactcggtgaaaacgctgaaccggcgatgactcgtatacccaatagcaggaagaaactctgatcttgcgtttgctctctaaatcaaacacagagttactaaatcaatcatcctaatcacaaaaactagttagaagaaaaagaacaaaatattcaccagaactcgttggtggaatagttgacgtaaaagaggctgctttgtgatcagtaaatctcgaattatctttctaatcgccattagaacaaccttcttcgtagtgaattgtacaaacaagatttgaagaaacagagcagcaaaagccctaagaatcggtcctcgagaatgattaagatacaaaaacatatttctggttatattgtttggaagaaaatggaaagttcaaaaaaattacttgacaaacaaacaaaagaagaggggattagattcgaatctgtaccatattttaaagatttgtttggaaagacggatatacatatcctgagtcgggttaataagtaaatagagagtatataagaagagtcgttcccaaacactacaaagcgctcaaggtctgtgtttaatttgggcctttcggaggcccataatctattagcaaactgatcagaatcaaactttggttacacgacaaaaagcttaaattcaaaacctaaagacgacaaaagtaactgtctcagtgtttttagtcacaagcaacgttagcgacggcgaaatgttcggcttgccggcgagccgccgactccgaaaccatggcttggatcagcatcgtcttcacttcccatggtgcataagagaaactttttctcgcgtaagagttgatcagagctgcgatcccctgtttcagcaatgcaccgtacgcgttcccttcttcgtcattcctagccgttgattccactagcgttagatcagatctccaccgttcttttgctaccatcactccgaatattttctccacggttgatctctcaggtaccatcctcggccatgcttccctctggctgctccaatacctgctcaaaaacaccaccaacgagttgagatatgactcagctaaagatttttgtaaagaaaatgaaattcaagattgattgatttactgcggcgtgcatcgtcctctgtgtctggtgtagatgaaaccaggcctcgtcgccgatgaatctccggcaaagaagcagaggaggaagaaggtgaccagaacgagtcgactcggagaacaaagtgtgtccatgatatgcatatggttaaaacagcattaattaatcagcccttggtcttgggactcttgggtcttcattaaatcgctatcaagaatctgagtttgcttgagttatcggtctcctctacttgcctattgctattacctcggaaaaagagacatactttgacgcttttacccttagaattcaaattaacgtgatctttttgtcaaagtggatagagtgaatataattattagggggatataaacgtcatttttgaaacgcacatgagtttgtctgaatctgctgctaaatacgtattcttttta

SEQ ID NO: 34319 - DNA, 668 bp, Arabidopsis thaliana landsberg
caccagacagtccggtgcgccagaccagaggtgcctttggttgtcccttgctcctttgtttggacccaatacttgatctttttattggctaagtgtgaacctttggcacctgtataacttatgcactagagcaaactagttagtcttaaatatttgtgttgggcaattcaaccaccaaaattatttaggaactaggtgtaagcctaattccctttcaagatccccccaacacacacacaccctagcctttccctaaaaaaactacttacttttgttttgtttttttttgtagttcatatttcacattccatagatgtagagtttgatatatatgatgacggtgcttcctagtgtactaaaaacaaggcacaacctattttctttgttttttcaaggtaccaccatgttttaccacaagagcttagaacaaggccacgaacctaagggtccgtttggttgggctgtgactgtgaaaaaagctattgtgtgatgtgagctgtgaaaaaaaactgttgtaggctgtgagctgttaaaaagctaaaaactgtttgatggaaaccacaaaaatccgttaaaagttcttcaatatatgttttcccagtttcatccaaaagttactaaaagcaggtttaggagggctttcagttttgcactgcgagaaagtcagc

SEQ ID NO: 34320 - DNA, 848 bp, Arabidopsis thaliana landsberg
attccagaacattaagtggaactcttatccactgactttgatagtaattttaactgcactagagtatatttgaaaaaagggcccaagcatgatgattggaagcagaaggtattgatgatttggatctgaggaataatcatgacgaatcctgttagacgtacattatttattgagataaatctgactaacaaacaatctcccaggtgtacacgatgcaaaagacaatctttgaccgattaaatcaataagactaaatgatgatgaattgatgatactagaaagaagaaaatcttataagccttaagtcattttcaataaggtgttaaacatttagttgagagtatacgtatagtagaaagagagcaatctgtcgaaggtggacgcaagagcttgcacacccaataactcgtttagcaatctaactggttacgtgtcttccctctatttgattccgaatttttcttcttaatgttggtacgtgaagacgactctcttattgaataaatgatgctttgggaccgctcggaattctatttcttctaaatgacgactcttaacgtacttttgcattttctccatgcatatatatacgtggaaaatggttaatttaatttggaaaaaatgtgtatgtataagtcgttcaaattaaacagaaaagtctcatacaatagatataactaatgtataaaaatgagtcccaagaataatggttaataaaaacaaaatacggttcagcaaaaattaggcaacctaaaataaatcacttggccttttgtgttaatttctctatcagtacttcagtagaatttacaattaagtaagcactgaataaaaatataatcaaactt

SEQ ID NO: 34321 - DNA, 2154 bp, Arabidopsis thaliana landsberg
aagtgcgcgggtcgcctgcttccgcctccggacactctacttgagtccagaaaatatgccgagacggcatctcattttctctgggtaagtatttttcgagccgtttctgaaaatagttattttacgagccgtttttgagtatgattgcatatgtaaatttgaggttgtgggttcaatgaaccggattgtccagtctttcgactcggctatgcggagtaatctggatgcattcaacaagctggcggcggctgaggccagagcagagaaagccgagcgggagagatgcggcagtctcttaggccaccgaggcgaaactggcgagcgaggaggctaagagcgaagcctatgtgaacaaggagaatgctctcaaattagctgagagcaatctgaggatagactctgaggtcatccgctgtaaacgaatgcttgccgaggcaagggggctcagagacagcgaggtggctcgggctgcgcagaaagcaaggcgagaagcttcagaggtcttcctcgccaagtttaaggtggtcgaggagaaaatggctcttctcgaggacgccaacgatcagttcatgtatttgtctcaagctcgagccaatgcgcagctgatcaaggtgcttgaggagggtgggtctttagaagccgagaagtgaaaggccccgatccggactgcctaagtccggacgagttctctcgacccaagccactaagtgacttagccctaaccgtttatgaggttctttcctagtctaatccgttccatatgatttcgtgattcaatatatgagacgaatagagtaaacaaacaatcagatactttattgattaagcaaaggattcgatacaacctatgagtttgcatataagctattacaagtcatataatcgatccctagactatccgaactatcaccacccatcatcccggccttgagtctctcgcgcctaagccaagtccttcccacgatcaccattcgttcctgaaagtcatagagccataagtaatctcatttacttagtcatatgcaagtccatgcaatgctctatatgccatacactactcggatccgtggagaggattcagagaggggaagatcgcgcatcagtccggccgattctcggcaggtcagttaagacccgccggtcctccgccgagccgcgtccccgcctcagccgatccctacccggaccgagtcttgtgtaggatgcacatgacccggatactacccagccctctagtcgatcctttcaaggatccgactactaactcacatcctagaacccttagactcaaagtctaggatcccttaccttccttctcgaggttaggtcgatccgaccctccttctttattgccggccacagcccggctaccgaatcctaagactatttattctcccaagagggagagagttttaatggtgagttttcttgtgttttcggtgtgttgtcgtgtgtggaatggtcctgggcgcccttccttatataaggggcgaatggatgcttcccgaatcaacacatccgttccttgcacctttccgaagagttgcacctttccgaagagttgcgcccttccgaagagttgcacctttccgaagagttgtatctcttcgcccataaccgcccagttcgtccgtcactcgtccagctacctcgagctcgtccgtcactcgtccagctacctcgagctcatccgtcactcgtccagctgcccgagctggactgtcactcgacctgagtaactgtcactccttccagctgagcttgagctttgggcgagctgacccaagtgatttctttacgatcctagcttagcctgcatgatttcccctttgtccgagcttatagccagctctttctcacttgtccgagactccaccttcttctcccggaccaagtcctagccaacgatcctattgaggatcgcgggcgttacaagtctcccccccttgaattggattcgtcctcgaatccgcatcaagttgatctctacccatctccttgaaccactccggaaaattggccttcatcttattttcggtttcccaagtgtattcctcacggcctccacaattccacaagacttttaacaaatcccttgattttccccgagtgcctttcgtcattcggtccatgatccgtaccggccatgctttc

SEQ ID NO: 34322 - DNA, 783 bp, Arabidopsis thaliana landsberg
tgccccgccccaacacacaaagcggtatatggccaaaatttaatcactccacggacacaccgcctcttaactccacagctacggcgtcccacccatgagaacaaattaccgtgagatggcacctcgatcatcccacaattttcaatcatgcatcggaatgggagaaaagaagattcatatctacttttatcttccttttttcgtggtttccaataatctcaataaaatcaccaatcataaaccatggtttcgaacgggtgatacctattcgagtcaaacgttcccaaactaattctcggtattggattaccggatgtccatacacaaaggtaataaaaactcgatttccatcaataataatttcaatatcaataagccgatcactaacaaaaacaaacttaaccggataatctttcgaatacataagagcaagacaccactattacctataggttcaacagtttgaagagaatcaaatcctaatgatacttgcatatcctgaagatgaataagatcattcttcgtttccgatagaaacagaaaacctggagagtacatacgacacatctcttccagtcgatgagtggtaagatccgcacccaccccttgacaattccatgctaggatcctcatttattagttccggagggagattaatatcccaccgtactaaaaaataaagagataatcttaatttttttgaaaagggacacctcattatgagggatatttgttgacgttttagaaactctcgcttttgaattcaagatacaatccaaagta

SEQ ID NO: 34323 - DNA, 2007 bp, Arabidopsis thaliana landsberg
tggatggacatgtgttgtttcaatggtagacacaattagttttttgaaaaaatggcatttggaaattgggatgtcactgttgagtaactttatataccggaaaacttactattttttcccaaactcatctaaattatatctaatttatatgtctttatcaactcaaaactatgaattaaaagtatgatggaaatgaatccaggcataaaatatttacttcacatgagtagcaaatagaaatatagatttgggatatttttttggttgggttaaaggttgatgtcctcatgtggatatcaatttgttacttaaacacaaacactggttaaatttagactgttataggatatcaattcgtggttagcggagttaattattgtttcttttacacatgtcaacaccgtgtttaatcttagttcaaatctcaaaatgtgtgggtaagttatagctagaccacaagaagaataaaaaggacaggaaaaatcaagaaaacgtggagtaaagtggtaaaagcaataaaatgtgaaatgcaactcttgggttataaattaagtgtacacatatactcagtcgacattttatctcagtttgtatacctttcgacacatcaatgtcgggactcaggcaattactttatctctctataaacaattgtgcatgtatcttacatacaaatgttgatcagttcaataattacttgtccatgcagtagattggaaggcaagatcgtaattataacaggcggagccagcgggattggagccgacgccgctaggctgttcacggaccacggagctaaggtggttatagttgacgtacaagaagaactaggccaaaacgtcgcagttttgatcgggaaagacaaagctagtttttaccgttgcgatgtgacaaatgagacggaagtcgaggacgcagttaagttcaccgtcgaaaaacacggaaagctagacgttctgtttagcaacgccggagtcttggaaccactggaaagcttcctcgactttgacctcgaacggtttgaccgcataatggctgttaacgttcgcggtgcagctgcgtttatcaaacacgcggcacgagccatggtggagaaaggcacgcgtggctccatcgtttgtacgacgagcgtctcggcggagatcggtggggggcatcatggttacacggcgtctaaacacgggcttgtcggcctgattagatcggcctgtggtgatttggggaagtatgggattagagtcaatggagtcgcaccgtacgcggtggcaacgccaatgactagccacgacgaggtaacgggaaagcagttggaggattattttgacgccaagggaattctcaaggggatggtgcttaaagctcgccatgtggcagaggcggctttgtttctggcttctgatgattcggcttacgttagcggtcagaatctggctgttgacgggggttatagcgtcgttaagcccatttgaaggagagaatattctataaatcaacacttattaacgccttaatattttactttcaacgagcttttcacgccattatctttttttttttttttttgggtcaaatcacaccatggaataatcgcctataacgttacgtaagcaattacgtatgtactatagttaattcggataaataagggtaacgttattaatacttactattaaagtttctttacttgtaatttactgcaaaaaacaattgttggcttaatggttattaattacaaagtatcagtccacaatcacatcaaagaatttgtcgggacaagaacagaagagttgacgaagagaagtcaagaagaagaagagtcgtcgaaaaagaaaagtcaaaaagacacacaaatatcttgggcttggcttcatcaccaaataaagaaaaagccgacaaaagtccagaggcccattaacagctcaagcccaagatcagattcaaaaacacaaacaaagatttcagaaactcaatcaaaaactttctcctgtacaaattacaatgcaaccg

SEQ ID NO: 34324 - DNA, 215 bp, Arabidopsis thaliana landsberg
tttttgtccacgcataccaacttcagagatgcggggggtacatattatacaacctcggttggccccccgaattgattaatgacacgcatgcgtacaatctttaggcatgtatctgacggacctcgcataactagatgcctaattccacgcaacactcataatcggacttactaaagagttaaggtttaatagtattacatatacaaaaaaaaatg

SEQ ID NO: 34325 - DNA, 1523 bp, Arabidopsis thaliana landsberg
gcatcacgagtcgccgtcaacatgataatgggaatgtccggaatccttcattagctttgctgccggcttttaaatatgccacctcccccagctcccatcgaagagactcggcctttggacggagaggcggctacgtcaaatcctcccgtgtaatgctggcccttccggtgttgatcaggtctcccatgagacggtcaatccggattctcaagacaggatgtgtcttgaaggggacggcgtcgttccagctcaagagatcgccgagtgcgatcaaaatcaatctgttcaggtcgtcgaacctgaagttcaaagtgttaccggcgaccgctccgtcgtcgattatgccgccgcgccagcgagcgaagaggtccacgcgggcctaactatccttgatcaagacaaggatgaaaccgttgcggagctcgggatttccaggaggtcccgtgaggagaaagggaaaggagtggctacccaatccaagaagaggtcagcttctgaagccggtttagatgaaactgctgctccgaaaacattccgcctgtcgcgaggtgagactctcaactccgaccagtttacgttcaagtattttggcgacaaattccttgtgagagatcaggaggccgccagtcatctttggcgtaatttgatgcttcctagggcgaaggagtatcagaagttcgccagatcgtctctggaggtatgctttgattagaactcttatccttattttatcttgtccttaatcgtgtttttccttttccagaccgccgccttagccaacgatctgatcgcgacatatgatcgcaaattgaggttgaagctcgctgatagagaggccttcgacaatctgaagaatacgcggaccaagcaaaagccatctacgcgaaggacatgaaggaaatggccgcgttgaaggatgctgctgaaacccacaaggtggagatcagttcgttgaatgacgaggtcgccaggctcaatggtcgtgaagctgatcttcagaaagagatcagtgatgttcaggttgcactggttgctgcgaaagagcatggggagagggggtgcaacaggctgcggaatgaccgagctgcgaaggtcgcccgcaccactaggaaagctcaagctcccctcgacagagtgaaggcttatctcaaggagcaagaggacattgttaggcccaaagtggatgctcagagtcaagcccaaggtgctgaggaggtggtgggtattctgatgacgagtggtgcaaagattgcggcgttcgagctggatggtcttaaggatttaactcagaaggcaaatgatgaggtcaacgctctgaatgttatcgagctcggggatgatgacctgaacatgtccctggatcagcttggtttctcgaggcaatcctctcaagtgtctcccgtggcagattagcatgactccaatgtcgacctcgttggccgaagtgatatccggcgtgtcagtgtcgaggagggtgaaatgaacctaacgacctaaagaggccgctttgtaatttattttaa

SEQ ID NO: 34326 - DNA, 911 bp, Arabidopsis thaliana landsberg
ctttgacgtattggcaatagatatacactcaaatctggttattttcaaatgataatagaaccatttggagttttcatgaaatgtgaaagctagaaaagtaacaggcatcggtgaataaaaccagattgattcaagtaaaggccagacaaacctatatatgtaaatcaggttcagctttcagattataggtctacatgaacataaacgaacaagtgaaagaattgcatcaaatcaagtaacatgcaaaatatataagagaatctgaatagacataatccctgattgtagtacattggttcctttgtctaaacaagtgaaattcatgaaaaaaaacttaaattgtcattcagacgatcaaaagatctactcttcgacaccagcattctcgccactcttgacgttgtgcttccttgcatacctctggtttctcaggaatttaggatccatctgcaacattttacaaacaaaaatagattaaatatcaaacttggaaggtaacatcagaatctgaaaattgtttatagctttaaaacgtaacatcagaatctgtaatcgtttataggtttaaaatgtaacagagactcttactcctctggttggtgtgtgacggtgtctccttggcttcttgattccgttcttatgcgccttggcagactgattgtgcgccgtgtgattcttcgatttcgccatttctgtaacaacggcacaacacaacttttcaaactcaatcaccaacgaaacaaacgagaagagttaaaagtcaaattatatccagcgatcagccggatataagcagctaacctgagtaaaggggagagacgcgagaggaaagataggtgacacacacaatagtcaaaaccctagatggaaattaaatcaccccacagaccacagtggcctcttagataata

SEQ ID NO: 34327 - DNA, 822 bp, Arabidopsis thaliana landsberg
tgtagagtcgtctgccgagcgtgcaccgcgtacctctggtatggcgtcgcgtcatgttggccttcctatagttactccgatcttgacatagtcttgcctagcaggttctgttgagtcagctcaaggagtggtttggggatgttttcagtacaacttcatcttccctcatcccccagcatcatctttcatcatgcgtagacgcacgcttggtacggtgtattgtcccaaccccttcggtgtatgggtgactgtagagatctcgatactgatgtttctacgaccgaggttgtctggtcccatgggtcagtagggatacgtattcgttgtcgtgttttatagagacccgtcggtgccgctttcatggtccgggcatggctcggtgatgtcccatcatgtcgatgtggtttggtagtactaggacagttcttcctagttgtcgtcttgctgggttgctcggtgtaacacccctggtgttaccagaactaaaatttgggcatggcatcatatgcattgacatgccattatgtttgttacacctagaatgcatccactaggttaaaacttcaaaacaactgtgatgtggtgacttgaagtgttcttaaccctagagtagggtacttaaccatgggattagggtatatgggtgtggtgaggacaaattgagtattacctcaaaaggttattggaaatgctcacaagagactaagtttgatgaaattgagtggcagacaaaaccctagactacccaaaaccctaatgggaaccctagaaaccctaatctgtgccctatatggtgattttgatttctaggaacttttggac

SEQ ID NO: 34328 - DNA, 1177 bp, Arabidopsis thaliana landsberg
cagaaaagcttcccatacatctcgagcgcctcgcggcctattttgttgaatctgtcactgttgagctcagttccctcaaaactaaccccaaaagctgtcctgcatactacacttactgttaattcaagacacttattgttcaagttaaccggattcttctgagaggctgattccgcaattgaatcgatcattttcttgacctcctcgtccttaataggttgaatcgagtgaacttgtttagtactgaaaatttcttgaacacagagcttcctaacttctttccaataatcatcataaggagagaaagcaatgtccagatagttgtacgaaagctctcttggccctaaacaatgattcaagattcatgaggtttcttgaattctatgaggaacagaaattgaaatttgagtacctgacaagcttggacgagtacaacaatggaggtcatgaactctcaaaacttgtcttgctgtatccgaagaagaaactacgactgttgggactcttccaagcatcaaatgcatcaccggaccatacttctttgagagtttccatagagtctgatgcggtaattctccgatctgatgtaagtttcctatgatcgggaagccaggaggacatggaacctgtcgatatttcggatgtttcttgtggttgaaaacggccagaagaatacagacgagaaagataagtggtagaagccaaatgtgagccatttctgttttctgaagggaaacctcaaaaaatgtataagcacgttgctgtcttcaattattttctgactggcgggtaatccatgtttatagataatcatatatataattagagtactctttctatctaaaatatccacatcagcaaaacaataaattaataaaattaaaaaatattaaaaatatcattcaattcaaatctatacatgagaataattttaaatacataacaaaagagttaagtataattaatgaatattaataaaaatatatacaaaaatatgaagtatttatgagtataatatttttaatttaaatcatatatataattagagagtactatctccatctaaggtgtcaacatcagcaaaataataatttcataaatttaaaatatattaaaaatattattcaattcaaaaaaatttgtaatatatgaaattttttaaaaatatataaggaaa

SEQ ID NO: 34329 - DNA, 937 bp, Arabidopsis thaliana landsberg
aatattgtgccgtacgtattttactaattaaagattagtacaaaacgttaaataagattaatagctatggtactactgaatcccaaaatttaaagttgatgtacgttttgtaaatgtgttctattggccagtgttctaaaatctagttgagtataaatgaattaatgtaggtggtgaataaaaagttatgaatttggttgtacaatgaaagaggaggttgatgaatctgacttacttgttatgcttgtgacaactatacaatctcttcttcatggaccctcactacatctacatcccacctttgtttccttttcatattcccaatattcatataaaacgcaataattatcaccaataatcataaaatgttacaaaactaactcggtcggtgcatggtgtaggcctactttccaaaactcagaaaaatgttgttttcggtttataaatttcaatggaaaatgttgtttttattagattggcactttgtgaaatggtataatcatgttttgcaatgaaatgataagatgttggaaactagtaagtggttgcattttgtcctttctgatagctaggattggtgtatagctagtaaaacgtaaccacagtatatataaggcgtttcaacatcaccacaggttcaacatcatcgtcacaacaaacctttgataaccaagagagctacgcatgcactgcgtgatataaatcttttgatctactttcttatagtattgtaacaaatgaacttgatcctccttgacgatgtaacagctctctggagaaattaaagtggtataataaaccaattgaattcagataaacatggtgacagagacttaaaaatagtgtttatgtcttatatattgagaggtatttaaagtaaggactgtcaatcaggcctagttgatttttgtggttcaaaatttatggtttcgaatta

SEQ ID NO: 34330 - DNA, 1343 bp, Arabidopsis thaliana landsberg
gacgctttcacgtttaagtttgggtatacaagtttcgagtccttgagcccaagcccataagtgtattttggtgttaccatcaaacattcttcatgtgtatttgaaatcctcctcctatagattattttggtgaaacaagtactaaggagcgaacagggcaaagtgagaaaaggaacattggcgttgctttgtgaggagaaaggataactcttcgagcggatagctcctttcatggcagatcatcacggtcttaaaaaatgggttaggtcaccggaattacaaaattaggcacgttgaagaagaaagaaagaaagaacgagacactgacatgttgaagttttggtgcctcagtcctcaggctcaaaaaccaattatattcaatcaatcggacagattataatttcaacatgagtataccatccatgattacgcaaagatcaatcactacttttaaacccaaaacgatgaatgcttctttcttctaatcaatcaaacaatcacatgacatggcatgacaaacaaagtgtgattcagaagagaatttctcagagttgaaggaaaatattaactcatttacgattgtttcagctgcataagagaagttcaaagaaggactacttggtagcctgagcaattatattacttatggaactcgcctcctctttcgcaacttcctccaattgatccttccaatattataacacaacatcatttacacaacccttaaggactaatcgttttttgtctcagtgggcattaggattaaaaaaccatacctgggctgatattatccttgcgactgttttctagcttgactcttaaagttctccgacgatcaacagctcgtccagtatataatacgcctagaacaatagcaaccagtttcgacaattgtcataatgataatgaagtaagatacagagagtggagaataattgatcctgtagagtatgtgtgtgtataccttgtggaagttaaaaatcaaatcgagttcacacacctgagggtcatcagataaaacaattccttatcataatttagaggttccgttaaggtaagagatagtaaaagtggaatctcagcaggtgctggtttttttggtactcacacttccaaaatagcgatcgagaatctcaacatagtgatgaatgatctcaaggacctctaactcgttatcctcctgatcaatgcacatgcagaagtagagacttgcatatcttttgtaaacaactttgtatcctctccattcaacaaaattgcagagctttggatttaaattcagcatcactccactgagttcacgtatgaaaaaaatacatagcatgtaagatgatagatgtatg

SEQ ID NO: 34331 - DNA, 1592 bp, Arabidopsis thaliana landsberg
tcttgtaatagtggatgattattctcgcttcacttgggtattctttttgcaagaaaaatctcaaacccaagagaccttaaagggattcttgagacgggctcaaaatgagttcggcttaaggatcaagaagattagaagcgacaacgggacggagttcaagaactcacaaattgaaggcttccttgaggaggagggcatcaagcatgagttctcttctccctacacccctcaacaaaatggtgtagtggagaggaagaatagaactctattggacatggctagaaccatgcttgatgagtacaagacttcggatcggttttgggcggaacgtgtcaacaccgcttgctacgccatcaaccggttgtatctacaccgaatcctcaagaagacatcctatgaactcctaatcggtaaaaagcccaatatttcatattttagagtttttggtagcaaatgctttattcttgttaaaagagatagaaaatctaaatttgctcctaagactgtagaaggctttttactaggatatgactcaaacacaagggcatatagagtctgtaacaagtcctcgggactagttgaagtttcttgtgtcgttgtgtttgatgagactaacggctctcaagtagagcaagttgatcttgatgagataggtggtgaagaggctccgtgcatcgcgttaggaacatgtccattggggatgtgtgtcctaaggaatccgaagagcctccaagtgcacaagatcaaccatcctcctccacgcaagcatctccaccaactcaaaatgaggatgaggctcaagttgatgaagaagaagatcaaagagatgagtcacctcaagataatggcaatgatcaagggggagatgaaaataatcaagaaaaggaggatgaggaagaaccaaggccgccacacccaagagtccaccaagcaatccaacgagatcaccccgtcgacaccatcctcggcgacattcataagggggtaaccactagatctcgggttgctcatttttgtgaacattactcttttgtttcctctattgagccacacaggatagaggaagcacttcaagattcggattgggtggtggcaatgcaagaggagctcaacaacttcacgaggaatgaggtatggcaattggttccacgtcctaaccaaaatgttgtaggaaccaaatgggtcttccgcaacaagcaagatgagcatggtgtggtgacaaggaacaaagctcgacttgtggccaaaggatattcacaagtcgaaggtttggatttcggtgaaacctatgcacccgtagctaggcttgagtcaattcgcatattattggcctatgctacttaccatggctttaagctttatcaaatggacgtgaaaagtgccttcctcaatggaccaatcaaagaagaggtctatgttgagcaacctcccggctttgaagacagtgagtatcctaaccatgtctataagctctctaaggcgctttatgggctcaagcaggccccaagagcatggtatgaatgccttagagattttcttattgcaaatggattcaaagtcggaaaggccgatcctactctattcactaaaac

SEQ ID NO: 34332 - DNA, 877 bp, Arabidopsis thaliana landsberg
tataattaagagcatgcaaactgaattatctattaaaatcttatatgttgctggtcaatctttttttgttttgtagattgtaattaaaaggtaagtggtagtatgttttaacttttaagctatcaaaaatcaaaaaatgattttatttttaaaaaatactatctatgtaactatctataaaatatttttatttgtaactatctatgtaactatctataaaatatttattttatagtttagaattgttatgaagtttcgtcctgccaaacccgtcccgtcaacccgtcccgtaaaaaaaactcatttattttattaatgttgatcttatttatcatatgtttatgaatcattgtctaaatattttgtaattttgtagtaattaaatgctatcaaatatgtatgcggtttgatgattataattgaattgtaatagtcatgcagaaaaacaatatcaataatgataattttgtagtaattaaataatatgaaatattttgaaagttttattttagtaaccaatcgtgtagttaatgtagagagattttaggaaaattgttaaatgtcaaatatttaattcgaagatttttttctaattatcaaaaataaatattaaaatttagtggcaaccattgtaaataagtcccaactatatgatttatttcacaaaataattgtaaaaatgtatatatagataagtttttgaacaaatctgcaaactttaaaaggttttcattaattacaagtaaaaattgaatagagtggactataaaagtggttttttttttctcttttggttgaccggtctttagtctatttctatgtggagaagaaataaacatttattccttgtagaataaaaataaacataacaatagaa

SEQ ID NO: 34333 - DNA, 2560 bp, Arabidopsis thaliana landsberg
atgctcatacttaataggagtctcagagccagaatctcctgatactgcgatgatcaaaggtaccaccttgctctctacttctactaattgttctgaataaaaacgaatgatatcaaacacataaccaaaacccatccagctagaattgaaatgcaggacgatgcaggagcattacccaaatccttgagttgggaaaccctagtgattgatttgatatctctgtcccacgaaagaagaacgttaccaccgaatagcagtaaaccctagttatcgtagttcgtaaatggtaaagccaagaaaaaaaacctcgcctgcctgtggctctgctacgaagatcaagagcgacgccgcctaagcaacatgtaaatccaggcaaatgtatcatcttcttccactggtcacgactgaccctgcacgagatcactagttgtcggccactatacttctttcgcggagaaacagaaaccgatcataattttcaggcagagagagaaagtgaagtcgaatagggatgaattttttaattaattcttttttgctaaatatgaaaaaaactaattaatgcagaaatattgtttgaccaatactatttttgattgttaaagggttttttaaaagatttagggcttgattggttctccctctgccacccgcaaatgctgcgtttgcgagtggtagcggttggtagcgattggcaccaatagtaattgatttgagaaagtcatttaactttaagatttctttcaataacatttttccttttaaaaaactaattaatcaaaagaaaagaaattaattaatcaaaatgaatgtttcacataaagaagatattcaagttaatatatcctaggattttttgcaaattaacaaatttaaaacaaataatactcatattttaacattttttaaaaaaccccattaataattacttctactaattaatatttaatcaacaacaataaaaatttatactttttgttaaataacaaataatacattctaatataatatggaaaccaaataaaaacctacgcttgccgtgtaccgcgggatgaatcctaatatttatcaatatgtaactaaaaaaaattccaattgtaaaaagtttagtcgtgatttaaaaaaggttcattgaattattttataggcatagaccgataaagtttaagtaaaaaacgataaagttattataaacaaaacaaaaaagtgataaggaaatttccgattttttctcgaaccaaattggagtgaaaaaaggaagaaaaacattactatcaagttctctatataaacaaagaaatagaagcaaagacgtacaaaacaaaagattaaaactcatacaaatttgttctctctttctctttgaacggcaaaacaatggagagtaactatcagagaacactggtctcatctttcctcaatatcgctgtagatcaaaccgtggaaaccgctataaagtgtctaaagtctacaaattggaagcttgaagatgccatcaatctcttatttgccatcgacagaatgagaaataatcaaactttgacactaaaaccttccgactctactagattgccttccttgtctcctcctcctcctcctctaaatctgctttttaagggttcgttcgaagacgcgaaactagcttcttctagcaaagatcgatggttgcttgttcatatccaatccgaaactgagtttccttgtaatacatttaaccgagatttatggtcaaacgaagacgtttctcaagcccttgagtttaggtttatgttatggcaagtttatgatcataccagtgaaggaagaaaaatcactagcttctatatgatccaacactgtgctcctcctgtgctgctccttagtccttatcgatccgattactggccagaatatatgtatatggaggggcgagattaaagctaatggttttcttaatgatttgaagaagtatattgatgctagtcctcacgaacacattgcttctacggcaaggaacatgcgcgtaaaagcagaaaagatttgccactctgatcaacaagacatggttggttttacggacgatgattttgacgattttgatgaggcagctgatgaaaagacttaaatctcatacataaggggaatttgtcatcagatagcgtcgtggtttcttcttgcgggcgagaatttgatgatgtagtgactttatccgaagatgaggaggaaacttgtttgtcaagcgacctgtttgagttcccagttttgacaaaagagcctaaaggagactgtgatcgaagcgttgtctgtagtatcagcgttcgatttccaaatgggagaagaaagcagagaaagtttctcaagagtgaaccggttcagcttctctggtctttctgttattctcacatggatgaatcagataacaaggcgttcaagctagtgcaggcgattcctggtgcttccaagactctggattatggagctgaagcctcgtttgatcaatatgggatctctaatccgatcatctcggttacttgggagtgaaggaaaaaacattttgttcctgctctatatcttcttgaag

SEQ ID NO: 34334 - DNA, 769 bp, Arabidopsis thaliana landsberg
  unsure (1)..(769): unsure at all n locations
tatttacactcctttactatcatttccatatctttatctttttctgatcaccaatttacttccttatctaatcataattgattcaataatagtgacatagcaaaatccgtgaaggcatatacgtacattgtacatgtgtacgtatacgattctgctcttatctttattctcttaatgatgttttggtgattacagtttaagagaagaacgaataaacnnnnnnnnnnnnnnnnnnnnnnnnnnnnnnnnnnnnnncaagcgagagattattattaaaaagtaaacactcttttacacaacaatcgtaatcatctaactaattactcttttaatgatgattatgcttttctcttctttaagttccgcttcttcttcttctacgtaatcactctctcttgcttcatcatagtcctttgcatgccattcggcttttagcggcggtgatgctacattgagctagtacccacttgcctctcttcctctcttttattgcaattttcgacctaacccaagtgttcgaagctgtgtggcattcccgtaattctcttattcctctcattgtgattctctcactcgcttaccaattgagcattgtaaactcccaatttcattgcttttgtgtcaatttcctagttgctctatggaaatttggaatctttagcgcattacacagtccagcataattctgttagcttggtttcagtaaatacctgataaagtaaagtactttcttcattttttcagtcactggaagatttaaattgggttt

SEQ ID NO: 34335 - DNA, 508 bp, Arabidopsis thaliana landsberg
cgatctagaagtccagaggatgtccgactaagtaactgtgttagggacaagcgagttcaagagctgttttggctcggacaatgacgtcgaaaccgtctccagggagtgagaggttgatggaagagtcacgttctgcggtgttgaaggcggtggaggagatgaggacggaggcgtcgcagccgttagggaaacagtcgtggaagaagagacggataacggcggctgcggtggttggatttgtgatttgtttgtttgtgattgtgtcacggatgatgtcgaggaatcttgggcatgtttttgagtagaagtttgtggttaagcgagattgagctgtgaagaagaagaggaagaggaggaagagagatttgagtgaagccattgttgagaagagagagagagagagaaatgagattttggggattataatggaaggaggaagatgaagtgggagagtgagtggagttccgcgccgatgtacggccacaccaatcacggggatgtgtggaaa

SEQ ID NO: 34336 - DNA, 562 bp, Arabidopsis thaliana landsberg
ttagtgtttcctctcgggacttatatgtttctgtaatatgtatttgaagggagagcgggatggttcaaacgagtacaatgattatcagcctggttctctcaacaccactgatcaactcatcaaggacttgaagaacattgacattgttttccacattggagatatcacttacgcaaatggttacatctcgcagtgggatcagttcacagctcaagttgaacctattgcttctactgttccatacatggtcgcaaggttagcttgaccggccatataagtcttcgctttaacgatttccagattcttggcactaacttgtgtttctcttcagtggcaaccacgagcgggattggccagactctggatccttctatggtggtaaagactctggaggggagtgtggggttcctgcggaaaccatgtttgattttcctgctgagaacaaagctaagttctggtactctgcggattatggaatgtttcggttctgtgtagcggacactgaacatgattggagagaagggtcagagcaataccaattcatagagcgttgtcttgcctt

SEQ ID NO: 34337 - DNA, 1157 bp, Arabidopsis thaliana landsberg
accacaggcaacaaaagacaaccctaatagccgagatcgatgcgatctccaagataaaacaaagaaaccttgtcaatctacatggttactgcagcaaaggaaaagatatctatcttgtttacgagtatgtccccaatggaagcctagaccggttcttgttcaacaacgaccgaccagttctcacctggtcagatcggttctgtataataaaggggattgcagcagcacttcaccaccttcacggtgagggtcaaaaacctttgattcatggaaacgtaaaagcaagcaacgtactcttagacgaagagctaaacgctcgactaggcgactatggacaaggaagcagacacagcaccacaggacacgttgcaccagaactagtcaacacgggaaaggtaacacgagacacagatgtgtttgcgtttggagtgttgatgatggagatagtttgtggaaggaaggccatagagccgactaaagcaccagaagagataagtttggtgaactgggtgcttcaagggttcaagaaaggtgatctgttaatgagctgcgacacaagaatcaatagagagaatttggtggctcgagaagtgttattggttctgaaaacaggacttctctgcgccaaccgatctccagaatcaaggccaatgatgaaaaatgtgtttcggtatctcgaaggaactgaagctctccctcatgatttttatttcttttacggagtctaaaatgtgaccgcacagatttgtttgtattttgaattgtgcgatttaaagattggacgaagatgcattaagcatgatgatgtgaataaagcctataattgtattttactccatttgtaaatttgaaaataagaatttctggttttgagaaatattttcttgttgttaggacattctgatcctactcttctgggaaaatgatcattacaaaatatatctttgatctatttaaaatctaaatgatattttgttatgtcagtttaggatacatagctacgaaacttatatcatgacttcatcatatacaagaatggaatttccatgaaaacatctcttagtttttttttgttagcttatattaagctaaatggttttttaaagcttatattaacataaagggaccactcaatgcaagaaacaattttgctatca

SEQ ID NO: 34338 - DNA, 1246 bp, Arabidopsis thaliana landsberg
agaaacatctaatattcacatcagatttacatgtaaagattcagatcatttcttattagcaatgaagtaaaggacaatgcaggagattgaccaaattacttgaatattctaataattcatttcttttctttttttggttggcgaaacatatatatttggttacgttatatgcttaagggatatactgcttatttttcaagtaatcaaaatataaagatagaattatagtaaggagataaaagttgagattttagtaatagaataaaaatagtaatgaagtaatatttacaccaactttacgtgtaagccatccccacacacacatcaacctcctatataaacctaaacacatacctcaaacaaccaaaagcaaaaacctcatcgacataaaaagaaaaatggcgtttgcgatatcaaagcgaaacgcaaccttgtttcttgtaacgctactactaatctccgttccattgtcttcctccacgctacaacaagatttcgtgaagtgccttgtcgacaactccgacgtctccttccccataacggcgtcgtttttctcaccggaccaaaacgctactttgtttaaagaggagcttgaatcaacggcacagaatctccgttacttgatgccttcaaatcctaagccagagttcattttcgagccgctttacgaaacgcacgttcaggccgccgttctttgcgccaagaagctgaagcttcacttgcggttaagaagcggtggtcatgactacgaaggcctctcttacgtctcggagatggaaacggcgtttgtgatcgtcgacttgtccaagcttagacagatcagtgttgatatagaaagtaacagcgcgtgggttcacgctggtgcttctattggagaggtttattacaggtaaatcatatgttataatcttctttttttaaccacgtctacaacgatttatatattgccaccgagaaacgatttaatattctaagctacaccctaaagttttaaaatatttgatttactttatatagtacaagatatacttatttatgaaagaaaaggaagaagttacattcattcatttcaaacatattcgagtttacgcaaaagtatgaaattttagtttctttggggacattttccacatttaggctttggtttggttaagctgaacaatttaaattttttaaaccgaaccaatttactataaaacaaccgaatatgatggttaagctgtggttatgacccggttcttctttg

SEQ ID NO: 34339 - DNA, 1770 bp, Arabidopsis thaliana landsberg
aacacgtcagcttcagcgaatctaaagggcattgtattgaaagctcgtcacgtggcagaagctgctctgtttttggcgtccgatgagtcggcttacgttagcggacagaacctggctgttgacggtggttactcggtggtgaagccgtagctataacaacttggccacaaagatcccatgatggaatattggaattttgtttttttggtcaaaagttgacttgacttaattgttgtagaggcatggggattgagaagtctctgaggttgcaaatttccttgaaatgtggatgttgtatttttatatggtaacattcattatccaacatattgcacatctcgaggataatttatttaaacaaatactacaagcttatttgataaatcgtctttctagtctctctattttgactatgggttttgaattttgatatttcagtgaagaatcctaaccatttagtactaatttacacgttatagtttcaaaataattgattaaaaaacaaaataggaaaaaaaaaattgattaatataaagtctacgataaatacagagaacggagcatatctagtcgctctttcaggtctacttgacttataattaatctgtctctctgtctacttttgaaatccttcaaaaatgtcgggactcaggcaagtgtgactccaaagcatttttattatatgtttactgattcgtttaatttacgtgtacgtttatattctataccgcagattggatggcaaaatcgcaataataacagttggagctagcgggattggagccgaagcggttaggctgttcacggaccacggagctaaggtggtcatcgttgactttcaagaagaacttggtcaaaacgttgccgtttctgtcgggaaagacaaagcaagtttttaccgttgcgatgttacaaacgaaaaggaggtagaaaacgccgttaagttcaccgtcgaaaagtacgggaagcttgacgttctctttagtaacgccggcgttatggaacagccgggaagctttctcgacttgaatctggaacagtttgaccgaaccatggcggtcaacgttcgtggtgcggctgcgtttatcaaacacgctgcacgagccatggtggagaaaggcacgcgtgggtcaatcgtatgtacgaccagcgtcgcgtcggagatcggtggtccaggacctcacgcgtacacggcgtctaagcacgctcttctcgggctggttaaatcggcttgtggcgggctagggaagtacgggattagagtcaacggcgttgcaccatacgcggtggcgacggcgataaatagccgtgacgaggaaacggtgaggatggtgaggaatatagcgcagccacgggattctcaaaggtgtggtgcttaaggctcgccatgtggcagaggcggctttgtttctggcttcggatgattcggcttacgttagcggtcagaatctggctgttgacgggggttatagcgtcgttaagcccatttgaagggagagaatatctataaatcaacacttattaacgccttaatattttactttcaacgagcttttcacgccattatctttcttttttattttttgggtcaaatcacaccatggaataatcgcctataacgttacgtaagcaattacgtatgtactatagttaattcggataaataagggtaacgttattaatacttactattaaagtttctttacttgtaatttactgcaaaaaacaattgttggcttaatggttattaattacaaagtatcagtccac

SEQ ID NO: 34340 - DNA, 666 bp, Arabidopsis thaliana landsberg
gtccttggagtctcgaaaaatgcaaccaaagctgagattattatgcggtttgcaattctatttcactgagttccggaatcaggaaaatgcaacactcatgtgtagctctcattgatgtttctctttgatgagcttcatgtgttcagcttttaagttgtgcttttctatagtttgacaatgattctactctgtacctattttgcagcttatcggaagctcgctaggagttatcatccagatgtgaacaagtaagtgaagggtttagtttactttgtatccagtataaggtcttcgtctgtttatattatttaccttcctgcatcaagattggtgtgttttcttgttacaactccattacaatatttgagaaacgcttaatcaagaaaattattgcaattcgttggttaagtctctccttatatgaacgaacatacgaccaccaacctgtaaaattcttatgaagaatttctgaaactgcttcaaaaggtttcagttgtcacagttctgtttacactttgattacagggatgctggggcagaagataaatttaaagaaataagtaatgcatatgaggtaaagtccttcagatgtgtttagcacttttttttattaacaatctgctgatacttgatgagcctaaacattgtttttattatttgcttgca

SEQ ID NO: 34341 - DNA, 584 bp, Arabidopsis thaliana landsberg
accgtgatcatcaggaacacgttgttcctttgattgtccgcgctgtcaccgtgaccagaacccaattggtagccattcgtgaaattgagtgagggaaacgctcattaggtctttaattcggtctcggctaagatagggcgctggtctttgagtgtattggccagtacatgagctcgccggaactctacgcgacgatgtccgcagccagggactcgattcgtgaaggaatagaactggagggacctttttgcacgatgttagggactattttgaatagtgtcttggactctttcgggttatgccaaaggtcagggactttcttgcaaaggctacacgcgggcgcgcgcaagcgcatttttgctgttgctgggccgacctgggcccgattcagtccagtaatattcacattttttttctttttccttttctaccagagctaatacaattttagaaaattgtagaaaaatgataaaattaccaaaccaattttgctaggtctctaatttcctatagtatttaataaaaatagttacttgatttttagtccaaataggaaattatagagtatttaaaacagcctaaga

SEQ ID NO: 34342 - DNA, 1298 bp, Arabidopsis thaliana landsberg
tcaaaacttgtggttaaggaaggagcttttattttattttagtttggggctaaggaaggagcttggttatacaaaagacatgtttgtatataagcaaagcccaagtctattattatgtataaatataatatttaagttttaaataataaataataaaatatttattccttagtgtatctctagaatttgcaattatgacatacatgttgagaagtacgattttgggtcttgaattaaattgggtattacttaagttaaactgaattcagattatgttagtatattgatcctagatgtttatgggtttttggagttatctatttagtgtcttttgatattcaatgattcatggtattatgttattttagtttttatttattgtagaaaatagatataatttatgtgcaagtcatcgtataagttgatggaaaaaaaagcatagtgagtggtcctggtgaggttaaaatcattgacttcagaatctgcttgaatgagtatatcaggaaggggtaaagatgagtgtatcatctcaacaacaagattttatcactccattatatacctggctttgttgggatcgatatctttctatggtgtggatagagtgtggcacctggggagggatatcccccccataatttaccccccccccaaaacctaccgaattccaagagtctacacccctaataggataaaataaataaaaactgaacccaacaattaaacctacccagtttggtttttcttaaataacacttattaaaaacagagggagtagtaaaattaaattatgaatcgctataacttttttcaaaaattgcttttattccataacttgttcaagaaatgtttcacatgaaatctactattgcaccgcaggttaaatcatagttcatcgtaatattattgcaaagtaaaaaaacatatttgcaatcacgccttaaatatgatttcccaacttttttagaaaatgttttacattcaaactatcggtccaaccataatcttctttgtaactattaacaaaagaaaaactaaaaataaagatattctccaaatatactatctactttaccaccattattttgccaacaaaataatttattaaaagaagtagtccacaagctttagcccacaaaggaaattaggttcattaatatattcttagcaagagaatctgctagcccattagagaattaacatttttagtgtaacgctatgaccgttggataccagtgggccccatgtcttctttcgagcccaaaagcaaactcttgtccaactgtcggtacgctacg

SEQ ID NO: 34343 - DNA, 722 bp, Arabidopsis thaliana landsberg
  unsure (1)..(722): unsure at all n locations
tatcgaaacctaccctaatggttaaggttggcccgagtaaatgtaaatatttttgaaatataatcaattattaaatgttactaatcttgtaatctaattatggctgtacccaaccatgtcaagataagaacagatattggtttacgatattaattcttaacatagcatacagtagtttttaaaagtttactaaataaaatagattttttattaattatttcatttacatctaaataaaataaatttgggagaaaaatgtattgtgatggtttatcatttcaacgagatcctttggagaacatatttgcatatttggacctgcaagaccactgagcttttgtaataattctttcgaagaaagagggtgatcctctgcctccatgagaatcatcgcataagctcttcccatgtctctgacaaatccgagaaactgtggatcctccagtgtttctcgcaagtccagatacacttcctctgcagttacaccgcctgcagatatcatcatcatcatgattttccgtatagttgagagattcaataacannnnnnnnnnnnnnnnnnnnnnnnncgaattcaggtttttgtgtttgtcagagtaagattgcagtagaaccatgttccccaaagagaaccgtgacatgaagaggaaagagtcatttaaattcattcctgtagaggagagacaagaaagggtcatgataggaatattcatattcatagat

SEQ ID NO: 34344 - DNA, 985 bp, Arabidopsis thaliana landsberg
  unsure (1)..(985): unsure at all n locations
aaagcgttataagaaaaattcaagtttcgaggaaaaggtaagcacaaggtatgattttattaccggcttgaggtgacttcgggcttcgtcaccagctaggcttcgccacccttcgtccagatttgctttataaatctgtttcctatacttcgagcaaggctggggataacaatcaaatctgctggtgataagctgaagtttggtctattaacaatcttcccatgcgtgcaaccagacttcatgaaggcaacagctgtgccccgagaagctagccgggcacagaaatcaccgtatccggctataacttcatcaagagcatcaacttcgccctcaatatgtttgaaggtctctggcaggtcttcaatcgaaggactgaatttctcagagctggctccaactgagttgaagacctgctttagccgctgcaggcactggttgccgaagtttacgtatttttcttgaagttcttttagtgatttatgcaaatttgaatttttctcagcttcggcttcgagtttggcttcaaaatttctcttttgcatggagagttcactattcaatctagcaatttcgtcctgggcctccgacagtgaaccttccatggtttgaagtacgaagtcttttttctccagggtagcctcatggtctttaatcttcttctccaggcccttaattataattttgttctttttgtccttgaggtgtatgttgcatcctcaggactttgcttagcagtaagctctgataaaataagcttcatcagaaaacaatcttcatatcaaagcaataaaaagttaagaattttaccttaaagttagnnnnnnnnnnnnnnnnnnnnnnnnnnnnnnnnnnnnncctgctaaggtctgcctcaacttcgggaagccaacgctcttcgatagagtgccaacaaccttagccccagtgtggtcccgaaggcatcctatgctttcttcgttgattccccgaagagtaacgcacctgg

SEQ ID NO: 34345 - DNA, 1174 bp, Arabidopsis thaliana landsberg
attcgatgccttgtaaatttgataccatccacaaaactgttttttctaattacataattatagtagttgaggaaatcatactaaaatttaaaattgcaagaattgttaggatgcgtgaagaaaattgatgtttattttacaaaaaaatgaatatttataaatggtttggaagtatatgttggagaaataagatccgtgacccctgtgaaattgaccacaaacccatttgtttatcataacacacaaacgacataatagaaactctgtctcacatgccttcttacgcctcatgtttttccagttttataagataaatgattaatctacgcattgtacaatcacttaagttgtgacttcaaaagtattcatatctaagtaagtaactgaaaaatgtttcgtttggtagaatatgccatcaaattgctttaaaacatcactaatacaattttcaaagcttctaaataataaccataaaacatatacaaattatttataagatttcattaccaaaaaaaaggaaaatggtaatacaaacgtttgggcccttttgtgcataacttttcgtagtacgagatttctctagatttacgagatatgataagttttgaatggttttaaaatgtcaaagtgacgtcaaagtatttacaaggtgtggaaataaaagagaacctcataaagcaaataggtatcagaatttggggaagagaggaggattcacgagacgcaatgaaacaagagtcctttttgttttctagtcacaatcccaaagggtccatctctgttgcatctacctgtaacttattgcttatagtttgacacctgtttttcccttactaagttgaggaactcttacaaatttaattcattcaccagccataatgtcttatccgtattaattcatgatgtttattgtttattgtttaatgtcaaaataatgttttaaatttcagtgtgtacaaatcattatagaccaatctctgtcaaagattactcattatgaccaaatcttttcgaatgagtacgttttgacagagatttgttcactttttttgttcttttcttatttccaaattgtttactatgtttctaatgtttcgtgaattttgatagagaatatgattggtggctgccctctctggttaccaatgacgacatcgtcggatcatataagaga

SEQ ID NO: 34346 - DNA, 801 bp, Arabidopsis thaliana landsberg
cgtagtatgctttacaacgggagacgccctggcattaaggatggggttggcttccaacctgggagccaaagcaacatcaaacttaatgcccatagaaacaagatttctaactttgttaagggcaaggctccaacggttcaagatagagaaggttacattttataccttgaaaactatcctgaccataagattagaagaattcatgctaagaaatctcatcctgctgctcatcatgcttataattacagtaatgaggcttctagctctaggcaatccactcatattaaattacctaaaaagaaatctcatattgcatcaaatgaacatagtattttatttaagacttttgatgctttctatgtgcttactaataaatcaagcaaagtagttgccaaatatgttgggggcaaacacaaggggtgaaagacttgtgtttgggtacccaaggtgcttgtttctaatgtgaaaggacccaagaccgtttgggtacctaagaacaaggcctaaatttgttttgtaggtttatgcatccgagggctcaagttggatcattgatagcgggtgcacaaaccacatgacaggggagaaaagaatgttctcctcctacgagaaaaactatgatccccaaagagctatcacattcagggatggaaatcaaggtttggtcaaaggacttggtaaaattgctatatctcctgaccattctatttccaatgtttttcttgtagattatttagattacaatttgctttctatttctcaattatgcaaaatgggctacaattgtctttttacggatat

SEQ ID NO: 34347 - DNA, 1045 bp, Arabidopsis thaliana landsberg
  unsure (1)..(1045): unsure at all n locations
tagtagatgaataacttgcgcatcacattgacgcttccagaagtagctgccgagtaatattgtagtcggtgtcggcgttttagaagcaacgccgagcgattgaaggttgacatcagcgttttagaagtaacaccgagcattcgaacacgagaccagcgttttagaggcaacgctgagtcagtgaaggtcgacatcagcattttagaagtaacaccgagcaatcgaacacgagacccgcgttttagaggcaacgccgangtcagtgaaggtcgacatcagcattttagaagtaatgtcgagcgatagaatacgagttcagcgttttggaggtaacgccgagcgattgatcacgcgttcggcgttttagaggccacgccgagtgactgaaggtcggcgtcggcattttagaagtaatgccgagcgatagaatacgagttcagcgttttggaggtacgccgagtgattgaaggtcggcgtcggcattttagaagtaatgccgagcgatagaatacgagttcagcgttttagaggcaacgcgangtgattgaaagtcggcgtcggcattttagaagtaatgccgagcgattgaacacgtggtcggcgtgttagaggacacgccgagtgattgaaggtcggcttcggcattttagaggcaacgcangcgattgaacacgtggtcggcgtgttagaggacacgccgagtgattgaaggtcggcttcggcattttagaggcaacgccgagcgattgaacacgtggtcggcgtgttaaaggacacgccgagtgattgaaggtcggcttcggcattttagaggcaacgcgangcgattgaacacgtggtcggcgtgttaaaggacacgccgagtgattgaaggtcggcttcggcattttagaggcaacgcgangcgattgaacacgtggtcggcgtgttagaggacacgcgaagtgattgaaggtcggcttcggcattttagaggcaactcgangcgactgaacgctatatcagcgttttagaggcaacgcgagttgatagccagcttcacaag

SEQ ID NO: 34348 - DNA, 984 bp, Arabidopsis thaliana landsberg
tgtccggtggtgcaccggatatgccacgtgtactagccgttaaaggtagccgttggagcttcccaagatggcgcaccggaaaatccggtgtgcaccggacaacccatgctcgcttgtcgtattttggccataacttttagctccgaactccaatttcgatgaccttgttcttttttgaaagcttataaaattctctacatcacagagttgaagtcataccattttgattaaatatggcacaccgaacagtccggtatgcactggacatcccatatgttgctgcagttttttcaacaattccaactttgtattgtgggcataacttttagcttcgaactatgattttgatgatcttggactttttggaaagcttatataaaactttacatctcagagttgaagtcatgtcagtttgagtagatttgattttatgaaacacttctaattcaatcatcactttctgtcaactttgtcaacttcacttttgttttgtcactttgcatcccacttctacttcttgatgtgttgaactcttagcatgtataaggtgccttcaatatgaatttgtaatgtcttctatgggtcttataatgccttctttgaggtgttgcatcctcagagcctcaatccaatctacttcgcatcatgtgaactacaacgcacaaacacttgggaacattagtccacaaggttatgttgatcatcaaacaccaaaaccacttagccaaatggtcaggtgtccattttccttacaatctccccctttttggtggtcgatgacaacacaaccaaagcaagcaaatataacaaatatttaaagtaaaagtgcaatctacttgctaggatgcgtgattgtccccacaaagtgagtgtaacaccctgaatttgggggtataaaatttcttttctaatattcgccaaattcaggtattaccctctcctttacttgattttcgtcttttttctaaataatagagagttatt

SEQ ID NO: 34349 - DNA, 694 bp, Arabidopsis thaliana landsberg
  unsure (1)..(694): unsure at all n locations
tatagtgattcgaatagaatatctgatgcaaatgagctttatgccaccagtggttatgtcttcactattggtggaggcacaatatcatggaggtcatacaagtagaccatcttgacaaggtcaaccatggaagatgagctcgttgcacttgacatgacaaccgttgaggcagaatggttgtgtgaactcttgatggacttaccggtggttaagaaataaatacctgctatccttatgaactgtgataatcatactgtgattggtaaagtgtcaagttctaaggataatggaaagtcaccaagacatgttaaaagannnnnnnnnnnnnnnnnnnnnnnnagaaactctggagtaataaatgtgttttatatgtcaacttataaaaatctatcagatccttttataaagagattatcacgtaatgtgatagaaagtgcatcgagagaaatgggtatgagacccatgtgaaatctactctagtggtaacctgctctatgtgatcggagatccgtgaagtagagtggagaaacaagctaggagtagattgtgaggaaagatcccttccttaactcatttctaatgcacatctttcctatctgtaaggcaggatggtttttaccttaatgtattccaagagtcttataaaggtgagatggtggcctacaaaacatcttctgaggaatacacctatatg

SEQ ID NO: 34350 - DNA, 1083 bp, Arabidopsis thaliana landsberg
ccatgtgaagatttgattacataagacaagaacatgtcctctttttcttctttatgaattggcataacatgtccccgtgccattgtcccactttctccaagatctactctcttgtctctttcccattgcagtttaaattccaagacaaaacaatagtgacccattaagcccatcttcttgatcatgagtgatcaaatgcttagagtcattaaattccattccaaaacaatagtgacccattaattcacaatttcactgttttatcaaatgcctcacctataacatcatctaatgactctaagtcccaagttgtgtgtactgaccaagcatgccaaattttgaaatgcccaaatctatcaatctgccatatgaaggagacaagagttgtgagatatattaatacacagttacattgaacaaaatatcattttgaatctcaattcagattactttaaactactctaaaaacaccaactttcatattgatgaaaatcttaatttcattctcgcctgtctaataatataaactaagacaaaaaatttttttgagaattccgacccaagtaaggttttttcattcattgtttcttcgcatataagactaagtaataataactactattattatgagaggaggaagggaggagctatatgtctactattttgagtttattagccaatcagagccctccatgtcataccccattctcaccgatcttaccatttcatacccactctcgcccatcttgcgtttggcgcgtgaatccaatttctgtgggttctaacccaccaaaacgcctattttgaaccacactcgcccctctctaaaaacgcctcgcgtgcgtgcctttttttcttttctcttctcaaaaccttattaattccaatgcaaaccgaaacccaaaaatcaattgaaaagttcgaaaccatgtaaaccgaactcaaataaaaaacacaaaagacaaacaagggattattgtcactttcagattgataattttgattcgattcacacagaatcataactccaaaacaaatgcaattgataagagagccaaatttgtttcaagcttttccctaaaa

SEQ ID NO: 34351 - DNA, 1697 bp, Arabidopsis thaliana landsberg
atggtacacactacactcaatggagctctgcgatgaagatttctcttgatgcgaagaacaaaatcgctttcatcgatggatctcttcctcgtcctgcagaaggtactcctctctctcggatctggtctagatgtaacagtatggttaagtcctagttgttgaatgctgtttcaaagcagatctatggtagtattttgaacttggatgatgctactatgatctggaatgatttacatgatcgttttcacatgacgaatttgccgagaacatttcatctcatccagcaaattcaggatttgcgtcaaggttccatggatctatcaagctattacacagctttgaaaactctctgggatcaacttgatggcagtgaacccactgagtcgtgtttatgttgtcattcttttaactgtgttagcaaaaggcattatcggggtaaggtggatagaggtcgcatcatcaaatttcttgctggtttgaatgaaacttattccatcatcagaggtcagataatcatgaagaagcctcttcctgacattgctgaagtttatcacatcttggatcaagatgacagtcaaaggaaatttggtaacagcattgttccagctgcttttcaagtagggattgcagggtctcatcctggagtggtgaacgctgatgcatcctcgccttctgctggttctttgattgctgcttatcagtcttttaagaaagacaaaccaacatgttcctattgtggtttcactggacatgttgtggatagatgctacaagaagcatggctatcctcctgggtggaaacctagaaaacaacaagtcaatgcttctccgactcctcaatcgtcttctcctgcaatcacagcacaagtgtctgctactgttggatcaggtgataaacaggatggtggtctggatagtttgattgggaatctcagtaaagagcagttacaacacttcattgcttacttcagttctcatctcactactcagtttcctgcttcagttcctttaaatgaggcttctacttctggtatatctttctcaccatctacctatagttttattgggattttaactgttactcagagtgttacaaataagagatcatggataattgattctggtgctactcatcatgtaagtcatgataagagcttattcagtgatctagatgcttctgttagtcagcatgttaaccttccaaatggtagtgttgttatggtagctggtgtgggaacagtgattataaacacttcaatcagtttgaagaatgttctctacataccagatttcagaatgaatcttctcagtataagctcgttgactacagatcttggttctcgagttatttttgatcctgcttcttgcctcatacaggatcctaccaagggattgacgattggaagaggtagacggattgctaatctttacttgttggatgttgaagaacctgcagattcaagacaactatcttcttatagtttgaatgctgtaatagactctgttgtttggcataagagattaggacatacctctttttctcggattgatatgcttacagatgttcttggaatttctaaacaaaggaataaaggagttatacattgtgacatttgtcaaagagctaaacaaaagaaactttcatatcctaatagaaacaatctttgttctgcatcttttgactctaaagcgttagag

SEQ ID NO: 34352 - DNA, 995 bp, Arabidopsis thaliana landsberg
actttcaaaaaagtctctaattacgtaatattctcaataataattgaaatcataatttagatataaaaataaaattagcaatacttacccatataagattgggttcttgaaaatcattgctcaagagatctgttcaaacaaaaaaaatcatagattggaatttcaatcgaaacatttggaaaaactaaagtctaaatctgaatcaataataaccttacctctttgtaaaattccagcttagctgctagaaacaggaatatcactctcatcctcaagctaatttttccggcctcattgtacttcatttggcgggagaggaaccaacgtcttcactccgctacttcacgtcctactacttctatcattaaggaaatcaagatgatagttaggacaaggcttgatcctctttctagggctcagagatccaccctcctgccttgaccctcctcgccacttggtctccttatcccaatgacatttcagttgttgtttcttttgtaggcttggtttcattgggttcactttgtgtttggaccttcctcttgttacgggggctgcgtcctcttgtttcggctctcggccttgtttgtttctgtttcaggtttgcgtaccccttctcggcatttgtcatatatgttatgtttttctagtagaaattaaaaaaaaaaaaaaggaatttcagattagcgattaacagatgataaacggagtcatagtgtattgattatcaaaacaaattgcaagtgattcatactacgaacaaccgtttgattttattttggtgtgtgtttgtttagagaagaagaaaagacaaggtttcttctagaattatctattcaggtaaataaacattgatcttttcaataaaatacaaaaatcaatcaatatgtgaaatgatctgaagaaagttttgtgggtttcggcccaaaacaaaattgtcatgttattcattaatggactcctaaattattcgttggagcaaacaatttttagca

SEQ ID NO: 34353 - DNA, 7577 bp, Arabidopsis thaliana landsberg
  unsure (1)..(7577): unsure at all n locations
acggccgttgatgtggatgaattggtcgagtatatcaaaggaatcgattgaagtgttctggtcgggtgacagagggaatgaactggtgacggcggcgcagaggtcgagtgattctacgaggtcgagtgaaattgtctggatcgagtagctctttaaacggcgattcgtggtgtagagagattggagtgtcggtggtgagatgaaaagtggtaggtcgagcggatttggtgaagtcgagtgaagtttcaaaaagagtggttgaggttgagttttagattctctccagcttatccgcagcgcgtggcccacactctgttgactgagaaaatttgcagaaaacctactgtaaactgcaggaaatttctgcaagtctctgtagcttctgttggtcgagtaaaatgatgatttaaaagtttttgggttttaaacatcacacatactcgaccaatgtactcgagtgcaaggtctccaggtgcaacagaagattttcaaaattttgtactccaactggctgtacactcggtcttcaggtcttctgtagagtaaaagttttgaatttttactctatctccacattgtttttttgttcctgagaaccgcaaacacacccaagacaaatcaaaaataccgagaaaataaaaatttatttacagagatagtcatgggacttcctcccaagtgagcttgtttaaagtcattagcttgactcctttactcctttaatcatcaagaagttcctggagatgaaccgatgtcacctctggaaggatttggtctgctaagtatttcttgagcctttgaccatttacagtaaaatctccactcttaccagctagagtgactgctccatagcctgaatcacactttgaaacaaactcctgagcgttcataaacattgttggccaccaaaagcctgcttgaagaatcttggacactgtcttgaacgtcgcgaagtgaccaccatatgctgagccatggcaatgcagcaggataccttccacttcatcttctgagacacatctcctgtagatcttatctttatagagagtgtaaagataaggctcatcccagtagtaatggtgtatatccctgaaaaacttcttcctttcataacttgtcaggttggaggctctactccgcatgccaaataattgacgtgatcagcataccatggagatcttccctcaacagcattcagttggtggaactcttttccgctgtaaactcccaccgaagaattctacaaccataagttgctcttctggcattgagtcgggaatcggaataggctgttcaattctcattcttgaaagatggtcagctgcaccattttcaatgtacttctcggttactatttccttgtcaaactcttgcatgagaagtatccatctcaacagtcttggtttagtatccttcttggcatacagatgcctcaaggcggcatggtctgtatagatagtgacctttgatccaaccaaatagcttctgaacttctcaaatgcgaaaacaacagctagaagctccttctcagttgttgcatatcttccttgagcttcatccaacgttcggctggcgtaatatatgacatgaagcttcttgtctattttctagcctaaaatagctcctcttgcgtaatctgatgcatcacacatgatctcaaattgatagtcccaattaggcgctcgaacaacaggagcagataccaaagcatccttgatggtgtgaaaggatttgaggcagtcctcatcgaattcaaattcggtttccttgcacaatagtctggttaacggcctggctatcttggagaagtctttaataaatcttctgtagaacccaacatgaccaaggaaacttcttttgtccttcaccatttttggtggctgcaactgcatcatcacttcaattttccctttgtcaacctctatacccttttctgatatcttgtgacccaacactatgccttccttcaccatgaaatgacacttttcccaattgagaacaagattagtctcctcgcacctggtcaatatcctgccaagactcaacaaacatgaggagaaaaaggggccatagaccgaaaaatcgtccatggagacctccaccatctcctcgattaaatccgaaaatatagaggtcatacacctctgaaatgttgcagggacattgcataaaccaaannnnnnnnnnnnnnnnnnnnnnnntccataaggacatgtgaaagtggttttctcttgatcagtaaggtgaattggtatttgaaagaaaccactatatccatcgagaaaacaannnnnnnnnnnnnnnnnnnnnngttcaagcatttggtcaatgaatggtaaaggaaaatgatctttcctagatgtagcatttagcttcctataatcaatacacattctatgaccagttatagttctagtcaggatcagttcatctttttcatttttgacaacagtcattcccccctttttagggacacaatgcactggagaaacccaagtactatcagaaatagggtagatgacaccagcatcaagcagtttcaaaatttctttttttactacttctttcaaattgggatttaacctcctctgtggttcaatgctagaataggattcgttttcaagatggatcctatggttggataaactaggtgaaattcccttaatgtcggataatgaataaccaatcgctctcctatactttctaagctcaaataatagcaggttcacttcatcactatttaactcagcattaatgatcacagggtaagtggagtttggaccaaggaatgtgtaccttagacctttaggaagtggtttgagatcaaccttcggtgccttaagttcagaccagtcatctgaagttggaatgatcggctccccagattcgttggcagacaaggtcgagtggctggtcgagtacgtcctcgagagtgcaggttgaactcgagttgacccttcttcgctcattaccattacctccgttgctggtccattcaatttctcaaagggttctgattcttccatcgctttatgggagtctaacagcttctggtatcccaaagtttccaactgcagaaacccatctttgccacttttggttaaagcacagttaagatgatcttcttctgccagctcttcctgtaactcatcagctaactgatccatttcttcaatccaaaagagttgcccttctatggtaggcttcttcattgcgtcttcgatgtcaaaggtcatcctaaagtctttgccaagatttagatcaatcttccctttcttgacatcaatcatagctcctgcagttgctaagaaaggtctccataaaatcaaagggtccttgggctcttcatccatctccaggactacaaagttagtaggtatctcgacagcaccgatcctgattgggaggtttttgagcaaaccatgaggaatcctcactgatctgtcaactaggatgagggatatattgcaggacttgtattgagtgaaccccaatcttttggcgacagaaagcggcatgagactgactgatgctcctaaatcgcataggcatctattgaaagccaatggtcctaaagagcacggtagagtgaatgaaccaggatcactaagtttcttaggaatgatcttcttctgtatgatagcgatgcaatcatgactcaataccaccatcccttgcacttcttgaattctctccacgatcaagtctttcagaaacttgtgagagtctgggattagcgctagagcgtcaacaagaggtatccgcaactcaacctccttaatgttcttggcaaacatagctctatatttgcctgccaacgctttcttgtgacggccaggaaatggaagctgcggtttgtagggaggagggacaaagacctattctttgtttttgacagcaactggttttggagcagttggtgatgtcgctgggaaggttggtcgagtagttggtcgagtaacgtggtcgagtggcagctcgagttgttggtcgagtggctgctcgagtggttgctcgagtggtcgctcgagtggtttgtcagctcaatttttatcgagactgaaatcctgcccatcttgatttcactgtccttagtgactgtctttggttcctctctagttggaagtgcttttccacttcgcagagtgataccgtgagcatattcttatggattctgaattgctttgcctggaagttggcttatctgttttggagtagaggaagatgcagaatgtccttctaagtatctgactttggtattcagtgtttccaccttgacattcaaatcattgtagctacagtccagcttattatgtaactcagatatcttctttgccatctccatggagccagaggtttctccgtgaagcagctgttgtagcatttgtttcatgtcagcgtcaggagcagccggaccttggttttgctgaggtgcaaatccagcaaatccagttggtggttgctgcaaatccagccttcttcaacatctttgttctggaaattcccannnnnnnnnnnnnnnnnnnnnnnnnnnntgcgtggtagaacttctctgtaaagagtgctgagcagagaggctttagtgaagccatgatgagggcattggttggtgtaacccttgaaacgatcccatgcttcacagaagctttcaccagtcttctgtgagaaaccagaaatctcatttctgagtcttgtagttctggcattggagaagaactttgacagaaaagccttcttacaatcatcccaggtggtgattgagtcatggggcagattcttctcccagatgtgtgctttgtctcccaaggagaatggaaacaaacggagcttgaatccgtcttcactgacaccattgatctttgttaggttgcagagcctatcgaattcatcaaggtggtcgagtggatcctccattggcagaccatggaatttgttcccctgaatcatcgagatgagaccactcttaatctcgaagttgttgttctggatagcaggaggtacaattcctttcctctgacggtgatcacgtggtgcatctccagcaccaatgttagcagggccattttgttgattctgttcgtcagccatttcgagtggttgctgaggtacagggttgactgtggttctcctttttctgagttcgcgagctatgcggttgatgttgtcgtcgaaaaggaggttctaattgcctgttgatcgagtttgcatacagtagaggtgtacctggaccaagaagacaacaagaaaaacacacagttagtaactgaaaagaaaattgaaaatgaacttgatctaagcaagtctgaaatctcaaatgtaacaaacaaacacccaattggcaacggcgccaaattgataataggttttttagtcaattatcctaaaacacaaatcatatcattgtagtattttaggttttcaatccaaatgggtgtgatactaacaatcaagatgtgatcagaagtcactaagtcaagccaagcaataacaggttttggtgtgttctagcagttctaagtgaacatgcagaaaatagaaattcaagcagaaacaataaaacactcgaccaacacagctctttgcaaagcactgggtgaggtcgagtgacaggtcgagtaacagaaagaaaataaaacacagatactcgactgcacagtctgttgccagacaactgggtggtcgagtacgaggtcgagtaacaagaaagaattgcagaaattaagcgacagataacaggatgcactaaacaacaatagagtaaacaaaaaattcaatcagataaagaattcccaaggatggggtaattgagtagtttcgtttcctcagtttacaggtgattgacatgctcaataaattaaacctagacaacaagttcattaaccaaatctaagtgccaccgcaacagagactctcaagttaacctagtcgcagacttaatcaccattgacgagagctaacctaacaggcattacgaatcaacaagttaatgccaaaacgctccctgcaaccaataccttggtacagggtcacgaatctctggaattagtggttcagacatttcatcgaacaccttttgggcgcggaaatgtctgggctcaaattccagttgatcagaaagcaataggcattaagaacaactaatccagaagggatctatcaatcaatactcaatcacctagcatactgagaattctacactactctaacccatcctcagaaacctattcactactcagacatcatgacagaaagcataaacgttgaacaggttgaagacatgataacagcagtatgataacagaatgaataacagtaaacgaaaatcaagaacagaaactgaatattgaatactgaatagataaagagaaatccggattacaaaaaatctagaacacaaggtctgcggaaataaaaactaggtaaaaaccaacttgtttgcgaaaatgagaagtacatgctacttatagccaaatatcccgaaaccctaatactcaaaacgacgaagtatttggacgggttaagaactgtactcgactcacgtggtcgagtgagagctcgagtgtctggatgagtgcggaatgaagaaggctctgaagcttgtcatcgagtatgcagtcgagtggtgtgatggagatactcgacctctgggtagagtgaggaggtcgagtggttgtctgatgatggaggtgaaggcactcgaccagggggtcgagtggtgaggtgaagtggtgatgtgctctactcgacctggttgtcgagtggtctcttgagatcttgaagctcctactcgacctcttggtcgagtggtttgtcatgatcaggtctgcttcttccagatagctcgtcaacagctccaaatcacctgaaatcaacgcaaatatgcaacatgcatgcaaaactatcctaaacatgcaaagtgatgacaaatgatgtgaaatggtataaaacagtgatgatatgatgctaaagtgatgacaaatggatgctcaaaacatgcaaaatacacacttatcatggaacttgtggttgatggtgtgtatagctatcttaatcttgcaatcagtcttcgacttatagactctgccaacatacagcttgtctccttcatatttaacatcaaagaaagcaaagtccaaacctgaaataaaatgaacatctctcggcaaaatgaattagtatgcaagttaaatagtccacgacgatcataaatagaatagtataacataaggtatctattttaacacttaatctaattccaagttctgaaaaccaatcatcaaaacaaatctattagtagatctggaaggcaagttattcgtttcacttttgtatcattatagatcggtggggagtcacgaccaaaaagtatagcatcatcgctgaaatcggagagtattgtgtttaatgcttcttgtgcctgccccctaaacagaatgttctctcgctgaagttcagtttattccacatcatgggcattattataaacatgatgatcccgaggcgcccccccagttgcccttgatgaattaaagctttaaatatctcctgtttccagaatggtgacagccggtgggttt

SEQ ID NO: 34354 - DNA, 794 bp, Arabidopsis thaliana landsberg
tatgttaatgggtaaaaacctctacccgttgggtagacgggtacgggtacgggttggaactacccatacccgtctacccatgggtaaaatatacccgcatcaatacaactataaccatctaatagagcccatcttagctaaaataaaacccttctctagctatcatttgtctaggtaccaagttatgcaatcatatgatttgttatatgtgaagttgaagttgtttttatatgtttatttaatattttgagtgattggtatattggaatttaagactttcctagcgggtacgggttacccgacgggtaaaaatacctgcatgggtacgggtacgggtaagattttatacctgcgagtatatatgggtaaccgacgggtagaaattttttgatgggtacgggtatggaatggtactatccgacgggtatgtacccgttgtcatccctacttgaggctactgtcaataatatttacaacaggtacactaatcgagcactacaggatacacgtaaattttcgtggcccggaatagtgtcggctgcatgcccgcgtcggtactgtagttatttgcagcggcctcgtgatctgacgaaaatgtggagtattctcgtgggccgtggaatatttacgtcgtgctcgtgattgacggcaatgtggcgtaatagcgtgggtcggggctgaggctgcgatgataacctctgagcgactactatttgcgggtgcctcagcattggcgacgatcatataggccctaaaacaattgcccgcgatcgcgctcactatcgttctcggtc

SEQ ID NO: 34355 - DNA, 3272 bp, Arabidopsis thaliana landsberg
ctaggtgttattacgggcccatctcgcattatgttatacatagtgggatccatttggatcttttatgactaaccatatcatgacatgtcatcactctctatccaccagtccactcattttaattgtactttatcttctcagcacaattttatattttattcaaataatggactatataacattagaaggaattaatcttcattagggaataactaaggaactgtttttccaaaaaaaatgaatttaatgacatacctattttgtccaaattttcgtgtttaaaatttagagtttattttttggatttaagtgtttaatttttggagtttatatattacgaatggtaatttcaacatcttagaacgaaaagaaagatttattttcttgtttctttcagaaatatatttcctagatatggtaacataacaacaatagaataacacaagaaattatcatactcattaaaaagcgtacgggataggagttggagagatttcatcacatcatagaacataatacattacatagcgtagatttagggaatggtacaagaacgttttaaactgccttaaccggtgttttgcataccagcagcgatacccttcatggtgaggataaccgtatcttcaagtcccggtgcgtattcactctttggattcagtttcacgagctcagccgctggactagactccatgtagtccttagagagatgtggccggactttgacgtggaagcttgggtcacggatctgcttgagtgtataggcttgacacacgttcaatgtcgtgatgtatgggtcacgaagctgcagcctttgcctcaagtaagggtcaccttctaaaatgtctttgtgacctgcaacctggaaaggtacgaaacgcacgggttaagttagcttgtatggtctgacaccgcatggaaaccggatgggacatctataatgtggttatagtggaagtaagtaatacctggaggaggaggcgtctggtctcttggtagttaactcgaagttgttcaccgaatggttgaagttcttcagagacgaggaggcggtcatacagagccgcaaattccgggatctcctttggcgaaaaccatttcgactagatcaattgtgacacggaagaatggccattggttgtacatctctttgagcatgttgagattcttactgtccttctgtatcacgcgtttgaatgctcctccaaagccaagccacacgggtaagtgaaacctcgtctgagtccacgcaaagatccacgggattgcacgcagcgactcgattcctccgcttggtttacgttttgatggtcggcttcctatgttcatccttccatactcgagctctggtgttgcctataatacaaacccaaacctgaacttagactctcttttttaactacaatttgtttaagagaggagtaattgagctggttaagaacttacgaggcggaagtactcaacaaaccgaggttcttggaacacaacagaacggtattcttcagtggcaattatagccatttcatccagcaaagcgcgccattctggtttaggcgaaattggaggacgcataccgtgctcgagtgtagcagctgtgaaacgctgaagtgttctaaagcataagtgctcttcaccaaacgattgctcgatgacttcaccttgaactgtgacacggagggaaccgttaatagtatccggaggctgagacaatatagcaagatgggttggtccacctcctcttccgaccgtgccaccacgaccgtgaaacattgttagcttcacaccgtactctttagcaaccttcacaagctcttcttgagctttgtataactgccaagcagcagataaccgtccagcatcttttcctgaatccgaataaccaatcataacctcttgcttaccgttaattcggtttttgtaccaatcaacagaaaagagcctagcaactgcagcaggagctgcttccagatccgctagcttctcaaagagcggaacaactctcaaaggctgtttcactcggcattcacgctgtaaaagctcaacagctaatacatcagaaggtgcagttgccatagagataatgtaagcaccaaagctatctgctggtagctcggctatgacatgaaacgtgtccagaacatcagctatttcttcggttttaggaagatcagaaccgaaaagcggacgtttgccacttagctcagataaaagccattcttggcggcgttcttcagaccactctctgtaggatccgatatctaaatgcgtggtgatagcatccaatacatcagtgtggcggtcagattcttgcctatgtcaagtctcacagagagagcacaaggttgagacttgcctcaagaaatcaagaaggcttccatctgctattggacgatcaccacatgaacacagagatcggtaacagagctcaagaggttccaagaactacacaaatagcatgagagagtggtttagtaccaaatcataaccgggagttaaaagattctaattgcaatgatacctgttccaagttaatgaaagtagcctctacagggacatcagagtgtccattgctgagcagttgatgagcgcgttcacgtgtgtgataaagcttgtcccttacatcgccaagaatcacacggtatggctcagttgtaggaattgacttccagaattctgcaatcaagacaatgaatgataggttccaaattaaatcggttccagacacatagcttaaacataaacaaaatgctcaaaatcggttatttttcttacctatgtaatgttttgcagcatctttcctcgaatttgcatgaacttcatcagctcgcgcacgcagctcgtcattgcaacgccacatagacatctatgaaagaagcagtaatcatgaaatgaggtgatacataaataaaagaaagtaaggagactaaactcaaaaaaagaactcgagatcaaacctcaaacataagatcttcgatttggttaaagtacatagtagcagccatcattctagctaacaagcaaacatctctggtgacttcaggtgtaacccttgggttacctgcaaatacacatatattgtgagtttgtgacatgagtaaaaccattaagagagggagcgcaataagagagctatgcgagaaggacttgtagaaatgtaccgtcacgatcaccacccatccaagaagagaactgaatcaatggagcattatatggaacacgttcttcgatccctatgtttttcaaagccgtgtcaacacggcgcagagacttag

SEQ ID NO: 34356 - DNA, 3361 bp, Arabidopsis thaliana landsberg
tcaccacttaacgggaaattttgatctgctcacaagtgttagagatatggatcctgttttagtcatactagctgatgggagacagaggatttccgtaaaagaaggctatgttgttttgggttcccatcttgtgttaaaatcattttattttgttgaagagtaaacaacggatctgattgttgttggtcagttaatggatgaaaatcgttgtgttgttcaactcgctgatcagtttcttgtggttcaggaccgcgtttcgaggatggtgattggtgcggtaggagagaggctggaacctacactacaagaaaacagtcaatttgcgaggaagggatgcgagggaaggcattcctcgcagcttttgcgagggtattgcgagaaaggtgctacgtaccgcacgcgcgtagcaattccgtcgcaaaacttgcgagggaagacttcctcgcaaatttgcgagggaagtacgatggtttcgcaagaaagatattatccgtcgcaaatcccaagcagatacgtcgcaaatctttaccctaaaccctaaaatacataaaagtgttttgcaatctttgattctcatttataaatatgaatctaagtgaccatataatcattcaagttgattatatggtttgaacaaaaaaatattgtattggtttcaatattgacatttcattttgaaaatgttaaacattcatgattcatacttaaagaaaaccataagatcatcattgatgtatttggggaaaaaacacattcgaattatatgatgataaaataggttcaaatgtagataattaacgttctaatgattcaaaaaaatgaatccaaatgattttgagtagtgattgttgtatttttcgaaattgattatacattgcgaggaaattgcgaggtgtttgctagtacgcgtagcacttccctcgcaatatttacactaaaccctaaaatatttagaatttttagtcatgttcttattttgctgagggtcttactagaaataggagagactgaatcaaatataattattgaaacactgcgagggatttgctaggcgctctcgcagttccctcgcaatgtaagctgcattttgattggtttaaaagacggttcctcgcaatttcctagtaaggtttgcgagtgatttgcgaggaaatatattcttatatatactcgataacctagtttgagcggagctcaaacctgccgcatcaaaccctaaacctaatttttttcttcgattctcttcttctccgatctgttttcctcgtcgccggcttctcttcttctccgatctattttcttcgccgccgcctctcttcttcttcgatctgattacgtcaccgcctctcttcttcttctccgccgcgtctcatattctccagcagccgccgtaactcttcttctccagcttcagccgcgagtcgatctgtttcttctccaaggtaacgtcttcttctccgatataacttcttctttccaatccaacttccaccgtccgatctaacttcttcttcttctccgtcgcgtctcttcttctccagcagccgtcgcgactcttcttctccaacagcagccgcgactcgatctcttttgcctccaaggtaacgtcttcttctccgatctaacttcttctctccgatctaacttcttcttcatctccgatcttacattgttttcccgatctaatcttttctagtttacggatctaaactctgggttttgttttttttgcaagatgccgacgtcagagaatacttatgcacggtataggtcacagcagcaagacccgttgcatgtcaattctcctgtcagtgctgggaatacttcaggggttcacggttcaggttcacgttcaggttcaaccgttccaccatcgcctccaacgccaacgactcagccttctgtcaatcattctgatgttcaagctgaccgtctcaacaatctgacactggaagagctcctcgatagtcttggttgtgctggcttgacaaggctagacccaaagcatcctccgggaactctctggtaaggttaagcttatagtctctggaattaggtcttgtaagttggttagttctgccttagaagtttggtcctgccttagaagtctctggatttaggttggttgtacttagcattgtagtttcttagaagtataaagacatagagatccttatgtgttttgttgctgttgttgtaggtttgacaatgactctacagttgcagcaacaatccgcagcatatttgaaagagatttcaaagaacctcatgccaattggtcacagacatcaaagactacaatcgatcgatggtatgaaacgtttgcggtaagttctgtgttcttttgatgtttatgcttgttttgttgtttggtttcatagtctgatgtttgctttgtctgttttgtagcaagtatataactgggactctgcaataaaccagagagttagattggagtttgaggcagagctgaaggataggatgtctgatcaagttggtcgttggaagggaaagtggaaggagaagggagatgaggcaaaaccgcggtggatagatccagaagtttggaaagttctggttagcttttggagggattcgaagtcggaaagaaagagtatcaacagtaggaatgcaaggtatcatgatccggacggcctcgggatacataaacaccggtctgggcagacctcatacaaagccagagcccgcaaatgtgtaagttaatcaaattttttcctttaaaaaacttgtatttcaaaaaactgacctatatgtttatgtgtttcactgtgagatgacaggagaaagtactacagactttctcctcctcttagatgaaacacacaggaaacatgatgggagtttcatcgatagaaagtcggaggaaatctataaggaagtgtcctcgaatattcaagaggaagagtcacttctgtgttcaggcgacactacagagagcacgggttcaggcgggttatttgttcaggcaaagaacaagatctatgcacaggtatcttatctctttcaacccaatatagaagacagctttttttgttgctttggattggtctattttagcttgaattggattggtctgttttagcttgaattcgattggtctattttagcttgaattggattggtctgttgtggcttgaattggattggtctgttttagcttgaattggattggtctgttgtggcttgaattggatttgtctgttttatcttgaattggattggtctgttgtggcttgaattggattggtctgttttagcttgaattggattggtctgttatagcttgaattggattggtctgttgtggcttgaattgaatttgtatgttgtggcttgcatt

SEQ ID NO: 34357 - DNA, 1241 bp, Arabidopsis thaliana landsberg
attgtttaccaaaaagataataaataagtgcaacgacaagaaagactacagtgtgtatatcaaagtaccttcatatcaggttgatcagttcttcttcatattagtataagcctatggttttatgttcttcccaaacaatattcttgttataattaatgaaccacctctctcggtgtttatttttacattttcattacgtttacgaatgaaagcttttttccatagtttatttttattacttcttaaaatcatcttacacaaacaccgcatacatatgagcaacaaatgaatgataaaaatatgtaagaactcaattgagttactaaggcaatgccaagtaacttatttatgaatcaaagaatcaatcatttagctgcactctggaggaacacctcgaggaaacctttttttatcggagcaatagttgtaaaccatgtatttactctgtacccctttcattcttgtctggccattcgaatcgagtttttgagtgaaccattgggaatttgcgggacaaactgactttccattaacccatacacatccctcgacattgtagtttctgtaataagcggtgaaaggagcttttgaccaatctgttttctctaatcctccccttgtagcccaatgctctgcttcccatagactcgcatatagcctcattggttgctttgttgggaatgggactccacgtgactcggcattcataaactctctaattggaatcccatcaacggtaaaactggagagaataaaagattcttggttcatgagtttatatcctcaaacataaatattatgtatggtacaaaggaaggagtttcgacacttacataattctttgtggattccatgtgatgcaataagtgtgaaagttagcggttgggtcaaaccatagatgaaattgttgttctttgtctcctgagccttttgtgtaaacattagtatggagagtatatggatgaccacttatgttccccaaaaactcgaaatcaatctcatcccatgtagttcccggagatttaagctacacaaattagaacatcatataagcaagtggtacgaacattttatgaaatagcaaaacatgacaagaatgttacatgttacttacatagaatgttgtgacggttccagcagagttaccagggacaagtttcatttgaacttcggctttaccatagagaaactcttgattagattggaaacctgaaccagaggatttgtcaagcgactgtaca

SEQ ID NO: 34358 - DNA, 464 bp, Arabidopsis thaliana landsberg
ccatcccaagttcaacgggtcaccacgcatcctccctaacgccgatagaaccagaacaatctccgccactctattcatctcctcgtcaaaacgtggctttttcttcttcaccggcgattcttccacagtttcttcatctctcttttcttcaaccgattcgagattcaccggtacatcatcactaatggccacatccattctcaacacgagaggagagaaagagagccgcgaaagagacgaatcagtgagtgagtgagagagaaaccctagaagagagaaagagggaagatctgaggttttttttttttgttcttcaaaattttgaaaagaaaattaaaagattaaaacgtcacaaaacctaatttttcgcgggtaaaaatttgggggaatttttagagtaacgattaacgaaatttacaaaagagttttgcagcagctagaagatagagagagagagagagaga

SEQ ID NO: 34359 - DNA, 2245 bp, Arabidopsis thaliana landsberg
cattggggattgattgggtttgcctttgttaaccaagcatttggttctctctgtaagccaatagaaaccaaacaaacctttgcttagttttttactcggtaaataattagtttgacaagtttattattatattatagtgttcagtgtttaacttattcaagaatatgctctttatatcatcaaatcaaatatgttcaatggaaatcttcatcgtgttctcttctcatatccgagaataagtccttaagaaaactcgagaaagtgatacatacatgggtattattgaaaaaatgttattcatataataaagatgttacgtctgaccatgagctgcactacccaacgggaatattcggatttaattggcttggtagtcgctaccaacagcccaataatatatatactaacactaacaagagaacaaaactttaactgtaatatcccagtaaaatgtgccgacaacaaaaacatatatattttctaatgaaatttctgagaaaacaacatatgaatgatagtcacgagttttattcgtcggtgaaaccattgtttaaaaaactatcgtaacatttgatattgatttctcttaaaattcttgtactagtttctacaaattgtgaaattgcattaacttttataagagtaaatcattgttaaatgattgagacatgtgagtgaatctatagtttccttgtttggttgtacaaaatccagtgcttttctctaccgttttgttatgtaaaaggaacttattcaattttccttgacattctttaggaaaaatatatactctttatgaacatataccttgcttgcctgtaacaaatctgatatctataaaattaaaggcaaaaaaggataaaattatttttatttattttccaaaaacattcctggggaaatattgtctagggtaattattgcttattatgcttgccagtacgaaaatcacaaaaaataaaacatttttccactggcaaacaaacatttattagcaaacatttttccaatgccattactacattacaagcaaataggtgtgcagagcacgtgacaagttgagttctcatcgtttaatctcaaccgtccaattaccaaaaagcgaatcatccagctgtttccctcgacctacacagctggcaccgccttaatgggccaagaccttaaaactcacctaaatcttgtagtaattaaccttttcgttaattacagtcttagggatttgtttcttcaacactttcccttaacgactaagccttaatgacgtctcacgcgtttttttttaatacgcgcgtgattcgtattctcctaatttaggaaaacaaaatcatcaaaagttaaaggcaatgacaatgagcaaaaatgactctttcataaccaatctttcttcttcttcttcttcttcttcttcctctttccttatctctccatctctgtggagagacacaaaacttcccaaaaggaacattctttcagttctttacttaatctttcacaatgctaaatcattagccgttgataaagtcttaatctttgattcattcaaacgcgtttttgtttagtaatgtcgtcgcgtttttctttgacggtggtgtgtttgattgctctgttaccgtttgttgttggtatacggttgattccggcgaggatcacgagtgtcggtgatggcggcggcggaggaggtaataatgggtttagtaaacttggtccgtttatggaagctccggagtatagaaacggcaaggagtgtgtatcttcatcagtgaacagagagaacttcgtgtcgtcttcttctagttctaatgatccttcgcttgttcacatcgctatgactttggactcagagtatctccgtggatcaatcgcagccgttcattctgttcttcgccacgcgtcttgtccagagaacgtcttcttccatttcatcgctgctgagtttgactctgcgagtcctcgtgttctgagtcaagacgtgacgactcaaatatccgactgagtgaactgagaaagttacgatttttagggaagatacggtggtcaatctcatatcctccccgcatagacgagccctggtgaatccgttgcactgtgcgcggcactatctcggagatgttcctgatcggagtgtagagcgaggcatgtatcttgactcggacctcacaaagctaggtgacacggttaggcccgggtcacgtgtcatcggacccgctcagtgttgccacgcgaacggcgagtaggattgcac

SEQ ID NO: 34360 - DNA, 714 bp, Arabidopsis thaliana landsberg
tcgacttgtttagtgatgtccttcctgtcgatcataaggtgcctaaagacatttaccggtcaaagaagctgctaaaggctttgggaatgccatatgagaagatcgatatatgcccgtccaactgcatgatatattggcgcgatcgtgcgaaactagagaaatgcttgaaatgtggcctgtcgaggtacatagaggtggtaaacgaagaaggggagaaggtgacaacaaagagggcacataagcagcttcgctggatgcgtctcactccaagactgaaacgtctgttcttggctagtagaattgcgagccgcatgaggtggcgcaagaatcgtaagcccccgaaggatggggtaatgcagcatccgtgtgatagcgacgcatggaaggctctcgacacgtttgatcccgagtttgcagctgaagagaggaatgttcgaatcggcctcgcgacatatggcttcacaccttttggtcaaatggcatcatcatactcatgttggcccatctttgttattccatacaaccttccaccttctctttgtatgaaatatgaatttatatttctttgcttaatcattcctggcccagactatcctggaaagaacctcaatgtcatgttaaaaccttgattgaagagttgaaggagctttggaaaggtgttgaagcatacgatgtttttacaaacagatatcaaacttcgagttgcgtatttgt

SEQ ID NO: 34361 - DNA, 977 bp, Arabidopsis thaliana landsberg
tctaagattgacccagagattctagcaaattcgagagatgcaagtcaaacgaagactttttttttattgagtaaatcattcgaaccctaaggaaatccacaatcgcacggcaactaagacggaaacaccaagaaacaaatcaaacatgaaatttatgaaataacttacaggtattctatctggatatttcgcaatgatgttgttcgactccttcaatctctcatctatatcctcaaacaaagatgaaaactttgcttcagaagcacatttcgaaggaaaaaaaattccaaagaatcagaaagagattaacgaagaacaaaccagaggagaattgatccttgaaagacttgacaacaatccccattacagatttcacgacgaatgattcctgaccgaatcggtgtttttttgtttgcagagagcagaggaagaggatgtgttcaattttatgtttggttagttcgtttttgattgttcgagaagaaacggtaaaagatgagagaaaagagattatttatagaaagacgacacgcacttatccactttttggacttgtccgatttcttgtgcacgtcacagtttatctatgggcctctattcataattttgggcccatcaaaatatataacacgcatagctgcaagaacaatcaagtgtattacaaactcttttattctactctttcaagtgagacatcgatctctccttgcagagagagagagagagagattcacacacaaaccgcaatcatcctgccggaagattctccatctcttttgtagcaacagtgcgatccataagcttttgcctctcttgttccaagtaatagatcttatcattcataccttctttttcatacgcctcgaccatgatctcaaacgttcttgaatcgcatacgcattgtctctccttcattcttatgtacacttctttccatctctatcagatcatgtgctttagcacacgctgatatcacc

SEQ ID NO: 34362 - DNA, 2867 bp, Arabidopsis thaliana landsberg
gttcttgagggaacataggcaagaatgggcagtcaatagcatcaatgcatattcggccgcagccatcaaagcaggcccttgtagcttaccaatccctcgcccagggagctttggtggtcaagtcattcttcctctagctcaaactatagagaatgaagaggcaagtactctactaagagattctcaaagcaaatcaatgtaactacgtttttgaataaactaagtaaactaatgccctttatgtcctctgttttccagtttatggaagtcattaagcttgagagcttggggcactaccaagaagacatgatgatgcctgctgatatcttccttctgcaagtaagacctaattttcatttgtgccaacatgtgaaaaataaatagaacatttttttgacatctgttttgaaatgtgtttaaaatcgcaaagattgtgtggtctcatttgaaaaacacacacacatttctaaaggcaaacaccaattcaagattatatctattttgataatttttgctcattgatagactctatagcgagacgttattagtcttgttgcaactactcaattttatgattctaatatatataattttgtattgtttgatgatatagatgtgcagtggggtggatgagaacgcagttgaatcatgcgcagagcttatatttgcaccaatcgacgcatctttctctgatgatgcaccaatcattccttccggtttccgcatcattcctctagattccaaatcagtacgttcaattcatataacaatcaaaatcattacctttagttgaatcaaatactaatttataaatcgaattatgtataggaggggttgagtcctaaccgaacgctagacctagcgtcggctctagacgtagggagcagaacagccggagattcatgtggaagcagaggaaactcaaagtccgttatgactatagcgtttcagctagcttttgagatgcatatgcaagagaatgtagcctcaatggctagacagtatgtaagaagtgtgatcgcgtcggttcaacgggtcgcacttgctctctctccttcttctcatcagctaagtggcttgcgtcctccacccgcgtcacccgaagctcacactctcgctcgctggatctctcactcttatagatgttaccttggcgttgatcttctcaaacctcatggaactgatcaactcaagtaactttggcaccatcctgacgctgtcatgtgttgctcactcaaggtaattttcttacttctactcactcaagaacatcgattatgctcttacattatctataacaaggaaagtgaactggtttttatcatttcaggccttatctccggtattcacatttgcgaaccaagctggtttagacatgctggagacgacgttggtggcacttcaagatatcactctcgacaagatcttcgacaacaacaacgggaagaagactttatcctccgaattccctcagatcatgcaacaggtacgttaaaccgagtcatgcatttagttagcttaagttagaaaaaaagaaaagaaattgtgtaacggtattgatgaaatcataaatactaattagcaataataaatgtgaaggggtttatgtgtatggatggaggaatatgcatgtcgagcatgggaagagcagtaacgtacgaaaaggctgttgggtggaaagtgttgaacgacgacgaagatcctcattgtatctgcttcatgttcctcaactggtcttttatatgaccttttttccatgtttttccttaattatcaaaacacagacctttttttccggagatatatttatatatactcttactcttagttaatttgtatttagttatatcatctctaattttgaaagaatttacttacttttatggtctttgcaacactctagtctctagtttgtgttagcctgttgttgataaggcaagttacgtttggaaattcatttttggtggcaagtctgtggtagatgagaagaacaaattccacctcgtctagatttacccgagaaccagttgctcctggatgttgagactctttcccttcatgtatatcaaaaaagcaaaatggaccaaagcaccggtatttatgccagtcacgagtagtctgagcttcaatgtcagatccatcttctagtgccccttcatagaattgctttgacggaaagcttcttatctgattttcagttaaaaattgtttgcagggtaaaataagatgcaatcattggagtaagaattaagctaactacaatctttggcttggtttgtgaaataggtatcaactgatgataatcctttaggaaatctgatattcagtgagaatctgtcttaggtggatgctagatgaaagtatgtccatacctctggatgcatccggtattgggtcttcaacatttttactggatagccagccttttgaagtctctcgaacatgcttgtaccgtaccttcattatagaaagtaaagacagcaatccaatagtgtcagtacaatatacacgagagacataaacagataaagtgtggatgcaatgactggattaaagcacttacccagaatcctgagcaacagttgagattacagtagctgggagttgctttggatcccctacctgataaaattagattttacataaggatatccatagctaccaaagttgcctttaacattaatcattaactcataaacttatggtgttgcgcttgcctgtaacatctacagtttcaagatacaactattttaacatctatattcttcaatttcaaaaaaagtaaggcatgcttcattcgttgaagctactgatggtgtgtgtcgaatcatctacttaatttatgtacccggaaactaactgcaatt

SEQ ID NO: 34363 - DNA, 2374 bp, Arabidopsis thaliana landsberg
tgaccgaggagagagatttcttgaggggtagttccatcagggaacgaggaatactggtttggttgcttaaccaggacctctcaagaatccgggcttggaagtcaatactctcttgatcaagcttgtcatcgaggtagatggtttcgataagagttgacattgggacgcggtttgagtcaggtgcccggtaacaagtgatatcaagtaagtagactttgactcttgttctaattctttggtagatcagatgcactactagcaaaccggcaaagatctcaaagacagaaacacctgagctgagaagtgttgtcagctctgagatgctcatggagattggtgaaactctgtgtatcgtttgattcatttcactttattcttttaggttcaagtttttcatggatgattgattttcccattatggtggcttttacgtgaagatataagagaatggacttatcatgtggaagttgttgcagaggatttcactgcgttaggcaatgctatttttttcagcattcgttatgtgctttctaacaattagtcacaacacgtcttcttacttgtctgattagttaagagctaacttgggtctaagggtttacacgttaaaccagccactgtaaaattattgtaattgtgttgattaataaaacaaaatccttcccaaattttgaaaatcatacattgcaattattaaataatattgtaagagaaaaagtgagactaattccaaagttgttatgtcaatttgtttgttcgttgttgtttgtaatttgcatgtgaagagcttcggataggataagcaggggatatgagctgcaacaaacaatactctctcaaggggttggcttcctttgcaactgattacactgcgagtccggtgactgactgattaattcttcctcttctggccattatgcaatataaacgagaagacgaggaatcaagaaaataacgaaagaaactatctatcctaaccaaaatacttttaatcattggattgcaaaaaatatatagattagaaatttcatgccaattcgaacaaatatcaacaaaaaggtgcatataaaaaagatagccaaaaatgattggtcaaataaaaagcttaacaaaaaaataagatcagaagaatcaagagaaaaaaatgacaaaaagaaattattgcaatcatgtttcttgttaatgaaacaattcaaaatcaataatagggtgccttgtagacatatggaggtgggggagacttataagtgactttaggagaaggcgaatagtatggtggaggtggtgagctataaacgtatggtggtgggggagatttgtagtcaacttttggagaaggagagtagtacggtggaggtggggagttgtaaacatatggtggtggtggagatttgtagtcaacctttggagaaggagagtagtatggtgtgggtggtgagctgtagacatatggtggtgggggagatttgtagtcgacatttggagaaggggagtagtacggtggaggtggggagctgtagacatatggtggtggtggggacttgtagtaaacctttggagaaggagagtagtatggtggtggtggagagctgtaaacgtatggtggtggtggagacttgtagtcaacctttggagaaggagagtagtacggtggtggtggggagctgtaaacgtatggtggtagtggagatttgtagtcaatctttggagaaggagagtagtacggtggaggtggggagctgtattcgtatggtggtgggggagatttataatcaacctttggagaaggagtgtagtacggtggaggtggtgagctgtagacgtatggtggtggtggagatttgtagttaacctttggagaaggagagtaatacggtggtggtggagagttgtagatatatggttttgaatgtggtgtatacttaggtgatttgtgttgatggctgggaaaattgtattgtggtgtttgaggggatgagtaaggatatgatgtcaccgtagccgcaatggcacttaagaccacgacataaaccaaaaactgccttaaccccatcgtttttgaggatcgtttcactggtattttgtttctttgtttttgttatgatatatttgaacatgaacaccctttatatagtttttctttgtatgtaaacagcatattatcttgtcaacttgggttcgtgtgtggcacttccaaacacataagggtacgtgctaagttgtaagttgaaaagtagtgactcggagaataaatattattaaattctcttgcatctttcattttcttaaatatgttctcacaatctttatttgtatgaattttatcgactcaattattttgaagaacaaaacatatccgtcgattggtgattac

SEQ ID NO: 34364 - DNA, 1729 bp, Arabidopsis thaliana landsberg
atactttaagcctcaaattctaaaaccaagctaaaatagccagtgacaacccactgtaatttttacagaatttttggaacttcttaaaacactgtcgtagttcaaacctgcactagaaaccccaaatggaaattaaagaaaggaaaatgaataatgaaaattgatgtcatcctaagacctttgtaaatttgccccctaaaatctatgaaggcaatgcaaatcccctatgttatccctaataaaaacctaagcttaaagggtaataagtcaaagtctatgtataccactagaagccccacagaaccaggaaaccctaagttaattcttaacttagtttctttaacgtaatgttcttaaatcttgcataaccatgacatgcatgttcattgcatttcgatagactgtaatcttgctgacggagagtacatcctcgtgccagagcaaggagctgctcaggagtagccccagatccagcacccgagcctgcaccagaggacctgcctgccactgctttggaaggcaagccccggttttatgcataacctgttatttatactattttacttcacttaatgattgtaggattgattatgcacttaggtgtaggaattgtttgaaaccctagttgcatgatctcaggaatccttttgagatgaatactagtatgacaggtcgagtagttgctttacttaattaggatctcggtagaagacgagtgatttttctagcactcgcgcgagatcaggaaattgattgtacccacttttatactgtcatgatactagttggtggacaacaatccatggggattggttggttacgagatggaaaatggaataaggattaacgtgtggatacctgtgtcaagcgtttgaacatactaagcacatgccgagaaatatggtaaatcagtaagcctagtacctgagtgaacctgcccgcagactttacccctcacgcgacctgagacgtggtctcccattacggttatggtgggtacaagtgcggtcactgcacgacggctgtcggggtcagtgaggcattgtacgccaaggcggtgagcgctcatctgttgccaggggatcgatggggacggttgatgtgtgtggggacggagtgtctcgccacgtcgtgtgtttaggtttaccttgcaaggatgaaaactcgattcgaatcgtttgcttctcgcagctaatgagactgcttgatccattgtactgcattgagtaacaagtggaaatgtgatgatgtggcaaaagatgttgattgctaaatgtttgataccatgtatgattagctaggaacgcatttagtcttaagagaatcacactaaaacttgaaaagctaaaacttgatttagacttagctagtgctttttggcaaaccaaacccctcagccaaacaactacatgtctagaggaagaggagtagactcctcacatcgggtaattctagctgagtattagtatactcagccttgcttgtggcataattttttacaggttttctggaggatatggttgttgttgttggagtgacttggctgtccatcttgccaccgggttggacagtcgagtgggaccctacctcagcagaggaggagcatgaggagtgatgggccaagctttcccatccctccgtttatttaccgttagttatatttagttgcattccaaacaatgatcactactttggcaaactccgatgatgttgtaataattttaagtac

SEQ ID NO: 34365 - DNA, 999 bp, Arabidopsis thaliana landsberg
ccccgagtctagcgttgtctcgttcgcccattagatttcaaagttagaagagaagtgtgtggcagtaggactcctcgaaactagcttagcttttgcaccttggaggtactaggctagatagagttgagtcattttggaacaatttgatgtaatcatgctaaaactctcttgggagcttgtttggtggatgctattatcagtttaaatttggaaggaggaatttatgcctcttaaaaatcccttttgttgaagtcggagtctatcatgctgttttaacttttctccccgtgataaaatcttgaaatttggaactgtggtgttaagtaagtatgtggtttttcagatggcacgggaggcagcgtcgtggccagaacgagcgcgttcctccaccgccgccaccacctcccactctgcaggagctcatggctcagcagaatgagatcctgaggcagctggctcaacgtcagccaccacctcagcattatggtggtggagaccatcagcgtcaccccgcggcggctacgtatcaggaatttcttagcaccagccaccattgttcacaagggcggaggacccacttgatgcagatctatggctgcgagtgctgaatccaaattcccactgctacatggagtgtgctcacatggtcaccaaagtcaggttcgccacccatgcagttagcggacccgacaaggacttggtgggatcattatctaactatgtagccagaggaccgagatgtggactggagggagttcaaggcagcttttagaggacaccatatacccgccgggatcatggacaggaagctcaatgagttcttggcactcactcaggggatcaggacagtgttgcaatatgcccaggcctttaatgactggtgccagtatgcgggatatcatgcagatacagatgagacgaggagagatcagttcaggagggggctcagcacttagctccggcatcgtctcaacaccgtcagtgctaacgaccacactg

SEQ ID NO: 34366 - DNA, 783 bp, Arabidopsis thaliana landsberg
ctttttttgtattatatagtatttctttccttcctttctcaattctagagtgcaaattgggttagaactaattctcttcttttatgtattcttaccatcatcaccactgtgtacaaatgcacaaaccattaaacaccagcatgatgcatgtattgtttgagtgtcttttgttaattattcatttgtataagtgaggtgttcacatgtgatgatgcataaagatcaaactcacataaagagaaattgttcctctactggtattattcctagcaattacaaagtgggtgttacagtttttgaggatctttggaagatgaaggcccccaacagcaacaatgtcttcagacaccacaacgccaggcctcctcatcaggatccgcccggcacgaacaaccttatccatggccttattgcacattgccttcatgacgacgcgatcatcctccaaggccttgatagtgaggcgggcagcctctagctcctgcgtaacaagcttcttggaggcacacagctccttgatggtagaatctttggtggacaacagcttgccaagtcgggacacctcatcttgtgacacccttagttcattgtgatggtggtccaaatccgacatggtaaagcgatggcttctctctagaatggtcaaggaggtactggcatcacgatacagcctgtccagattatcacgagaaacaatgagtgctcgtttttcctcctgcaagcaagaacaacactaagcattgaagcgagggaaacataacagaagcatccaagagagtttac

SEQ ID NO: 34367 - DNA, 740 bp, Arabidopsis thaliana landsberg
ggtctcatcttgatagatcacgggacagaacttgagcaattatttagaaattgttccaaatgagcaagatttttaccagaatgaatgcaaatcaaaaccacaacatatttactgcaaacgttctcctctaagtgttccaaaaaaaaaaaccataacatacaccaaaaaaaaaaacataataacttgtcgacatctatgcatcttttcctgagtgatggcacagattctcagaaatgtatacaagaagaagcatagagccagtcccaacttcactagcacaactcactcttacacaatatctaagccgataaagtagattcaaaggatacctcacattcacagaatacacagatgccacaaagtttatgccggcctcacttgagttggagatgtttcagccgccttccctgaacagacaaggtcactaaatgagaaaatttatctcccagattatcgttattttgtaaaaatatgttctcagttgacttgattacatcaaagtagagaagagaacttttttgagttatttgcaatgagttcagtggttaccttcaggcgtgaagagatttaagatgttgcatccctagttccgaagatcattgcttttccaaagtactctgcaaacacagaaaacccgaacatcgagccttttacttgctggaggaacagatcttggtatattcgaggtctgctccaaacttatcttcatatacagaacatatctgtactgaaaggcacac

SEQ ID NO: 34368 - DNA, 5494 bp, Arabidopsis thaliana landsberg
  unsure (1)..(5494): unsure at all n locations
agtttacccaaaatctgtgtggcaacgatcttgcagaatctcacatctaaagaaaagaaagatgaaatcttaagaatgaaagaagctgaactccatgaagaactttttcaattgttggaaacatcgaaaccattaattgtctttgatgacatatggaaagaagaagattgggacctaataaagccaatttttccacccaaaaaaggttggaaacaactcttcttgattacgttttttgtgtttagttattttgaaacaactaagtttttactacaggttggaaggtgcttcttacttctcgaaatgagagtgtcgcagtacttggggatacaaaatatctcaactttaaaccagaatgcctagccattgaggatagttggacacttttccaaagaatagcatttccaaataaagatgcatctggtaagcattccatgacacagttgttttaacccttagtacctcattttgatatctctttattgcatgaagttgacatgtattttatttttatatggcctgatttaaataatttagtgataatgttatgcagaatctaaggttgacgaggaaatggaagatatgggtaagcaaatgttaaaacattgtggagggctaccattagccatcaaagtgttaggaggtttgttagctgcaaagtacacaatgcatgattgggaaagactatctataaatataggatctcatatcgtgggaagaaccagcagtaacaacagttcaatataccatgtattgtctatgagctttgaggagttgcctagttatttgaaacattgcttcctctacctggcccattttccagaagatcataagattaacgtggagaaattgtcttattgttgggctgcagaaggaatatccannnnnnnnnnnnnnnnnnnnnnagagaccattcaagatgttggacagagctacctagaggagttagtgaggaggaatatgataatttgggaaagagatgctactgcttctagatttgaaacttgtcatttgcatgacatgatgagagaagtttgtttgtttaaagccaaggaagaaaacttcctagaaattgctgtaaaaagtgtaggtataaccagctcctcgaccggaaactctcaatctccttgtagatctcgcaggcttgtttaccaatgtccaactacattacatgttgagagagatataaacaatccaaaacttagatctctcgtggttctctggcatgatttatgggtagaaaattggaagctattaggtacaagctttacaaggttaaaacttctcagagtgttagatctcttttatgtagattttgaaggaatgaagctaccttctggcattggaaaccttatccacttacgatacttgagcttacaagatgctaaggtatctcatctaccttcttctctaggaaacctaatgttactgatctatctaaatttagatgtcgatacggaatttatattcgtgccggatgtcttcatgaggatgcatgaattgagataccttaaactaccgttacatatgcacaagaagacaaggttgagtttgagaaatctagtaaagttggagaccttggtttatttctcaacatggcatagtagctcaaaggatctatgtggtatgaccagattgatgactcttgctatcagattaactcgtgtgacgagtacagaaactctatcggcatcaataagtggactgagaaaccttgaatatctttatattgtgggtactcactctaaaaaaatgagagaagagggtattgtactggatttcattcatctcaaacatctattgttggatttatatatgccaaggcaacaacacttcccttctcgactaacactcgtaaagctaagtgagtgtggcttggaggaggatccaatgcctattctagagaagctgcttcacttgaaaggtgttattttattgaaaggctcttactgtgggaggaggatggtttgctcgggtggcgggtttcctcagttgaagaagcttgaaatagttacgttggactaaataagtgggaagagtggatagtaaaagaaggctccatgccacttcttgaaactctccgtatttgggaatgcgcaaattaaagcagcttggtgatgaacactttccttctcgccttacttccatatctctagggtcttgttgtttggagaaggatcctattccgactctagagagattggttcacttgaaagagcttgaattctataaatctttcggtgggaggataatggtttgcacgggcggtgggtttcctcaattgcacaagctaaaattatctgagctagatgggttggaagagtggatagttgaggatggctccatgccactgcttcatactctagaaattcgttggtgtccaaagttaaagaagcttcctaatgggtttccacaattgcagaatcttaacttatatatgctaacggaatgggaagagtggatagtagaagaaggctccatgccccgtcttcatactctgactatatggaattgtcaaaaattaaagcagcttcctgatgggttgcgattcatctattcattaaagaagttgattatatcaaagagatggaaggagagactgtcgcaaggatgggaagcttcaacgtagtccaaggcattccttctgttgaattcgacgactagccctgctctcagcactcacagactactatgtatctatatatgtagatatatatgtacacataaagagctgcattgatggtgttcgatgaattgtctaactgtgactatccttgacgagatatgtaatcataagcctctgtttccacccaaaatcaggtaatctcatgatcattgcctttaaaaatttcaaagaaaagcttatcaaacaagagacctgaataatcatgttctttctgcttagaatcaccaaacaagaacattttgcaggtcggaagatagttgcaggtaggaagctaatcaaacaagacaccttattcttcacgacgagatgttgaacctgaagaatgttggacaccattttgatggataaaacattttcataggagaaatgatgtgagtaagctttcagatcattatgataatcttctcctcctatagtcatttctctcgttactcttacaaagtcctatgtagtatcttcagttcaaggtctatttctttcatataaaactatattatgtaatgttcataacctgaatgttagtagtaataccttgtgattagaaatggttaagagatgacatagtgacttactcaactctcataatcttatttctgaagtcaagaactctagcttgcaaagttgcaaaatttgtttagctcatactgtaccttttactgtagttgtagatgatcttggtttcttactaaaaactttgttgaaatttcatatactttccttacatgcagagagtccaggggaaaagttgtttagcttttcaagccttgccgtgtgcatggacaaatttcttattcactatctgtttttgtgtgtagtaagaatctgaattttatgggtgaatttgtacgggtaaacagagaagttcatatcctatgctgagactaatgtctgctaaattcggacacaatgtcaaattctcaagctcatcgttaaagcaacagagagaatttgattgactttttttcattattctgttttgtagacgaggttgaagctaccttatcaaaatgtcttcccaagtgaatcttggtcatctgcctatttatacatatattaaactcttttcattgttgtcttgatgtgtgtgtgtgtgttgtataatcgatcatactttatgatttatgttgaagtatcatgacagaagaacaaaaatatttatatcaacattggttatatgtttgctggtttgactgatgatgatatgtcgatctcaactctcattttgctggatcattcctaattcatagcttatggttgaggcaggttatgggagtgctgcggcgaagctcccgttccttgagccggaagttaaaaaggcgaaaagctacagaacccttttggaagcggtgttgcctatctttaagagcgtcggaggtgatataactgggagactcttgatgagatgttggcctatctggaatacttcccagttgcgagaccaacggagctgaacaccgtcaacaacgcacctacaacccatctcaagagcttggacacgagggagaaggttggtgcctggatcaaacagtggtgcatccaaaacgcaagccatgtagctttttgttttgggttctacatggccattgcgaagaagggtgaccagttaccctaaagacgtcctgcgctttgagggaactcagaagacaatttgaactttttttctttagcactcatagaagaagagcaaagagaccaaacggataatatgaagtcttctttaccatacttaagtgatgttggtagtgttgtatttgtcattattggcacaagagctgatcttgcttggtttgtgggagtgacatgttgtcccatgatatgttgtctattagcttcagtatatgttgctaaaccattacaaaagtttttcaataataacttcgtgtaccatatttgaaagtttaacattgattgcaatcttgtttgtttttctcttttgtggtatatgtgaagttgggaaaggtgatgaggataaaaaaaatacgaaacacgaggaatgaaaatggagacagaagtggaagttgtcttacgacccaggaaaagcttatttggggagagattaaggatcttgcatcttgccaaaacaaggagattgtggactatttgtttgtcaaacatgtcatgaaacctttgttgggtcacaaatatgttactcctggagtaagtctcccttgccatgattgtaacacgttataacggttacaagaatctccaagttgcattaatttaggatgttttaaaggttttttgaccttttagttttgatgatttgggaatgttgtagatttgccttcctgtagaaaaggagtttcttgagtctgttaagaagatagtaacgtctcagcgtcattcttggcgagctaatacactcagtgtggatactaaccgcagtttcgcgcttctcatggatgatttgaccattttctcccatggtaaattaattttgtgtaatcaactattcgtgaattaagctctttcttttcactgttctacttgactgcaagtaaaagttgatgtgagcttgtatttatcttttggttaatccaaattgacgatggtttttggtttaataacctacactgctttcaggtcaagttgaggatcataaaccatgcttaactgttgaaataaaggtgttcatgatcattatcttgtcctttctttctttttagctcccaattattcttttttcttcgctgatatatttactttggtgaagtagcccaaatgtggatttctttcatcttcaagtttcatagcggaagaaaatgttatcaagaagagtataagtcgcttcgaaatgtaccaagt

SEQ ID NO: 34369 - DNA, 1112 bp, Arabidopsis thaliana landsberg
  unsure (1)..(1112): unsure at all n locations
taattcactcttcaatttcgcaatgtagaaatttttcagtgaattgcttttgtaatttggattttaccatggcagattctggagaaccaagttctaacggtggccaaagctatggcagataagatagacgccgagctcgccactttagcagagcttgacgaggacgatctagaggttttgagagagagaaggttaaagcaaatgaagaaaatggcagagaagaagaaacgttggattagtcttggacatggtgaatactctgagatccattctgagaaagacttcttctccgtcgttaaagccagcgaacgcgtcgtcgtgccatttctaccgcgagaattggccatgtaaagtatggattcttaatctcttgcttcaacattttcgaattttttgtgtggtttcaatagagttcgattgcgtagttcaatgaattctctttgattagagatgttaggaatcaaataatggtgcttcttgttcatagccactagaccttgtggatgtgtttgcattgcttgattcttagagcttgtggaagtgatgtgttttgatcggtgtaacggtttttggatgatttggtgatttgtgaatgattgatgtttgtgtaggtgatggataagcacatgagtatattggcaaagcaacacattgagacacgttntgtgaagatccaagctgagaaaagtccgttcttggctgagaggctcaagattgttgttctacctactcttgcacttattaagaacactaaagtcgatgattatgtggtaacaataattattggttaaacgagaacattttgttagtttctttaggatatgatttagtggatgatcaatgttgttgttgatgataggttgggttcaatgagcttggagggaaagatgatttcagcactgaggatttggaagagagaatagctagagcgcaagtgattcattacgatggagagtcatcgtcgcttaaaccaaagtcgacaacacaagttagaaggaatgtgaggcagagtgctcgttcagattcagactccgaatacactctcgggtttttcagcaaacgaatgttggaatgttcatgatcttcactctatcttcagcccttttgtggtg

SEQ ID NO: 34370 - DNA, 736 bp, Arabidopsis thaliana landsberg
atgtatacggaattggcccatatcatgatccttccacacatgtctaagtactatcattatgactcgagctgaatacgtgagtattgtgaaacatatcgacatatgtctctaggagaactctaaaagaacttgtatttgaatattgcgtagtctgatgggtgattgttgcatgagaattggagtttgtgattgtatatgtatgtcgtatgtgatattggtaaacatatgttgtatgtatcaattaatataaactgttcaacgcgaattgagcaaattatgtttttctagggaaagttgttttaaatttgctttagtttgaactggccaaaccggtctgggttttacaaatttttggcggtttaccgatggtaaactattaccgctgggtagcgattttttccgttaaaacggtttggtactcgctcgggttgttctgggctgctggctacctgggcgacacgtacgtgttggcgtctttgcatggccgttgccgtagtatgtgttacacaacgagttttagggctggacaaaatgctcgtggctcgctggctcgcttgtttcatggtcagcttggctcaactcggatcggctcgtttgaattttgttacgagctgagctgacatcctagctcggttcgttaacgagccagctcggttcgttaacgagccagctcgcgagttaaacgagctaccatattccagtaaaacgaaactatatacatatcatttatagaata

SEQ ID NO: 34371 - DNA, 2178 bp, Arabidopsis thaliana landsberg
gttttcttaatttatatgaaaaacccctgtggataaacaaaatataatgtatagtccaataattggaaattttgtagttaacaaactcacttcgttttaacaaaatatggatggatgattcagaggcatagtatgcgacattaactgtattacaatggtcgacaatgactttgatttttgaggtcgtccaataaatactaaaatgtatgggtatgattttaggttgaccaataaacttcgatatccatcgttaattccatgaatgttttaaaaaactgaagttgcttctattatatataagttaatctattttataattttattttatgacagtttagctataatttcttttcaaaaacatttatgttcttaatttatcaatctatcactttcctcgtcaacatattactttttttataaatcttttgcatatgactagcttatcggaaaatcgttcatatagatagcgacataactaaaataaaattagaaagatgatattgttttgatatagtgtttgtttgtcttgtttcaaaagactatgcaatcaactagttgtggcgtcttgtggatctaacagttttaaaaatgtttagggtcaatagtttaatcagacttggaacggtagtttatacctttagatacaatattatctaaggttaatttatgtcatggaaaagttatatatagacaaaatgttcaaaacaattaggatttattgtgaaaaaacgagaaatggtagatgattcatatacatatcaacttattccaaagtaaaaagtttaagaaataagaaaaataaaaattgtagcgtaacaaacattgacatatggctcgttggaaacaaactaaatgtaataagtatagttgttcatcaaactattcgcatacaaccatcatgaacgatgactaaaaatgggagacaaagtgggactattgtaaatcctacgtttaatgaattagaatgttgaattattttttcagatttttatacatatgaattgttgctttcaatgttcccttaaccaatgaaagcaaagatgctcagaggctatatatgaagaagataagtttcatttctcttatttgttttccttagggtttgaggttacatcatgttttccttttacaggagttacattgtcagtgacactagggtttattctgacacatgtcaggtctttattgattctaaacagtcaaaacggttttgtaaaaccactccatctttgccagcacagctcgtggttttggtcacttgatccaatcctgatttacttttggttttgtcttcttttgtaggtggagatgatcgttggaactgtgaactgttttgggtctgctcttggatcttttgcttgttgggcttgatctgtgttggattctcaatttggcccaatcgctaaaccttcttgaagatgtcgtttggtaagcttgtctatacagcttcctcttcttcatgtccgatcacagctgtggtttgattcttctcttctctaatccgagccgttatctcaatgtaagctgctttctcactaataatctgaacaacactaaatattatttcagcttatgaaaaaagacataaagtaacatcaatggaaataattgacatgtcccacacagacacacatttgacagtcccatcaatatatatgctgacgacagaaagtataatgacccacgtgaattttcaaagtaattcttcaaataattgacatgtctaattaagaccaaattagttgataacgtttgcaatggactgatcgtaatagttagtcacctgtgaacgagtttgttatttatccaccaaacaaaaacaaattgacgcatttggtgggtttgggcaaaggtatatctgatgaattttttctacatctcattccaaaaagtcgacctaacccaaaaagtcgacataatagaacaagatagtgtcggtatgaaaaaaagatgaaatcaatagttaaattctcaaggacaggcacgaaatgaatatgttgaatttttgtgatatttgtatttgtttttactctagaagtgttttcttactaatatatgttctaaatttaactagatatccagtgtcaatccatacattttcgtcaaaataagattttttttatttattaaaagagtacatacatttggtcgttcatccacggtttacagaatcaaagt

SEQ ID NO: 34372 - DNA, 1003 bp, Arabidopsis thaliana landsberg
tattgagtgtgaatagtctcatagtttattaggggaatgtgtgtgttcttgcttacttagtaactttttacactggttcatatttgtttcactagttcatttttggtgtgagttctctcttaagtaattgaattgtgtgtttatttacttgcttcagttctgttttgcttcagcacgaaaactattttttactctgttgtttcatacattcagcaaatggcacaattggacgacatgatgacggtacaaaatatcacaaaaaatatctttaagagcatgcttttaagcccggttcaatcacaaagattggctgtgtcatgtttttgcagatagagatggtgtctgaagaggaaacagaagatctcactaaccaggttagttactgcaatgtcaatcagaagaatcatactcacacccgttgagagtgttctctaaacttccgtactaccgccaacaacaagagtgagtttgaacatagatttgagttcacatcatttgcatgagactataaagattctcgtggatacttcattgcattaatttcaaacatctttaactcttttttgcagctcgggatctaagacatgaaactttatatttcttgcatgaaaagaaagcagctttttcatattcttgtataaactctactgatgtcacaaacttgatctctcaagtttaattaagtatatggtcaaccttgcaaataatcttaaaatcttcagccactgacttaaaggtgtccttttggctctgtcttagaactatttttctctatcctcacgggtctacatcaaaagcctcgaagatcaaaattaagaaagagattatatatacttttatagatttatagaagataagagctcaccattggaaacaagttggaagatgatgacacatgagattccttgtgtccatctcattacttatcgtgtcactctgtaatgagaatctttcattaaacaaatctaatttacactaaacctatctctgtaatcagagtcta

SEQ ID NO: 34373 - DNA, 590 bp, Arabidopsis thaliana landsberg
tgctgaatcccttgccgatgattggagtctattgcttgctctgaacattgcttcgagtgggtgtgttagggttctaatttggacaagcattggcgtagtgtccaacctcaccacacttgaagcaagtggtgactgtactgtgtcctgcaggtctcgccggggtgccagtgggggcagcctgaagagtgtgtggagtcccctatggtgcatactaagctggtcgttgtcctcctccatgatgagctggtgtacctagggcggaacatagcaagaacggatgctacttctcccctgcccctaggtgatagccttcctcttcatctcaccctgttgaacacgcttgtgttcaatagctaaagccttatccagaagcctctggaatgatggaaaggtgtgagcaaccagttgatactaaagtggttcaaccagtccctccatgaaatcctcctactttctttcatcatcagcagcttcatccggagcataccttgatagctagataaatttgtcgcgatattcactgattgacttactgccttgctatagtgataggagttcctctttatcttcacagtccagcaggaatatgg

SEQ ID NO: 34374 - DNA, 1885 bp, Arabidopsis thaliana landsberg
tatatatcgggtgatcaaaagctttacagaaagaaagatactcataagagagcaaccatgtaacatatcatggcaagaagaagagaaaatcattcaaaaccaaataaacatttaaagatcaaacatattactatattagtgtcctcccaatttatttgctgatatcggaaaagccatatactacttctcctacctttagaaagattcaacagttccatttttacactcggtatgtttgctagttgagtcccccaagattgcatctgggagtaaagagctgtccccatgttcgtctgccgagcccacgtgctgattgtcccgggtgaataccaatggatccatgcatgcgatccccattaaaccatgtgaaaggagggtctccaatgattcgagggaatcgtatgccgcttcttcccgtggaaatgttccgccttccaagctggttttgcctccaaaaagtatcactagcagcagcaagctgtttttgcctccaaaaagtagcaaacctcgccttccaattaactgaatcacccgcttctgtcacaacaaaattattaacttcctccaagcacttctgcttcacaaatcattgtctgaagccagataccgcatctctgtacaaacacaagccatatatccaatactcacaccaggaagcaactctagtatcttcagctttagctctgtcggtaggagcatcaaacaaggtggagattccaagccagccttatcacaaagaccaatcaacaacggtataacaagttcatcttttaccattctccacaacatgaacacttcccggtagtagctagaagagccctgcttctcaaacttcaaagtatccacaaccaaatcaataacaggcaaaaacctactcttatcaagagaagtcatgtgcactcgcttacaagacccacctagagttccgtaaactacaagcctagggcctatgttctgaaacctcacagtaactgactcgactgtattagtatccttacgtgtaattagctcaggcagagtataccttagagatacagaaagtaacttctttgaaaagctaaacttatcagagccatgatccaacaacacgaatccagattctaacataacggcatgtactgataaagccaaagcagtcaagtcactggtatcgccagatttctcaagcaatacatttttcaaaaagaatggttcacttaaccttttgcttttagcggcagcgagctccacatccattggcactggaccctctatacccgaatttcccctcttggatccttcgcctggactggaatcattatttgaatccgcgaatccagtatccatcgaatcttgaacaaccaccgccttgtttctctccgattgtgaagctagggtttcacaatcttcccgtcgatacaaattacaaatcttttaaaatttcattaagtgtagagtacatgtatatagatgtatattgggcgggtagttttaggcccattaataacaatttagctatatgggcctttggtgggtacttactacttaccatccagatccaacccgatcgattagagaaatttggaatgtctctcaattctcgaaggaaggttgatgagagtgaaagacaaacatggttggcctccgtgagagaagttctcaacttttactgagagaaccaatggaatatttattctaatagttcaaaataaaacattcatttgacggtgagcaatcattgtgatatcaaaacgagatggtgtattatttaaatgatacaaatgttattgcgaagtataaatttctaaaatatgtatgaaaatttcgtttgcaacatcacagtccgtttgcaaacatgaaatctaagagcaatagaaacaaaatataagaagccatatatatcggg

SEQ ID NO: 34375 - DNA, 2074 bp, Arabidopsis thaliana landsberg
ccacaaaatcccaagttcggttttcaaatccgtaaatctcaaaatccccaaatcttcaaatccctaaatccccaaatcgatttttcagtttcattgccatgttagcaaaaccgcgtcgccacgtcagtaatcgctgacatgtattaatgaactcagccgtaaaatattataatggcagggacggctgagttacgatatgttgcagctgatttaagaaaaaatggctgagttatgagaaaacagctaacttatagtataactgagcctagaattacggttgacttaatgaaaatttttatgagttatgagataatccaacctacattacggctgacttaaagagatttgtctgagttatgagaatttcaagaataacccagcctaagttacggctgagtttttacctaatggttgattgtcaaaacttggctgagttattctctcgacacggttgagttaactttttcgactggctgagttatcaaagacggcttagttatgggatgtcgttacaactgatttatgttcgagtgtcataaatcagccgtaatgagctggattaacggataactctgcctagttacggctgacttagtagcaaaagattaattactttaatagcaagcaattatgaccgacttattaaacaatacagatgagttaaagattgtcggttgagttacaacattaaacgactgaattaacttgtcgttttttttgttttttaattactgtaatagtattcatgttgcgactgacttctagttttgtttaatggctaatttatttaggcaaattttcatgttcgtttggtggcttacttgctacttcatcaattaaaaaattacgtcgatgcaacatttcatttcatcatcatcaaaagaaatacgaaacatctttttttcaactcgtctttttcacctgagtttttcacatcactggaacttccaattcgtcatcgtcttcctcattcttcttcattttcttacatccttcgcccgatataatcaatccgtttcagaaattgttatttgtggtaactgggtaaagaatttgtatttaacactaacgatagagggtgtagagttgtgcaaatatatgcggaaagaacgcacgacaagcttgtaaagttggtgttcgatgactatggtttgaatgagttgagccatcagttaaagctgagctacatgttctcgaacaaggctatgaaaaatatgtatattcgtaataacttagccgtaatatgtagattttcgcgacctttcgtcttatgtatagcattataactcagccgtaacatgtaaatttgccgcgaaacaataacagggagggaaaccgaaacgttcctcttaatgacgtggttttttctcttaatgacgtggattatcataattttcactaatcatttttaattataaataataataaaaaatcttaattaaaaaaaactaatcaagagtgttaattgtaattacacaattgcacaaaatatataagtaatgtttagagaatgtatgatattctaacaatattccaactttctataacatctcagtaaatatttcataaattttgggtaataagtttggcactttttaaattcactaaaataaatctaaaattcttaatttatttttcttatcaccattatatctttgccggcttgctgcgccttacgcgaataactattctaatagactaataaaaggagagtgaagcagtaggtaacgccccgaccgatcctatcatgtggaacctacggcctctctcgggcccagagagcatacgcctgaccggcggacggtatggcacgtccgagaggcgataaagccttgtgactacatgatcgtatcacatgcatcatcgccattcgcacggtaccgacaatcatttaccggtagggcatccatcacaaaagtattctcgtacgcagacgcatacgtgtgacacaccttcactgaatccagcactatcaccgcctaacatcatcactgctcggagtgacctagatcgccacgtgacttccatcatatgtctccgcctgccccaggataatcccaagggtgaagtgcag

SEQ ID NO: 34376 - DNA, 4256 bp, Arabidopsis thaliana landsberg
  unsure (1)..(4256): unsure at all n locations
tgtttaattaaagccatatgatcatgaatagcattaacatcaacatctctacatctagtacaaatagatacatgctcaacaatagatgtagagggtttgcaagaactaagttcaacaatcttagcatgaagaatatcatttttatctctaaggttggaaatggtagcattgcaaacatctagttctttagccttagcaattaatttttcattttctattctaatgctagtaagagaaatgttcaattcttcaatcctagcaagcaaatcatcattattatctctagaattgggaattgaaacattacaaacatgtgaatcaaccttagcatttaaactagcattttcatgtctaaggttgtcaatcatctcacggcaagtgcttagctcactagataatttttcacatttctctatctcaagagcataagcctttttaaccttaacatgtttcttgttttctttaattagacaatcctcttgggagtccaaaaggtcatccttttcatgaatagcactaactaattcatttaatttttctttttgagctatgttaaggttggcaaaaagggaacgcaaattatcctcctcatcactagcattatcatcactagaagattcatatttagtggaggagttggttttaaccttcttctttttgccgtcctttgccatgaggcacttgtggccgacgttggggaagaggagtccttggtgacggcgatgttggcggcgtcctcgtcgtcggaggagtcgcttgagctttcgtcggaatcccattcccgacaaacatgggcatcgcgcccttcttcttgtagtccttttcttctcctttcttctcccttcttgtcgtcgcctcggtcactgtcactagatataggacattttgctatgaaatgattggacttaccacactagtagcacaccttcttggagcgggacttgtagtccttccctctcctttgcttgaggatttggcggaactcttgatgatgagtgtcatttcctcgttgttgatcttggaggcgtcgattggaagtctacttggtgtagactcctccttcttctcttctgtcgctttgaatgcgacgagttgcacctcgggtgtagaggtggcgccttgctccaagttgacaatgtgtttggagtctttgatcataagttcaaagctcataaacttgccaatcacttcctcaggagacatctgtttatatcaagggtctccacggattagttgcacttgagtgggattacgaaaaacaagtgatctaagaataaccttgaccatctcatggtcatcccacttggtgctcccgaggttgcgcacttggttcaccattgtcttgagccggttgtacatggcttgcgactcttctcttttgttgaggacgaatcgaccgagctcaccctcgatcgtcttccgcttggggattttggtcacctcgtccccttcatgcgcggctttgaggacgtcccaaacttctttggcactctttagcccttgcaccttattatactcctctcgacataaagaggtggggagtatagaagctgtttgggagttaaagtgttgtatttgggcggcctcgttcgaattgtagtccttgccccccacctttggtacctgcgctccaaactcaacaatatcccaaatgctttcgtggagtgaggttagatggtgcctcattttatcactccacatacaataatcttcaccatcaaaatatggtggtttgcctagggtacggaaagtaatggagcgcgctntgaattatgaggataacataggggaatcttactatacttcttgcgctcatggcgcttagaagttacggacggcgcgtcggagccggaagtggatggcgacgaagaatcggtctcgtagtagaccaccttcttcatcttctttttcttttcgccactccgatgcgacttgtgaggaggtgattcctccttcttgttgcgggactctcttgatggagctttcccatggcttgtggcgggcttctcgccggtcaccatctccttcttggcgtgttctcccgacatcacttcgagcggttaggctctaatgaagcactggctctgataccaattgaaagtcgcctagaggggggtgaataggcggaatctgaaatttacaaactttaagcacaactacaaaccggagttagcgttagaaatataaacgagtccgaaagagagggcgaaaacaaatcacaagcaataaacacaagagacacggatgatttgttttaccgaggttcggttcttgcaaacctactccccgttgaggaggccacaaaggcggtgtctctttcaacccttccctctctcaaacgatccacggatcgagtgagctttctcttctcaatcannnnnnnnnnnnnnnnnnnnnnnngaccaccacaggtttggtgtctcttgccttaattacaagtgagtttgattgcaaagaaaggatcaagaaagaagaaagcaatccaagcgcaagagctcgaaagaacacaagcaaatcactctctctaagcactatggcgttgtgtggaatttggagaggatttgatctctttggtgtgtctaggattgaatgctagagctcttgtagtagttgagaagtggaaaacttggatgcaatgaatggtggggtggttggggtatttatagccccaaccaccaaaagtggccgttgggaggctgtctgctcgatggcgcaccggacagtccggtgccccctgccacgtcatcactgccgttggattctgaccgttgaactcctgacttgtgggcccgcctgggtgtccggtgcacaccggacatctactgttccttgtccggtgtgccagtatgggcgcgcctgacttcnntgcgcagagccgcattaattgcgcggcagagagccgttggcgcggagatagccgttgctccggagtcgcaccggacagtccggtgaattatagtggagtaactgttggagtttcccgaagctggcgagttcctgaggccgacctcccttggcgcaccggacactgtcggtgtacaccggacagtccggtgaattatagcggagcgcctatgagaattcccgaaggtgttgagttccagagccgcgtccctttggagcaccggacactgtccggtggcacaccggactgtccggtgaattatagcgcgccggctctgaaaattcccgaagctgaggagttcagcgcggagtcccctggtgcactggacaggtactgtggaatgtccggtggtgaccggacatgcccggtgcgccagaccagggcacacttcggtatgcttttagctctctattttgaacccaacgttggtctttttaattggcttgatgtgaacctttgacacctgtataacttatatactagagcaaactagttagtccaattatttgtgtttgggcaattcaaccaccaaaattatttaggaactaggtgtaagcctaattccctttcaatctccccctttttggtgattgatgccaacacaaaccaaagcaagtagacgtactgcaaaatcacttcaaataagaactcaaagttgttttggttcaattttggcatatatggatcatcctttgccaccacttggtttgtttttccaaatcaacctcaaatttctatctctaagtcaaacacacatgttaaggcataaagagagtcattccaagagtatttgatttaagatttcaaaaactccccctttttcccataatcaacatttctccccataagaagccaatttttgacaagagagacaataaaagagttttgtcacaacaaagagctctattctactattttcaaagtctctcaagtggtagctgatccatttatcgctttggcctttattttctcccctttggcatcaagcaccaaaactggatcaatcttggccctttaaccccattgcctcaccaaaatcttcaattaagagtaaaaaggcaataagagcatgaagatgaacttggagttagttactctttcatcggagtgcagtggaagtctttcatggtccaagtccaacattccctttcaatccacctttgagactaaattaagaacactcaagcacatggttagtctcaaaggatcaagttgtagcacaactccccctaattatgtgcatcactttgcaaatggacttatgaggtccggggagtgcttgtacaacttgagcaccatacattaacaacaaaatgcataagggacatgatcaaggcataaaacacatgta

SEQ ID NO: 34377 - DNA, 308 bp, Arabidopsis thaliana landsberg
actgataccccttgtggtcaggggagtagccgaggaagaggcagcgagtggagcgaggagagagcttgttaggggcgatacggaagtgttagggtagcaggcacagccgaacacgcgcaggtggtcgtaggaaggggctgtgcgtacagggcgaagtgaggtgtagggtggctcaccgccttcgagggaagacggttgaggagatgcgtggcggtaagggcctctgcccagtaggtggcagggagagatgcctaaaagagaaggcagcggatcatgttggtggtggtgcggatcatgcgctcggcccg

SEQ ID NO: 34378 - DNA, 793 bp, Arabidopsis thaliana landsberg
atccctcgaacgttagtaaataatatccaatagtcacgcatagccgtcggacataagttaaattaatatccgatggcctacatgaagaccgtcgacgataagcttattatgtctgatggtctgcatgccggctagacgccgttatgaccgttaaccaactatactgccgacggtgtctgtggaccgtcggacatatccaagctccaacagctaacgtcggatataagattatttccaaacttttaaaaccgacagacacttccatcggttataagccttgggacagagaaaataatttatatatgcccgacaaaaaacactcggcaaagcgccgagcactcgataaagagccggattccggtagtgaattatgtgctgagttggagacagggaagcaaaggtgctatacaaggagatcctcctccccggcccgcctcatgtttatcatcgttgcagatgctatctcttgcaaaaaaataataataatatggcttagcaaatcaataatcaaagggcttgtgtttgaatacattgataatggagtagttgtcaccatcctttgtatggtggaatatgctagtaatttgtatcgtcgtcccctggtagctagctaatatacagggaggttagctaactatatatgtctgcattattagttgagattcaaacaaaaccataaatcagttactaaaattgccaagaaataatccatggcttgattggaagaacacacgcgttttggtcctactagctaggaggaagaagttgccactcacatccgaattcccaaaca

SEQ ID NO: 34379 - DNA, 4847 bp, Arabidopsis thaliana landsberg
attccaatccccacatattacataacaaaagccatcatcggtgccttgcataaaaatattttttacgaggtcactaatatatcagcggaaattttgactttatgttaccaatctttattacttaccgtcgttctgatatcttagttggttgattcaaaatacaaagcctccctctcttttgtttgtcttctttaacactcagccgacatagttattcgttccatgcttccccggtttgcacactaagaataaaccggtgcttcaaaaaactaaacctatttaaccaattttactttattcaattactagggtcaattaagtaatttttcccctacttatttatcagaagtgtgcctgtcgccgaaagtgtccgttttgctctatattatttcgaaagtgtctgatactgcaaatcactcctgtttttattggagccattttgtatttttgaagtattatttgttgttaaaatggtctcttgaattactctgctttagtatgaaatattatatttatgcatttcaaaagcttattgtctgcattttcttttcgtcatgttattacaacattactattttaatctaatcatattatgatgatatttaactacttgtaacatatgcaattatgatgaccagcttctccgaacaatgatgttacggtgcaactctccttgacacacttggaccttcaacggaaggtcatgcatgtacgacatccatgtgatggacatgctcttcatgcgcactctggacctccgataaggtttgcaccattaatatgaaagaaactgctttgttttttaggaattgaactccaaacctaggtgtagaaatattaataaactttttgttaactattgaaacaaatggacctccattatagctgcttattttttagttaaaaatttaaataaaaataaaaaaataatactaataaaatgaaatagagataatcccctgtttaactcaaaaatgtatatgatgattgtaactttgtaactttgtaagtaagtaagtaaaattaatcaaaaccaaaacttttttcgaataagaaaccaatcgtaccagccattaaagatttaattaatactcatgaaattatgggacatgaaaaatgacatacgaatatgatcacaaactttctttatacataataacagctagacatttgcatgtctgttaacaacctccccctatattatattcttgattagaacctatttggaatcatcaaaactgaaatgaaagataccaaagatccaaaactaccacaaagaatatatgtatgaattggaatatgggattggtagcctatttactctccatttccgagacccaaacaataatatatgagaaatggtttataatattttaatttttggactttatctaaaacattttttaaacggatgaattacgaaaattaaaactgaatataattacctagtgtatgcttaattatacactgttgatatgattatgattaatgaacatatatattacgacgtaaattgatttacatgtaaagaagaaaaatataaaaaaacttattaggcggatgaatgctaaacattttattatattcagtttccttaatttgaaaatttgtaatggtaaaagtatagtaaagaaatgtagaaacttgtgataattataaaaccaatgtgccagctgatagttcattggattagttttgtcattgtattatatttatggttaacgttgaatttttgttcctaaaaaaaaaaaaaatgtgttcctaatatactcgttagaaagagctattagatgctcccataacaatctaaagtaggctcatattaattaaggaaaaacccaaaaaaaacatgaactaatttttatttagacgtttaatatccaattatttttgtttggaagaaaaatacacgaagaaataaaactttgcaatttaatatccaaaatattaattgttgttatttacacactcacatctgacaacaaaaataaaattccaattttacccttatcatctcaattaactattaattattacatgatatgacattacttttatagttttggataaaaattaattttattaatatttcattttatggtgtctaaacataaaatattttattttattaataacctacgatgcaacgtgggttttaacctagtatatataaaaatggaaaaaaatagagaaagccaactttcaaattgtagatgtctaaaatgcatactcgttataagttaaccatttaatcatgaagtcagcgaatagttaggcatttaatgacatttttaaaagttgaaaatttaaacgtccttaatttaaaagtcaaagctttattgattagtaacatcgtttttaagactgtaaatacttttaaaatataaatatagcatttaaagcttcactctttgttaaatttttcatgttttattttatcaaaattaaagtactctaatcctctgtttttattggaattattttgtatttttgaagtattatttgttgttaaaatagtctcttgaattactctgctttagtatagaaatattatatttatgcatttcaaaagcttattgtctgcattcatttttttgtcatgttattacattattacttgtgatatttaatctaatcatattatgatgatatttaactacgtgtaacatatgcaattatgatgaacaacttctccgaacaatggtttcacggcacatctctccttgacacactcggaccttcaatagaaggtcatgcatgtacgacatccatgtgaaggacatgctcttcatgcgcactctgaacctccgataaggtttgcaccattaatataaaagaaactgctttgttttatgggacttgaactccaaacatatgtgtagaagtattaataagttagagtcattcaagaactatattttatatggatataacaacacctatatttagacgtattgaccggtatcaaaggcatgtgtgatataatgtttagattcaaaacggataattaaattttaaaactcacaccatcattagaaaacaaataccatcattagaattaaatatttttataatttgtaataacccaaaaaaaatcgcattttttatcgcccaacaaagaatatcctcatgttccaaacctcgcgacaatcatgattggataagaactgcgtacactgttcagttgctgtaacatggatttttcctataaatacaaaattttagaatcgttacaatagcggatgaattgttaaaatccattaatatgtgataatattttatgtaccttcaaagagctccaatttatcaaatctgattatgatgattttaacatcattaacataatttgcacagcggtttataaatctattaatacagaagtttggcaattgacatgatatacgtaacccactgcatcaaagaattcatcaagttagtatggtgctacgtttgacagaaaagtaaagagaaacaaattgttatattatcaaaatctgtaaataaaataaagaattaccttttgtcttctatctggaaataaaaacgatgattaaagccaaccgaatcaaacgctcttaaattgatagtacaaacaagcctcccaatcagatctataaatttgaatttgatacggcttaataaacagttttaaaaataatctataacaaaggtaaaacatatcacttacccacacaggtaattaggatctaggagaccttggttgacgtcacgaaacttggcaaaagtgaaacaatcactttctaagaaggaccttattaaagtaactgaactaagggcattcgaacgtatgaaaaaatcgtgcatagctggtctaaaacatcctcgtacaatatcgacattaaactctgataagagaatgcaatgtccttctatgaggatagatgagaatcgtcgagccacgtgtacatgaattagggcatgtatctttcgatgctgtttgagattttaaaatcaggttgaatccttatagcataacaaatttacgataattaataattgttacctttgaatctgcaaagataaattccaccactctattgcgtaacgccgtgcatacgaaccttcgaacaattttgactttcattttctttgtaatcatgtccaactttagatcctcaagatcgtcacaaactaccactgcgtccgactctttagacaaatcgtcatcatcttctcccccttccgactctgaatcagtggcaactaagcacacaaaatcatcgtaaacgacacgtaaaaacatattatttacgatatataagattaaaattagtactatcattgtattagccaaaccatcatttatcaacaacaaacacttcacctcttttgcgcttatttctcttatagttttcaaaacctgcatcctgttcagccacgccaaaccgctaggagttattggtgccatcaatatcttgcaataatacacaacacataattcagtttgtataaacaaatatatatacatgtacatgcttactggttgatatgtctataatttgcatgatttaggcattcattcttcaccactttgtcattgtttcatccacatttcatctcattaggagtcgttttagtgtgttttacatacttaggacgattttgcattaggattgcatgtgcatggcatatttggttgttttcaggtactttggatgcttttggagttcaaacggaggaaaaagagaacatgaagtcagaatgcccaatgacgccttcagcaaaagtactctatcgcagcctcggagccctgccagggcaaatcactctatcgcaaccccggagaagcaagcagctcagtttcactcaatcgcgaagccgaaaga

SEQ ID NO: 34380 - DNA, 923 bp, Arabidopsis thaliana landsberg
tcagttaagatgcttgtaccatccattatcctacttgtaatttatctctatctctattatattaaagcaccagttttaacggtcgttccatgtcaactttttataaataacccctcacatctatttcaaactaacccactgcacgctcgtcccctccgtgcaccaacccccatgtcccaaaccataccttcgcatatagatggccaaacggtggccccatacgggcccgctaggccgacgcccacgaaaaccgcacctccagcccatgaaaaagtggtgcaggagacggggtttgaactcacgcccttaatggaagaagggcgggagacactgggtgaagcaatctaaccagtagaacatcatgcttaggtgttttaaatggaatataatttgtacatattatatacgattttttgtacaataaaaaaaataatcgtgtcggaccgggccaacactatggaccaaggctacgacccaagcgctacacatcgctcatgctgggttggcccagacactattaaatgggtcatacctcggtccggctcgctagacacagcctatttggcgatctatacctccgcacgattgatggtcctcgactcagttgccaccacctcgttcggcattctacttcttttctctctcccctcacgcctccatctccgcgccacccattctcggcaaagggtgtaggagcaggcgcctcctcctcgtattcgtccgacaccagccccgacattgactcgcgcagtggcttttgcacgtccacgaggatgtttcacatcatgcacgcaccatcgttttcgtcgtcgtcggacgtcccggtcgtcttcacggccttcatcgtgttcttcctccccaacctgctacccacggtcgcagcctgcgagcagaccgacgctcgtctacgcaggtacggggcg

SEQ ID NO: 34381 - DNA, 3197 bp, Arabidopsis thaliana landsberg
  unsure (1)..(3197): unsure at all n locations
cattcagtctaaactttataacttctcgaccgtaactttgactgtcgcgctcctcatccccgcgtaaccatagaagcgctctatatttttatattgctcgttttgataatattttatcttgtatggtgtaatgttcttatgcaagtatatgtttgcttgtgcctgtttgtattcgttgcacgtcgcgaatagattgcggtctgttcctgagcttcgaggaatcgacgatcaagatttggtgaaccactggtcccgagatcaagctcctcgagttctacgagattgaaaaccctgagcatctgtttggtgaaggcaagtgtcctctgtcccattatgtcctactcatttataacttactatcccgcattacttacttgaaacctaaggattgactagctttacactttactttgtccttgatgacctattgggttgttatggttagcactctgctattgctttaacttaatcaatgaacatgatgtgattatttatgatacgatgatgttatcctgatgaggttcttgtgaatactttagggggctcaggttgtttcctgagtgcctctccataacgatctgtttagggagtgacaacccgagataacagtgcaaccatcagggtggaatgggatgcccttagctgattaattagagaaaccagaggagtagttggctttgcatagggccgtcaatggggtccgggcacagtacttgctttgccgaggctggttgcagaggtcctttgatttggttttgttagtcacccttcctttggggagatgtactgtgttgatcaaactggagaaacctaacgggcgactatgacctataggaaatctttgtaaaggctacatagtgatgccctactgggtcaccttggaagtgatcaatggagagtcatgatctccgggtagaaagggaatcacggcttgtgggtaaagtgcacaacctctgcagagtgtttgaaaactgatatatcagccgtgctcgcggttatgagcgaccaagggagctccagtgattagtggtacttgatcagagacattttggtttacaggtggcaatgagactgatggtttggttatgactatggtactggtaagtggtattctttctgtttggaaagggtacatcaggctaataacttgggttaatgttaaaacctggctttctactagtaaataataatctgaccaactaaaagcaactgcttgacttatccccacataaagctagtccactacagccaaacaggatacttgctgagtatgttgatgtgtactcacccttgctctacacaccaaaccccccccccccaggttgtcagcattgcaaccannnnnnnnnnnnnnnnnnngctgtggaaggagacttccaggagttccaagattacgacgagttctaggtgtgggttagcggcaacccccagtcggctgcctgtgaaggccgcgttatctacgtttcttttccgcactttgatttattgtaagaactatatggacgtctcagacgtatgatgtaatcgactatttcccttattaatactattttgagcactgtgtgatgatgtccatattatgtaactgctgtgtacgtgaataactgatcctggcacgtacatggttcgcattcggtttgccttctaaaaccgggtgtgacataagtggtatcaaagccgtgctgactgtaggaccgctaacctagagtagaatggtcgttctaaggactatagacctctgtctctaccttgactttgatatcccttcaaaagttggtcatagcgaccaaacctatattctactatatattataccttgctgaaaaattgtgtttcattctgatccttcatttacttatgattcattatttgctggtcatattaattctgttctcacccttttgcttgcgatgtcttttgtagatggctcgacttagacacactgcacgtaagtcagtcatccccttcttaccctcccgccttgctgagcgtccgcttcgccgtcccgtggccggacagtccagccacttggagagactacaccaccgcctgcgtgaggagcaggaacgtcgacgacgggagcaggagcagcagggctcttccttctcgctccaccaggagatagagtctgtgaggagctgctcccctgtgcttcctctggagccgccccctgcaccaccactgggcgccccagcttctggagtagctgctggaggagacccagacgacggagatggcgacgacagctcgagccacgacaccgacttctctgctaatcctgagccggaaggatgggttgctcgacccatcactcgcgacgctgctcgcgggtgtcacttccacgatgcgctcgacaccctgctacgtcgggcacttgaccggcatacttggtccatcgagtatcgctgtgtggtcttccagcacagtcgcggggtctacccggaccgctgggaggcgacctgcttggtgcgtcgtccggagaacagtctctggggtgctaaggtctgctcagagcactattccatctctgagcgggactcagctgaggcggccatgcaagatgccgcacgggtgcgctttcgcactactgctcagtggggtagctgatggtctcaacctgaagtattacccccgccgtccatctggcagcacaggaggcgtgattgtctcacctgttgatgaggacaatcctagattgagcagcatagtcaacctagccgtcgtgctaaacacgaagctgaaccatgcgctagatgagctgagtagggctcgtgctgagattgcccagctgcgggttgagcgcgcggaatgtcgtcacctggatgatggttcccccgctcccgtcgggactcagcacccgtaccgctcacctcggcgtggacgccagccttatggcaatctcgactgcaagaccaagatagacttggaaccatagatcgtcagtgtggaatcttgtaataagtgcttaatatagaagttttagtcttagtcttagtctcagtcttagtgttagtctcgctcttagttagtcttagttagacagggtagtttgctatatcctgtgcatttatgcttgtcatgatgagctatgttggatttggatctttgtaatgactgtcaccagagtgtgggtatcccctgcattttggtttacctgttatatgttaaaggagttagttatctagttgggaaacctt

SEQ ID NO: 34382 - DNA, 1025 bp, Arabidopsis thaliana landsberg
aagatcagtgagattcgacgattgattctagatggcagaggcaaagattttcgagaagatgctgaaggcgtgatatggttcaaagaccgcttgtgtgttcccaatgtccagtctattcgggagttgattcttaaggaagctcatgagacagcttattcgattcaccctggcagtgagaagatgtatcaggatctgaagaagaaattctggtggtacggaatgaaaagagaaatcgcagagcatgtggctatgtgcgatagttgtcgaagaattaaggcagagcaccagagacctgctggattgttgcaaccgttgcagatccctcagtggaaatgggatgaaattggtatggatttcatagtcggattgcctcgcactcgagccggctacgattccatttgggtagtggtggaccgtttgaccaagtcagcccacttcatacctgtcaagaccaactacaacagtgcagtattggcagaattgtatatgtctcggatcgtttgtcttcatggtgtccaaagaagatagtgtcagacagaggaacgcagttcacctctcacttctggcagcagttgcatgaagccttgggcacgcatctgaatttcagttcagcttatcatccgcagacagatggccagaccgaaaggaccaatcaaattcttgaagatacgttgagaagccagtgcaaatccttgaggttgcagacagagtcacccgaaggaagaccatcagaatgtgcaaagtcagatgagatcaccactcagaggaagaagcaacctgggagcgtgaagatgatctgatggctaaataccctgagctctttgctagccaaccctgaatctcgagggcgagattcttttaagggggataggtttgtaacgccctgaatttgggggtagaattttttcttcttgtctctcaccaaattcaggcgttaccccttttcttttctcgatccctcgctaaaccttgatatttttccacaagttatagcggggtttggcttggatttcccgtgtaaagaa

SEQ ID NO: 34383 - DNA, 627 bp, Arabidopsis thaliana landsberg
tgtctgggaatctgatgggcacaaggagatgtgggtcctaatggcaggatcccatacctatagttgaagttgttgattcctccctttatgaggccaggaggcgagactggcctagtcatgactccatatggcgggccttagccatgtgctaggcctgctgtttgtgaaatccataacggtggcccctaagtactcaccttgacatagcaatattaggtaccccatatttagggtaccaacagtggcccccgggtccacctcggatgggggccatacctatgccttgttccagaaatgtcagccttgcgcaacatcttcgtgttgtagccttcatgttgagtgggttgcttgctgaaagtcggctagagggtgggtgaatagacaaaacctaaaatttataacctttgcacacacacttttcagagttagggttagaaataaataattatgaattcagagtgcggaagatagttcttgctatgagttgcttagtcaatacggataactttgggagctaactcaaaacaatgtgggcaagagaacttttagtgagaggggagaagaaagaaacaaattgaatgttgaagatcaacacaagtggacacgatgatttatttcccgaggtgc

SEQ ID NO: 34384 - DNA, 920 bp, Arabidopsis thaliana landsberg
cttgtaattttgttagttgcttcttaagttcttttagttcttctattaacatcatgtatggccgttttgaaatcggagcggttccaggtaagagatcaatgacaaactcaacttccctatctggtggcatcccaggtaactcctctagaaagacaccggggaaatctctagccacacagatgttgttgcctacaaatttcccatctactagaaatacgacgggtttggtagaggcagttatggtaatttcgactttgaatctttctcctttagagttggagagttctatagttcccctagcacaatgtataactgcattggccttccttaaccacgacataccaagtatcaggtctatgcttctttcctctaatactataggggtagcctagaattcccttcccataattgtcaaggttaatctgttggtcatttgattcgcctcaacaggccctttaggtgtaattactatcatgggttttctcatatttagcagtggtatttcatttgcgttggcatatctagcagacatgaatgaatgtgtagcaccagaatcaaataatattgttgcaggaattgcattaacataaaacataccaattacgaggtcccctccatccggagtagcatcaacgctgacttgattaaccttggcaatagaatatcccttgctagaacctggtgtttgctgcctgttctgaactggtgtagtagcaatcctctgtgggcagacatttgcataatgaccaatcttcccacacttgaaacattgagtgcccggactctgtcatgaaaacttcgtcggggtgccagtgggagtagcccgtcgagggagtgtcctcagtggtgactgctgaactgggcgtggtcctccgggtcgagtcggtgtacctgtggtgagctatacgaggacgaacact

SEQ ID NO: 34385 - DNA, 1256 bp, Arabidopsis thaliana landsberg
  unsure (1)..(1256): unsure at all n locations
gaataatcctcactatgtgtcttctttatatcgccatcccgtcttgtttgatcgaaaacactaacgttttgttgttatagaaagcaataatgttttgaattaacgggtatgttaataaaaaattaattttgttaacggaatctgttaatctacttaacatcatgtctaatatgatcattagcaaatattttgtatttatttggaaagtcacataagtttgatatttattaggaaaatcaacataaatttgatatttatttcgtttcgttggatgttgataatttaaacaaatgttttcaaataaaagttggagattttagtgataattttccgataaaagaatgtcatttcttttagaatgccattacagttttaatttacttgatatgttaaaaacatttttgtgggcttaaccagggcccattaatccgagttaccaaaactcgcaactcgttaacactccgagtcattgactcagtatcttcttccaacgaaatttcaatttttcattgttcttgatgaaactgaggccacgacgaatcgcaaatggaggcgatcaaaccacttccacaggtctcgagcttctccgcttcggtatttagctttctcgatgacagattcaaagaatccacggatctctctcattctacgggtctggtttccgagttacagaccgagatttcccaattggatcagagattggccggattaaatcgccagctcgagtcaggtctcgctgcttacgcttcgttttccgatcgcgtcggtggtctatttttcgaggttaatgccaaattggctgatctctcttcttctacctccgttactcgctccgcgtcaggttcgtatgatttcatcacgattcttctggatgtagattatgttcttgaaatgttgtagtcaaatatgtaaattcagtcctggtgatggaagattgaatatattcccgttataatttgagaatttgataattgtttaattcattcagatagcggaaaggaggaggaggcgacggagcatgtagccggagaggatcttccttcattagcaaaggaagtagcacaagttgagtctgtgcgtgcttatgctggtatgtttggtgttaaaggcgttttgtatttgatggctgctttctgataaagactagctctattttatgattnggtgttatcgatgttgatcgggattagttagtcccaacgttgagttaccaaccttttttttagtttgtcactgtggattcaacattttagatg

SEQ ID NO: 34386 - DNA, 1313 bp, Arabidopsis thaliana landsberg
  unsure (1)..(1313): unsure at all n locations
atctctttctcctctaatgccatgatcactcttgctccgaacatgcttggccagaagttcaacaccaccacttcttcttctgacatcctttttttttttatcttcttctttttttttggttttcaatgacttttcttttggtgaaatgaacttggtggagatcaaagcccttttatggctcttaacttataagggcagttgacaaaaaaatataaaaaataataatcatataaaggtggatcaataatgattatgatttaatattttttttgtgatgcatgtgaggtaatgttgtttaatccaatagattatagataacttcgtttgatacgtcatgagtcgcaagtggttcttttttttcttttctgtttttaactgtagtgacttgtccatttataatcggcgttatatgaaagaaaaagcaatattttcaagacatatatatgttgttgataaacaatgttgcaagtgaaatacgacaacgttgaactgctacaattcagaaaaataaatcaatcaatatttttttccattgctgtttatcattttgattaatttctcataaattataagaagaaaaaacttccaaatttataattgtttacttaaaaccatttactagaatttggctaattataggcgtatcgtttaaaaatatttatatattctaatgttgccctactatntttttcttttcttctaggataataaccttttaaatggctcccaagaaagcaaaaaccaaattaatttctctatgcttctcttgtataatactccctctattccttttttttcattttctaaaaaaaaaaaattatttcaaaaagattgattttttaagttttctatgccatatttattagttcttattaatgaattgtaaactttagtagaaataattgaattttattggcttaaaatcataagaaattgtaaaacacaaacactaatacatttaaaaccaagtgtaatatatttaccttaatatatgtatttttcctaaacaatcaaacaaaaaagaacagaaggaatagttaattagacttataatagtccatgtcagttatgttttggggcatgtggttcaagtcccagtggtgagccgtgaccactcttgcatttacttctaccaaaacggtgcatgtggtccgcgtcccaatcgtgcgtcgtgacaactcttgtatctgcttctaccaaaatgaaatgttttaaaagaaatatactactgattactaaagcatgaaaaaataatcaagaaatgaaacagattattaaataatctttgaaagaaaaaatgagttatttagttt

SEQ ID NO: 34387 - DNA, 1796 bp, Arabidopsis thaliana landsberg
gtcacgtttctccttactctcctcctctctttttacttaatatatcaaaaaatcaaaatattttgcttctttgaattgaattggccacttcaacaagttaggaatataatattttgatgtaaactcgtttgcttttcctaacaaagtgttagtaccaaacttttatattactatatatcagtttgtgatataagatatctatgaatatgtatatttgttataaactttcaataagacccgtgatatgcttgtcatcgtcgtttaatagtagaagaaactcttggcaaatgattttagcaatcaaattaagcccacaatacaaaatgtccttatagttgtatataccatttgaataaacaattgtagtttggtgggtaaataatttgattactcgttgctaacttattattattatatatatacagttcaaatagttaagttgaagtagtcggagtcaagtttattgaataaaaacgtgataccggtaacgcaaaatgactaacgcgtcgtatttttacaaggtcgagtatctctttttatatttttgagaaattttgaattatttcgcatgtttataataattttcttggatacaattacaatagcttgtaacgaagatatgcgtataagtattaaagtaatcaaaataatctcacataagcatcaatctcgagataacactttaaatcttatcgaatctcaagcaagtagtcattaaacaaaactggttttcactacaagagtccaacgattacgcagctagcgttgtattttataagagtataataaaaataacaatataatgatattcaaattaacaatagtttatgttaagttagaagaaccaccaatatatgattaatcaagttattaggagttttcctaaaggagaacatcttagtcgaagttgcttagaagctctcggagatcagatctgccaagctttgactcaacatgcgtcaataagttaagattttcattattttattaaatacttgttttatgagcgcatcgcccacttgtttttcttattacgatgcataaacaaatagtcactttctagcaaactaaggttttgaatggaaattcaactgcatagtgtaatgcgattccaataacaacgaaattttctatatactgtatatattttattattattagaaccgtaccacagtttatctgtaattaaaccgtatatctctactcaaaatctaaaaaataaattatatatatttttatcataatcaacacaaattatatatatatatatatatatatatatataaatccatcgtataaaatatgattattgtaaagaataattattatagctatacgtaacttaacggatttgttttgtgtttgattgtattcgaaaaatatagaatggttgatccatgcatgatgcatctaatctagcatggattgtgcataatttccaatatataacaccgtatttaaaattcttgctaataattaatcattcaacgttctctatatgcaattgtattcacgatctaaggctttgaatgaaaacgtgaacggatggaatatgcatgtatacgatggtgtatacatacatggatatataacgcgcctataatacatatacatacactgatacacacgtatcacgtatacgcgtatatacgtattcgtagtttcgtacgtctctctgtaggatccaaaagcgtgcaaaggatatatatggtggataatgaaaccccacacatgtccatgtcaccaccaatccaatcccattttttccactatgacatttgtaccacgtgaggcta

SEQ ID NO: 34388 - DNA, 669 bp, Arabidopsis thaliana landsberg
agcaagtacaccttggtacacagaaaaattgttgaatattcaactttgtttacctcctagttcagaggcatgtgcatcaattgcccacaggagtttttgatgagctacaagagtctgtggaggcctggttgaggataaagaatattctagagccggtttgagcagttttcgaatgtccacaagatcctgcaactcaaaaaggtaagaagcaaacaggaaaatgactttaaccaggctttacatatagtagttatcatacgcacatcttctccattaactttcaaataaaaagaagacattagcttataaaaataaaaataaaaataaaaaattccaactatctactaacctgatgttcagtaggtcgagcaaccaagaggtgctgaagtgcagcaagtaactctacgtctagagaacaactttcactgctagcaataaaacatgtcttcacccaactgctaaatccagaacttgtagtcacaatctctgtcaagatcacgcagcagccagcagttatatgtttcagtatagacaatctcgctgtaacccattttatcctccagtctcttcttctctagtttcagcctctcccaaaccgtctcctgatgatggtgaaattgtgagtagaaaataaaaagtcattcattacacacagcagaaaaaaaagat

SEQ ID NO: 34389 - DNA, 2775 bp, Arabidopsis thaliana landsberg
tgtagtcccacggttcttcatttattgtcattaagagccttcaaatttcgagttcagctagcatgatgtagtcattaagataacccggcttgttattctgcctctccgatcatcttggtgtagatggaggcgttagttcaccactacccatgttagatgaaacatgatcatcttcgacatgtatatcattattttcatcgaaaccatctccccctgcattctctgtttcttctcccacattatgtgtttcctcgacatgatcatcgtcacgtataccattatttccaaattcctcgaagctaaccacaaatgttccagagttatcacaatcggagaagcacttagaagctttgacttccattatgaccttgtacaagcgattcttcgacctcattgcctttaccaatagctttccatctcgatcatacagagttaaataattttctttcattctaatattacatcccgcctcagttgcttgtccgagactaatgatgttactctttaaatccggtatgaaatagacctctgctaagactttcttctcgccgttcttactcataaaaagtatcgaaccttttcctttaatatctatgcaagaatcatcaccaaatctaactttccctgtgatactctcatcaatcttagagaaatatgctcgattacccgtcatgtgattactagccccattatcaagataccaaacattgtcaccatctagttctgtttcgaacacacttggtttaacgcttttttcattcaagtacactatctcatgcatcatgagcctgtcagcttcttgggtttcgtcttcttcatttgtttgagcttcttgaagtttaagtaacctatccgggcagtttgacgcatagtgtccgagtttgtcacatcgataacaagttactttagatgtatctcgggatcctcttccccggcctcttccacgtccattaaaacctcctcttttttcttttcctctacttgcataccagctatcttgtgtgtcagtatttgcatacattagcttcccttgatcatcttcttgttcttctccatcccaaactctttcttcgtataccttgatacgtccaacaatgtcttcgaagcttgtgttgttgagatcaagaacttgctctagtgaagcaatgatatcaatatactttctcagtggtaaagcattaagaaacttcttcacgagcttagatgtctcaatattgcttcccaacgcatcagaccttgttgctaattctgcaagtcttcccgcaaaaacatcaattttctcactttctttcatcttcatcttctcaaattctgccatcaaggtttgtaacctagcttctttgactctatccgctcctacatatcgagtttttatcgaatcccacaccaactttgctgttgcaagagttccgacttgtagggttaacgattccggtatggattgaaagatgagaccccgagccatagtattcttatatccatcgtcgatccctggttcaatggtctcccacattttgttaacactacgtgcaatttgcatacgaatagcccatacggtgtagttagttgatgtgagcatcggacattgagtagaactagggacgttctccggaggtttgacagccacaatatcgcccatcgttcttcaaagatcgttttctcaagctctgataccaaataaagttttaatgagattaagaacacttaggattataagaataactctcttattagcttaggaaaataactcaaaacctaaacaatctctaagtcttaatctctctaaaactcataagttgtatcacaccttgatacctccttatataataagcttttaaccttatcctaataattagataactcctaatattataagataactcataacaatatattctagattatcttctagaaaaataaagcttaatttccttttctctttagtaacttgctcttcaagttacttcttcttcttcaagcttattccaacattaaactcttatctaatgactcaaaacagtacttactcatcataggagcttcatcccaaatgatcaacttagttgctgttactaattcaacaagattagtaccacgttctatgttgcatgttgaggtctcatgaggagttagaggaataccaaacctagaatgtgcagttcggccaccttctaataacggagatgcaatgccactttatgcaacatttaaacaaatatctcctttagatcttatcgctacggataaaaccttctacaaaaaggtttttcatgttcctccaaaaccatataagaacaaaacacctcctttgtcattaaggacaacatccattatttcatcatataccttcttatgttccgcagttaacatctttaaccaattatcatgttttgttttcaatgactcacggttgtagttgcgttaatcgaggatcaactgattaaaggcaggttcatcgccaggttcaagctgaggcaacatcttatacctccaaagatttgttccatgccttttcaatattgtttgcaactcttgtaaacataactgaatcctgtcttcgtccggcaatatgtattctacatataaattaatattatattgaatgtactaaactatttataaaaacatctataaaattgtatatttaattaaaaataataatttaactaacatggttgtctaactgatttccaagtgtgttcccatacagacagtatcttctaagtgtgttcccacacaacggctgggggacacaagtttcggaaataagcatac

SEQ ID NO: 34390 - DNA, 831 bp, Arabidopsis thaliana landsberg
  unsure (1)..(831): unsure at all n locations
gttgctagtagtatgttctttgtgtacatgatgatgctatggcatgcttaggatctattttctcgtattgatacaatattgttgagctaagattgtcttcatatttgtgaacttgactattacttgttgaatccaaaatatgttcaccattgagattggcacctagcatgtgtaggatgtgtttgaaatccttttgtgctgtcactagtatgctaggtggctatatctcatgctttgacccattcactgtcttgatttattaaatttgtgcttacatcagaatcaagataagtgaaaattttagaaagatcgagatgagtggtgttgatacctgcttttgcctcttcttgaagactagccattctttgcttgggcatgttgagtcattgcccatttctttagggaccaagatttgtttactctagatgacatgttttgtcttttgtctggattttagtcatttaagtgagcttctcttcttcttccttcttttgctgatatgtgttctcatggtggtgttgacagtgcactcgtcaagggggagattgcgaacacaaggttgatttgtcccttgtatttagggttgataatgagtgattatcaacatgggtagtactttggcgtgagtcatggactaaccagagtatgagattatggtatgtgcaacatgtctctctgcttgtggtgtgcagatgtgcagtatagggacgatggtcgacgacgaaggtgaatatcatgcgggttcttgcagatgggacgagagcagcgaaggacgagcgatgagccttaattgaggactanagaagtcgaatgatgagcaatgggtgacta

SEQ ID NO: 34391 - DNA, 1264 bp, Arabidopsis thaliana landsberg
cacgaagcatgaaaagaagggaaggtgttttttccgccaaactcaaaaacggtacgtgtgtaaagtttcatgcatcgtaaagaattgaatagcaaaaatagatatattacattcggggttacaaaaatgttacattatattacatttccgaagtttttttacaaaaatgtttaatcttctctcaaaacgactcctgcagcttcattcagaagccgattgacgacttcgtccataatatcttcggccatctttttaatttcgtcgtcccccttcggctgagggcccgaaggcgctttagtcggatctgaagcaggacacgactacattactattacaaatcacaaacaggtcttaaaagcctaaagattacaacacggtagaagctattatttagtacctaattgaccttcgggctctgtgctcttttcagcagccttagccacttctctagcatcatggatgccttttcacttctctgaataatttcttgagccatttcccggccaccattttcccagatgtcggtgaaaaattttccaccgaccaggctcgcttcggccgaggggtcttttatatcttcagaagataaggcggcttcggattgtgccaaggatttcacatggtcacagcctttcctctccaaaatagtggcaatccccctggcacccgaaaaggcacatatgtctccacggctattcaaaacttcttcaaaagcttcagctttgtggctgatccatccaattgggcctttggggtcacccttatgaagttttcctcaattgagaatgcgccaacgctggcgaacgtggttcttattctcttaacacattctatagatttttcatagcatcttttcctagatgcatgaagctcttcaacgcttttttccaaatggttcaccattgttcactaatttcccgttttgtttcttcaagtgtgcgttcctctttagctctggctagttgttttcggagatcttcaatttcatgcctctgagcctcagcttgaactttaaaagtagcttcgtcttcttttattctatttatcaatgaatgcaatattttatctttttcgagaccttcgttccttagttcaattacttcggaacgaaggttgctcagggccataacacatccttcatcctcggcatctttttggccctgagggcattactaagtataaggccctgcaaaggaaaatgtgtgtgcgtcaacaaacttaagcaaacgaaaaattttggtttcaagaaaaaaatacaaaaact

SEQ ID NO: 34392 - DNA, 624 bp, Arabidopsis thaliana landsberg
tgcgccgcaaataagggcttctgagtctccgtgcatcgcagaagtccaaacttctgctcaataacctggatccattcgtcaacttcgaggggatcttcggccttgacgaatagtgggggacgagtttccgagaaatccaaatatgaagtttcgcgaggtccttgcggataagctctcccgccttgctgctgctgttgctgtcccgccatttcgcgaaggaagcaggtgttgtcagcggtcgcggtgaccaaggcggagatagcctcggccagcgtgggcggtacaggtggtggatttggtgcatcatcttggccacgggaagtactcgtgccgtcatgtgaacgagtccttgatggcatctgaggtaaagaaatatttgggaaacatataacatgctgatacataccatcattttccattaccaagatgtaatgatacagactcaaatgtacaacatgacttcattatgtattttacataagtatagtttctaaactatactagtctagtcttcattatctttttttcgttcgctgtctactgtaggagaccgctcatcagctgttgtccccgacggtccggctcccattccaacaggatcagcgggcacgtccggtgtagggg

SEQ ID NO: 34393 - DNA, 4778 bp, Arabidopsis thaliana landsberg
tagaggtgatgctgtgcgtgttttcttctattctctagccttgtgtataaattgtcttccttagagcatgaaataaaataattttattccaaacactaaaataattacttgctctaaataaaataccagaagttcatcaacatgtcaagttcatgtgtgccttgtattagggatattgtcctacatctgaagttgagtagaatcttagtatataaagggttagggtcactccacgtattgccaattggttttaagttggaaccccacagtctaatatcttgctgatagagatagaggaactccgttctggtatatgttagagatatgagtctctttgttgattatcttttcggaactagataggatatagtttttcttataacttaaattatgatattatagagaatctgttctacaagcttttcaaaagtgaaaagtccagagaaaataacagaggaaaaagtctggaaatttcaagaacaatagaatgcatgaacgaagtcacgctcaagtagaaggagggacagggagaaaacacacgagcaaccttgagcttcatattggagagactagggaagcgtttaaggttctttgttgcaaggttgaacacacatgctctagtggactataacctcggagtaccacatcatatatgttttgtaacctctaggagactccaaaaagtagtggaatgtaagtgtagtgatcatcacctttcttgcaaaaccatacacgactggcaggtgcgtcaaagaaccaaataacaatgtagtcttgtgttttcttctctacccacaaaagatgatgcagacataaaccttacttcacaaaccgctgaactacaacctgtaccacatcatgttctacatcctgtagcagaagtcctggagggtaccatgacacgttcaaaggctaaacaactgaagaaaatgttcaacttagttgtgcaagatattttgagctccctacagctatgagtaaactggtccgtagcaccccataccagatatgatctaatacccgaagaagagcttgctgaagcattcacccaaatgagtcttgaacgaactactcccccaggtatgaaatatcgtttgacaggttcaaggacccctagaaaccaagagaagactttggagctttaagagacggacgattagagtgtcacagttgaaagtgattgagagagtcaagatcaagaacaagacatcaaggacatagaacagctcgaagacattgataaagctactcaggaggaaccccagaaagacctctacttcaaggaacaagccagaaaacaagcacaagacttgatgccagaagtacctcaagaagtactacaagaagtgactcagacgacagctattgggcctaaaacgcattttggtaaggtttatttagtttatactatctttgcagatccacacagcccagataatggctagaccatcaccaaccgtgctccttaagagaacttaattagtttccttatttagcttattttctttctaaaaacaatggtttttgtgttttgattttatttgtttccttgttgcgttgttacatttaatttcggcccgaaggctagctgaagaactcttataaagtccccctacagcagttgtacgagttttacctttgattatcaataaagaaccgcattttctcacttcttctctttaagtgttcttaagagaataagcttgttctttgtcttctgtgtgcgattcaccaagaccaagttcatgtactgtatcagagacttatcacatctctgtggtgtacttcaatccgccagcacttcccctccattagatcccacacgagagaagcgatcgccatcgtgttagatctccatcatcaaccatctttccttcacaagagagaagcgaccgccagcttgtgaagccaccatctctatcagatataaagctcaccaccgagtcttgtatcatcttggtatcagagcgcagttgcgcttccttgccaggtttcatcgtttcttttagtctgccttactttctgaattagtttctgcattactctagtttctgttttatttaaattaaaagaaaaacaaaaaaaatcaaattcagtttatttcgtgttaagtatttgtttttgagtttcgtaatatcaatcaaaaaaataaaatattattgttaactttgtactacatgagcaagtgtgtcaggaagtgattcaacaagttctagctttcttgtttctgatctttctttttctattgctgtggtatgttgatttctttgttgtgtttttgtctaagcacaggtcagttttaggcatatactatggcagaggcaacagaaattccccaaaacgccgtaatgcaaatgatggctactttgacggaggagttaaggggattaaggcaacggctaggccgcttgaagcagccccatcccagggttgaattggggcatgaccaggctcgtaggaatgcccgcgaggaggcggaggagtttcctgacttggatgatgaagatgatccaccacccgaccccattgagacgccaacaccaacggagagaagatccattgatgagaaaccgtgcacgaggagcagaactgcgtgaacagaaccaagatatcaaactaacatgatgtgagaatcaataccaacattgatcttactggaactgacaaacttgctgatggactcgctgaaggacttaccgaaggtttcgctgaaggactccctgaaggacttgctgaagtacttttcgtacaagattattcgatgccaaataaggaaagggacattacccttattaatgatccgtgtaagggaatcaagaagacactccaaactttccataaggttccccacccgagttatgctacaccttacctcacttaagagtcgttgagtcacttctttcctattttggattcgcatgagatcacacctcaacgactctttccttttctaaaagtttgcgtgtataagagcatccaagtaatgttaaagcttccaagaaactgcatcttcctccccaagttttctagatacaaattaaggttccacttgccttatttggccgatcacaccatcaagcctctaacggctctattcctttattgtttgcgatttgtttcctttttttggcatatagccgttgtactaaaacctctatataagctctctttcgatttcatttgtattcaccaatcatattagaaattatctcaataaactttaagtttgttttataaagagttgtctttgtgttttgtcatttcaagttgagtgtggattcacttctcttgtgtgattttcgggcttaataacttttggattcaagttgttaaaaccgtgtgttgattgtggattcattcaacaaaccctccatctaccatctctatcatcattcatcaaccatcaaagcttcggacctttgcttccgttgataagatcattgggtggattcttgcgtttgcatcactcttcatcaaaattactttttgttattataaacaacttatagttatcatatcacttatgtttttcttcttcaaactaagaaactctaaaccccaaattcatgtgaggatattgaattttaaaaacattagacaacgattatggtaagttgtcataatgattttttaaacacttttactttctttctttatttaactgacaaatgttaactcttctgtaactttcgttagtatttcgatagtgttctgtatcttttaaagctgtacaaacaaaaaatttaatttggagagagtgttagtatatataatttggaggtttatatagtgctagtgtaaatatatatctagaggtttagagtgatacacaatgtcagtttgaaggtttaaaatatgattttccctagctttatattaataatacaagtaacgataatgattatgattaaataaaatcagaattagagcaatatataacatcttatgtaaggcccttgcctttattaattataagtccaagcaacaatagctctaaaaaacataccgacatgcaacaacattaatattgtttaactaaggcccttgccttagaaatttattgtaatgagtttaaaaccaacgaaaagcatgaaaaagtacgactctccttagagaatcaaacggagaatactcttctcacttatttcaagatttaaaaaaagaaaaaaacaccaaaagagtttagattttcgaactggtaacttaatcaaactctcactgaccatcattcgcagttaagcatggccttgatcctttgaacggcggagctaaccaaggtattgactgtggtggcagaatctttcaggttaagatctgtatagtaactcggaccggtgacaaagattctgaaaagccaaagtgaggagtgtcatgctgccaccatcaacctcgctagaggaaggacggctgtcacgagagatgatgaaaccggaagggagaattggaatggtggaaggatcgacttggccagaaatggcggagtatgctgtgtttagattcattggagcgtataccaccatacctcctaatgcatctatgaagccatcttgtagtatcatcaacttatattcccctacacttgacggctacataatgtataacaatagtcatagttaaagcaatgccattatgccaaggaaattgaatttgtaatgtgaattacttcttaattattcaagatttatgccgatcctatttaatctattctaacgtacttcccgcccacaaaaatataaagcaaaactgaaaaaacaagacccgttgcatggatttttaga

SEQ ID NO: 34394 - DNA, 3321 bp, Arabidopsis thaliana landsberg
  unsure (1)..(3321): unsure at all n locations
cgacaaagtaaagaagcaaagattaaaaggttcattgtgggatgaaggaactaacccgagatgaatgatgggcatggagtaggaatcgctcgcggattgcaggacgccacctatcgaaagttggaaggatggtgtcttttcgggttttgaaacatcgaaagacgttcccctacgtttccatcgctgttttaaaaaaaaaggggtcagaccggtcgaacgacgctgagtcaataagccgaaatggcaaaaaatgtgataacaaaaaaaaatgggaagaaatttctaacccgtgagcgacttggactgaggaaccaaaatagctttagctccgacatcttggacctcagtttcatcccgccaagggatagtactttgctccgccttttcccctcctgatccggacgagggagatacggcgacgggaggaggaggacccatagatcggggtggcgacgacggtcgaggagagcggtcagttcgggccctcgtcttgtctcttttgggggaggagctgatgcgggatggtctatctctcttcttccgaattagatcggcgattggctcgctgctgagtccagatcaggaagtgggtcgaggtgagtcgcggcgaggtgatcgctccttgtgggatgatcggctgctatgaccttcacggtgaggagtgggtctgtaagcaacggcagaccttgccccttcggtactgccatcgtcgactaacagggttctgctgtattccttcttggcgactgtggattggaggaatgatatgttcacctcgcaagcctccacaatcgacttggacatcgtcttgcgacgagctgcgatggttcgagcagaagtccctttaggtaaaggagggggcagtggcagctggaggagatgtccaggggggctcatcctcagcttgtggttggcttctatgaaccggtcaagagtgaaggagttccaaagggtttccccttcgatgacgatcttgaagaattcgccgaactcagcagtaggaagggtaggtgcaataaaagctgcgaagtggaaaatagaaactggtcagataaggcaagaagtaaatgaagctcatatgcatgaactaataactaccgcgctaagtggtccactgcgtggggagcaagtccgggaagttcccgatcgaggcagggctctttttaactaggaaccacgggtgatgccagttctagtctttattcggaaggtgcgagatgagatttctattggcgttcagataagtcgagaagtacccgactttcttcgaagcactcctcacactgagaagttcgttcagtttgggaaccccgatgacgtatccggcctcagccgcaataatgataattcctagaatagtccggagaggttgggggttagctggggtaaggcgatttcgagggccgataggtaacgcacgagggcttcggggagaggaaaagtcaagccacaccctttgaagtaaatctcgtacacgcaaaagaacccaggtcggtgctcctccggtgattcggtaggctccgacatctggaaatccctcattacttcggctggaatccgttagagctctcccaatcgattaagagattggagagtgcatgtggattgatagtggggaccggcgatgtcattcggccggatgcagaggtcattactagagccggcgtcgtcaaaagagggggattcaggtctttcaattttggaattcattgtgtagagagtaggaagattgaaggttcagggaagaaaagaactttgctttgagagagaagcataaaaaataaaatgacaagcgagccagtgatgatgacagaaccgccttgggagtcgtgggggaagtggaagagttttcccgctttaatagtaaataaacaatatacggtcnnnnnnnnnnnnnnnnnnnnnnnngtaattatggaaaatttcgagatcaatgcaatcgcgtaatttgggcgggaaatcaaaagtatcatttggcgcaatctttgcccttatagcattaaagccttccgaactggggtaacacttcgaaagacttggggggctaattgttggtgtcggatcccgcaccatgggctcgggaccggtcaaagattgccacgtaagtgggagaggcccaaaagatgaaaggcctatgggcttccttgagtaagagtataagtggggtgattgatccgcgaggtgagtgaacatcgaggtcaaaagttgctcggattggagagtcaagtgggctggaagatgaagcccaaaaagttcggagtctattcaaattcgaacgtttgaatagttaattcgaagactgaaacggatacatttaagagagaataattgcgtgtaaatgagaattaaatgtattctttgaatataaattatgggtcaaagaccatgtaaagacacacacatttttgtgcaaactttactatacacatttttttacaaaactcatagttttctctaaaatcatcaatctattttctagtacatttgtcctcaagcataatccttctcactaaataaataaatacttgagtgtgtgaatccgacatccacagagactatatcctattgaccagttgtagatttccaagtcgccaatgttgaccgatattttctcatcttctatattttgtttagttgatttatcttctcgatggtttatgtgatttgagttttcaatgaggataatctttcattacctacttttgtggtcgaagatggtcaaagattacttgagaagtttaaattttgaatgcataggtattatagatgcatatttagattatatatccttgataccgataggtttaacttgatgttgttagacaacaacattctagcagcaagccgttatatttacgaaagaatcgatcatacaactattgatatttaaaacgaatattgtcaagaattagaaaattatataagatttggaaagattcaaaatttattttatgagaaagcaaactctttgtctttgtgttaaatgtgaaaatagaaaaatattttctttgaagaacttgatgaatcacttatataaataaggattgatggttaactattcggtttgggttcctcatggcgaagattataatatggcaaacaatcatttttcttatgaagatatttttatgctcaagtcttatatggagacagtgactccttaaataacaaatattttagatgttgataatccatagccaagatttggttcaaatatagaaaaaagtataattctgaagaaaaatatttattatattatgaatgccgcaaaaaaaatccaatttgtgatagatataaagaagatctcttgcaactatccgg

SEQ ID NO: 34395 - DNA, 417 bp, Arabidopsis thaliana landsberg
cttaatataataactaatcaagaaaataaaaaatacatgatcgttttttggcaaatgcagcaatgtgatggaagagtatcagaaggcaatggatgatttaagtcatagactaataagcatgttgatgggctcgttagggctaacacatgaagatttgggatggcttggaccagacataactggttcaggaactgactcgatccaatcctttctgcagttgaactcgtaaccggtttgcactgaccctcatctagctatgggtttagcccctcacacagagtcctccctacttaccattctctaccaaggcaatattccaggttagaaatattattagaatatatataccatgctatcaatcattgtctgtcgattaatcaatagtttttcacaaccacacattaatacttataaaga

SEQ ID NO: 34396 - DNA, 1315 bp, Arabidopsis thaliana landsberg
tctgccaagtcctatctcctctcttaatccttcctttagcttcactatacgcaagctcataccaaagtgagctactcgaagtgttaccaaaccggttcaacgtcatcctcgatggctccatgtgccattcggataaatccaagttcttctcaatctcgtcaagcacggctctacctcccgcgtggatgcagaaatgctcgaaagctagcttgaaatcaggaatgtatggctttatctttttcactttgaagacttttcgggccacgagagtcgcgaaaaagagaagttgttcggacattggtaggactagtggtccgagagttgtgatgtttgtcttgagagcttctccggctattgccataaggtttttagagagcgagactccgattttaccggtttcttctgcgttgttgtcttctcgttggtaaacgcagccgaatgcgttgtcatcagctcctttgtgggtacggacggtatggatgagctgatattttgaacggctgcgatcagaggagcggttcgagagaagtaccgcggctccgcccatacggaagatacagttagatagaagcattgatcggtcgttgcctaagtaccagtttagggttatgttttccgtgcttaccacgacagcgtaagaattagggtttgctttgaggagattgttagcgagatcgattgagattaatccggcggagcaacccattcctccgaggttgtaacttttgatgtcttctctcatcttgtaatggttcacgatcatcgctgatagagacggcgtcggattgaataagctgcagtttactatcaagattccgacttcggccggtttaattccggttttctcgaagagggaatctaaggctccaaacataacggcttcagcttcggcacgtgcctctgacatatttagcttcgggggcgttgaagttatgccacgtggcagatacgtctcgtctcccaaaccggcccggttcgagattctttgctggaactgaaccgtgtcatcggtgaatgatccattttcctcagtcatcgtcaagaacgaatctactgatattttacgctcgtcttccggtttgtagcaggagaaatccactaggtaaaccggtttagaccggttagccacgtagagggtcaaaacgaaggagaggaaaaccaagcaggtaagtctcgtcgccgtgtcgagttgaaccgcctggttagaccaaagctcagagaacgtatcgaacgttagaccggttagctgaaccagcacggaaacggttaaaggaagaataattaagaaggagagcatggtggtcgtgttgcgggt

SEQ ID NO: 34397 - DNA, 625 bp, Arabidopsis thaliana landsberg
tcaataaaatgttcttgtaggaaaatattataagtcaaaaaagaaaagaagaaaggagaaaacaaaaactagttgaacttttgaagtaccttcatttgtttccaatattctccgtaaggggcaaaagccacatctctgccacctctcaaaattttatcaatcacttttgtttttgggcggttggcacaaataacatcgtacgtcttcaagatgtcatgagcaacgtcggctgaggagactataaggactggtgtgcggccgaaatgaaggagcatgagtggtccatatcggagacttagggaacggagagaacggtgagtattgaggctgagctggtggaggtttccgatcacgggaagtcgccatggagatggtggtaggttaagattgttcgtggtggttcttttgaggatggatttaaggagaagaagtgcaaggagcgttgttaagcacaaagtgactaatattatttccatgtctaattcaatctctcatgttaagtatttagtgaatatatatgtgatcttgatttgtaacttataagatttatgatcctaccttctatttttgtatgcttatgagcaaaccgtcttttacacgtgcgagtagaccgtcttttgtttgt

SEQ ID NO: 34398 - DNA, 814 bp, Arabidopsis thaliana landsberg
tctgcgatgtcgtgagtcgccatcaatcatccatagctcccgggataccgacctcagcatggctgcgctatgtcccggaaaagacgagtgttctctcgccatttacctctccggctttcaacaagttgtacgtactatctacaaattaaaccctcttttacattatttgtgtttcaaaaaacagataataagcgactgtttttttgttctatgtgaaattcaacttattttcataactaaccgttcccatgtcagtagtttatctattttctaaattttaccaaattaccatgtaaaaaataatttcatgtttttttttttttgaaagatatagataaatatttaatcaatggttattagatcacgggagtgggatcattgattatgatgccattggtgggaagcttgtcagacaagcatgggagaaaatgtttgcttactcttccaatgacactcaacattttacctcttggtatggtccctactttgaatcattttataagctttttattccacgtctaatattccttgcttgaaagcaaaagcatcctataatgtttcacatactttaatttgcttttaaaagttaaggaaaattgcaaaaagttatttgaatatgttgaaaatagtttttacttttgaattattaaaaattatggttcgaagtcaggtagatttgtttttttaataaataaagtcaattgtttaattacaatcacagtatttacaaaattgtttcaaaagttatcatcttgcgctgtccacatgagagtaggaatctaatgtcatatcttaacgtttcattttgaaatat

SEQ ID NO: 34399 - DNA, 1028 bp, Arabidopsis thaliana landsberg
taaggagaaaaccaaatatttgtgggcagaaagctttttgagcaggcaaaacagatggcaggagagcgtgccaaataaattgtggcgagcccctatttataaacccattatgtcggagagctggagggtcccatttgccaatgactgttgctattctagcaagaggaaggtgttttttcggaccttcggctcatagccttcgtccatttcgcaatctgaatttatcattctaacaaattaatattgcgaggggctactgttgggggccttcggcttccgaaggtcctcaaaaacatgatttaacaatgtttctggagtaaagtacattaacaggtatcttcggactcggatcagagccacagtatgaagaagcataaggaacacgaaggttggcgcagaccgaagctgtgtgtagaagagcttcgggataacggcggaaaaggaaactgacttaaagatgaaaaaccagattagaccttgaagaactactatagagttattgataaacgtaaaggacataaatgtaattttgaccgggctgcatcccgtgcctataaataggtgaacagtacccccgtactgttcacactgacttgtattcgctcgtgcgtcacatttgtactctttatcttccttcaagccgaaggtatacttgtaataagttattatttctatttattcatagtaatgaaatagaaataattcaataataacaacatatttaattgttcatactgttcactatacttcatataatttcctcctcatttttatatgttgaacttacgaaggtatgttcttcgtaaccttcgtccgagagttgttatatcctgagggaaataatgctccgaaggacgaaggactttgacgtttaacattttttgtgttgccttgctcttaagccgaagcatttgagagcaagtgaccaacattggcgcccactccggtgaaccctttttgaccacctttggcaagcatcgaccttcgtcatgccgccaaagaaagcttcagcaacaggggtgctttgc

SEQ ID NO: 34400 - DNA, 559 bp, Arabidopsis thaliana landsberg
tatcgacgcactcttcacaccataaactacattttaacttaatccttactaccgaacgacgcatctcctttatttttctcatcaccccacatacaaatacatcatcaactaaatcaaatgagtaaaatacacatcaaacaacctggccgatcggatttgagttgtgcatgtgctgtccatggacttgggattttcgtcgaacacgcgatgcccgaagcacgacatcaacaacgagcggagtttgtgacgtcgcgcaggggctgtgcagatcgagttggagctcgctgcagtatttcatcgaacacgtcgagggcgcgacacgaaggagtgtcgtggctgctactgctccatggactagggcgagagaagcaccagggagtcgcacgatgtataggaagcagcatcccggcgccctgaggaaaccagcgaggcgaggttgcaggggcgagccccatgtcgacgccatggagaacgagaagagtggctcgtgagagagatgggacagtagggatggcaattttacctgcgggttcggatatccacagatatccgacctgtc

SEQ ID NO: 34401 - DNA, 1790 bp, Arabidopsis thaliana landsberg
tacataaagtgattaaccgaatcaaagatttattttgatgtttcttactcttggattgcagtaatgaaaaagacaaaggaaaatgccattctcccaaagaaggcaatggctggcattgactttgttaaggttgtgcagaacatgctcttgaccttgctaattgacatcttcatgttgtgatcttaatgtcaatgttttctataatattaaaaaagattcagatttagatcagagtctgaatacgtcttgtagaagaaaatcaaatcataacagagaaatctagggtttacatgatatcaagacatacaaaaaacaagaactcaaaaaatgattttattttcgcagaaattataacagtaacttctttaaaacctatggtgtaatcaaatcatcctatgtaagaactaataatcggaaacaagaatcaagaatcacatgatgatcaatggtgcagaagatacttacttgttccggaagcaaactatgaacgaacgatcaagaaagtgatatgattaaagctttgatgaatctggttgcattagaagtaaataaatagaaagaatatgtcttgagatggataaaaaagaaacatccattgaagaagaagaagtttgatttagtcatttcggtcgtaataaacaaagaccatcatcattcacgcagacccggcttgttcgcaccaattgatttaaacaaaagacttaaacttgggtcattatgaaatgatttaaatgtattttttatcttagagaaggtgagattcatgaattgggtatttaaagtcaacgtttacaaaaaaaaaagaagacaatttggattaagtaataaattaaaataatggtatcaatacagtatacaaaaaaagacaatttgcataacaggtgtgcacagtgcataaacaaatttttttaagaataataatactgtttaataaataatgacattattgattttagtggcgttgacatgatagccattaaccaacgcccatctataatcactacgtgagatggtatcgtctggaataaccaaaaaaaaaaaaaaaaaagtcatcataattaacgaacttaaaatcctgttgagctgccaagtatctatcatatggtcaattgtttaagaaatttcagtggaaaacttttattgagaccgtcttttgttattgaataaattatcaataatagaaagtgtgtttatataagcaagctaatatgtatgaagatatattattaaataataaatactcttttggttcctttttgtttaattttttttttttttaattgttttaaaaaaaataattttttaggttttcaatgcaatacttattagttataattgataaattgtaaacttcaatatataaatgagtaaaattcaataaaattattaaatattattaatttagagttattaaaaattataaattacaaaaaataatatatttaaaaacaatatttaatatgttttttaatatttgtattttttaaaaagaattaaacggaaaaaaaatagaggaagtataattttggtaaaaatagtaatttaaaattaccataaaaaacatcattaatgctcagtatacaaaacagttgaaaatacacatgtgaatccacaaaatcccaactcaaagaaaaattctccaatcaattaactctctcacaaaggacgtatcttctctttacctaccaaaaaaaccaaacccttgatttttagttttttacatcataacaactaaataatgataatagaacaacatgaccaagtccatacttcttctaaacaataaaatc

SEQ ID NO: 34402 - DNA, 613 bp, Arabidopsis thaliana landsberg
tggacgtcattcctaggtgcagagaagttgaaccgccgctcgcgccagtaccatgcctccacggggccgccacagaagacaaagaaggtgaattttcaaaaccaatgcagcggtattgaggcacccgcgcgtggcccggctaaaccatcaagtgcgagggtcacgggttcagccgcggggacagacgtggcagttggcgtgtctgaaggcgagctggcagtaatcatgtcagcaagcgcacgaaagcggcgcgccaatcgccaaccaggctttggcctcacttgcaggctcagatcctcccctgaggtgggcccgggggcacgtgtcggtaccctgaaacatggtacccattactacagcatgaagacgcggtgcccacgcggctatctctagtcgcgttgtgagcagcacccgacccggccacgtggatggttccagggccgccacgtggccagagaagacaatatcctccaaagtatcaacagtgggtccagacccccattggaaagtatcggacccctgtatatatggaccggacctctgggtaaggtctaggaccacacgggcacgaaccggacccctgggatgggtctggagccccgtgtgttgggtg

SEQ ID NO: 34403 - DNA, 2828 bp, Arabidopsis thaliana landsberg
cttataaaccaagaaatccaaaattgggaatgattaaccggattgaaacgcctttaaaccgaagcatctgctttcagaagaactaattatttctttctttacacaattaaaagactcgtgcgtgattcacagcttatctttatgaactaatcccaatttaaaataacaactataatcacgtggtaaagtaggattataaaaaaaaaaaaggctaataaatatacctgggcatcgacttcatcaatctgctgaaccaaatgatcagcctgtgtctccacggccgtagactcatgacggaggctaccgaagggactcaaatacgccgttgaagataactgagaagttgtatagaagacgggacgatgagagtaatcacgttttatgagaattgtcgacaaatttagattatgtctcaagctagaaacaaggtttttggatctagcaaaccagatcgccatgtctgtcaaaaaatggacaaagaagagaagaagagaagaaaatggagaagagtagagaagaagaagagagaagttgtcgtttttaacgatgtttaagggcaaaggattagaaggacgacaagtgcatgtatttccttgtcggacttgacatgtcatccgtatccatctccaacttctttttcttttcttaaaatgattatttatcttcctgtctttttgggatttttagtttttacactaattatagtggccaaatactattgaaaaaaaacaaattaaaatgaaatattgacagaagttgtaacacctacattagcaaatcatttaaagattcttcaacaaccaaaccaaactgtacttgtgctttttattgaattttgatctttatccaacgatagcaacattgtaaagtcacctacttgcgtgtcatttatatctttctttgaattttccatgacgtccgtgaaaaacaaaggaaaaaaaaagtttttttattgataccacgagaaaacatttttccatttatagagtagttgaaagttacacaacaatcaccagaaacgatttgatatatttttagatggtggaattgttatttaaagattcattggtatgtaacatctaacctaacagtaaagctttcttggacctgaacttgtatttgtggcttggactaacatcatatagtagggagttagttagagacctaacttaccactatttcgtatagacatatggttaaatttgtgtgtttcgtatccaaaattgtgggaacagagttactgacttcagattgtcgttgattctgtgaatgcatctcttaacaagtgtgtgtgatatgctttcctttgagcaaattccacattatataatgaacatatcactggtcaccacacaatataattgttcaatttgtgaaacaaaccaattgcctcaaattcttgctcacagctcatttgtaccaaaaaccatgtcaccatccagttccatgccattacatctaattgtaccattgtatcaaacactttttcagtctaacttaatgttcaacacttcatatctgagtcgaaatcaatgacattcatcatagcaaactaaaataattgtgttccaaagtgttcaagttaacctaaaaatgttttatcaccgatttaagtacgcaagagtgtttgaaatttaggattcgatatcttattgaaatggttaaatgggaatattgaattataagaattttaagataaacacatgtctcgccttatattataagataaaaatcatattttgttatttgtgttcaccagaattcatggttccaactgcaaccggtggagtcctcccgcatattccaagacatttgagacactctgcaacaaaggaagtgggtagacagtgcttatggcacaacacttggcactctttgtccgactttgcttcgcctcccatcgtaaataacgccattagtagcatcgtgatccacaccacactcatgatcttcttcatcctcattttgttttctctacttcttgtattttttattttttaaaagtaaatactataggttgtattattgattgattaagatttaagatgtacatgtattatttatactgctcatccatttaaaagcataatgtaaaaatagaaaagagttgacgcgtggaactctatcatttcttggccatattttaatttgtgaaagtttttttcatatttaaactaactaaatgattgatatttagacaaatatattaaaagtggtgatatactaattataaaaaactcatcaatatctaaaaaactttaatgctagattatctattatattttcatttatatgatatgatttttttcctactataatatattcacgtgtccaaaattaatgacacagaaaagaaatcttaaaagtggcatgagtagtggaatttttcttgcaaactcatataaataataccacatcggaactttggtagtttttggtttgtgtatatatatagaaagactagtggattcgattgtgttcgttgaaaggagagatggttggcagtctcctctgacagagacgggatttgaccttcgggtcttttaacacatccggttaaggctctccacattcgggtggatctaaacccaatttttttgggcttttagaggcaatttgtgttctctattgggctaattcgggtttttaactccatctttcctaatacatttctgacattgcttcatttcaaaggattggataatcagaatatctcataaatgtgtgtgtttggtaattgtgaaattaatacaagctattgtaaaacacttaaattacattaaaaaaaattctgctagttgtatgctgatttcaactagaattttcct

SEQ ID NO: 34404 - DNA, 3305 bp, Arabidopsis thaliana landsberg
agtaccaagtcaaaaggtagaaaagcgcaattctgatttttgtaaaacaattttttattttttcttctcaacttttatgctgtaaaatctacattagataacattgtacttgcttttgttttaaatttcgtattttgcttcgcgccaacactatgctagacttcaatcacaactactaaatcatgtagaagcatcgagtttttgaaccgattcggactaatcatcgatctaaactaagggacaattttgtactggaggatgaaaaagtttactaaagatgtaaaagttgcacaacattattgcacaacatgtcggctcattgaccagaagttggatggcctctacagaacaattatataaggcactctgactcacttatttaaagagagtggaaacaaaaaacggaataatatccaatagcaaaaacaaataagagaaaataagagaaggtcttcgatttgcatctcccggattatgggtttggaatttggtatacctaaaactaacttagtttagcatatccattaaaaactatatcaatgaagtagcaaatttgttgcaatttactttcgaatagttaaaaactaaatttattcacttgttatgaaataacaaagattaatgacaagttttcacattttttctcatcgtcaagttatagccaaatgacaataattttttttattaaaattaaatgaattcttaataggtgtacaaaacccttgacttcaaatagaaataaaatgaagagagcatatacgttttatcatgactacatcttcatagccatttttctctaccaaaaaaggtagaagctaattaattagtaaataatacatagagattttttggtttaataataccaaataatttcttgtatttttcaacagataatggctgatggagattggatttgcataattaaattttataaaatggtagtcttgaaagaaacgttgaaccaaagcaagatgaagatgaaccaaaattagtcttgaaactaacgttgacaagaatttaccataccacatataacgaggagtcgtggtgtttggttaaatagtaaatgaccgggaggagaaaagaatcaccgatcgatcccaaatggttcgccgtcgaacacggacacgtgtcgtaggataagaaccacatggttgtgctaaagaccaacgcagcgagtcaaatgattgcatccattttgaactttcccaaattgtcattagccatcaccacacgtggacgacaggacgactcgtcttctaatgctttacctgcacctcgtcgtacagtaacatttccccaattcgtctttaagtttttgtttattttgttatacatataagcgtattgaagccattaggtgctttaatgcttcgttagctgcactttccatttctgttattcagttctcaacctctatattttggtgcttatatcacaggaaaatcaaacaaattattattattatttttagtacaattttatctaatttattgatacatgtactagtttttttttgttttgttatttaatcacaaattattttcaaattgtttgatcttttatggagaattaaatatagtgatgcctcatttgtaaatttttaaccactcgaacctactcccaccacaacaaatacgacattttcccaatgatcaaaactcaaaaggttaagctgaagtgaacagtaagataactataataatcagcatactaattgtttcttttttttttgacccaatcaacataacacttctattttcaaattatatctttgtcagttcggaaaaatagtaaatccaatgcaaagttgcaaacccaaagacaaagcaaaatatattccgacaaaaaaatacatacaaattaaatgtatacatgtatgtaataacatatataaagtcacaggcacaaacaagaagcagaattagctggccactcgttattattcgttttctcttaaatacttaattctttttttttcccaaacagtttctctgaaactaagaaactctaacagagaatccggatgcttttctctgattcttctactctttcctaatttaccgattttctcgggaatccaaaatcccgtttctctttttctcgagttaaaaaactttcgatctgaagtcaattcagattcttcttggaagctcaaagaagaagaagagagaagagagagactactgatttgggtttagttcgttggatcagaaaggtctctgctttgatctttgtagtacacgtggcgaaaagggtcggaatttggagttgtgttgatgatgttccaagtctcagatttcttgtaataacattctcttgtctttctccaatgtctttgtcttgattctcagaaaaagatcttcagatccgtttacttgaggggaaagagacgaatagttttttgttagctaaaaaaaattatgatgaagatgatgagaaacaaaccgacaaatcttccgacgacggcgatgactaatggcggtagaggttccggcggcggtggtggtggcggcggcagggagtcaggcggtcgtgatttggaaattagacctggtggtatgttggttcagaaacgtaacccggatttggatcctgtcggacctccaccaccaccgatgatcagagttagaatcaagtacggtgccgtctaccatgagatcaatattagtcctcaagcttcttttggttagtagtagtctctgttttattgtaacaatctatggaatttgggacttggaaaggaattagagattttatgatctttgaattgatgcaggggagctaaagaagatgttgactggaccaacgggtatacatcatcaagatcagaagctaatgtataaagataaagagagggattcgaaggcgttcctcgatgtttcgggagttaaagataaatctaagatggtgcttatagaagacccgattagtcaagagaaacggtttttggagatgaggaagattgctaaaaccgaaaaggcgtcgaaagcgatatccgatattagccttgaagttgataggctcggcggacgagtaataccctgcccgccaagccattactttcttaggtttgttttgatgaaaatgcggggatcttatgtgtgtttttgtgtgtgtaggtttcggcttttgagatggtaactaagaaaggagggaagattgcggagaaagatcttgttacggttattgaattgttgatgaatgagttgattaagttggatgcgattgtggctgaaggacgatgtcaagttacaaagaaagatgcaggtatgtaatcagaatcatctcaagactgacaaatt

SEQ ID NO: 34405 - DNA, 3202 bp, Arabidopsis thaliana landsberg
  unsure (1)..(3202): unsure at all n locations
ctaaacaatttcaaagttcttaaaatttaatcagattttagccagtgttggatatataaagtgagaaagtacattaggcagggcaagtaaccagaaaatacttagtatatgaagataaaatcgtgatggcaaaagagatttgcaaagtgatcagattttaccaccaagaaaattcacaactcacaagaccaagggagatggcggccggatatgccaaattggaaggtctgttactggatcctgaatcaaataagtaaatcaggtgacagttcacactatcatttttcacaataaaatgtacatttctaggtctctatgtttagaaaatacatactgcaaaagggtaacaactaaggttgagttcctcgtatcgccatgatccccactcttcagtaaaaagaggccacatccaatgagttacatcactccagctaacctgcaaaacacacagaaaaacgaaaatttcaggagaaaataataccaattgcacgtttgtatcacaatcatatggaataccttgcctatgggggcttctttcaagtacttgtataaatctggtagctcctttctaaactgtctttcaaagcctgatggtggactgttcaaaagaagaatttcaagtgatcaacttccattttccaggatgtgacactcgtacttgtaagctacaaagttacctatacggaacaacataaggagcagccaccacacaacggatctggaaaacttctgctaggctccatccttcctaaatgtacaatcagaagatccacagttattgacactcatcaaatctattgtcattgatagagataaagcagacacaatcaatcaatcttggtacaaaggagagtatattaagcagatgtaccaatgcaaagaaatttatgacaacgaaatcaccctccatacaaggatcctttccgaaaatggttctgaatgcagaatgacactcttgtctgtgttccctttttatcctttctttttcctccaaaaacattttcctcagcgagtctgattgaaaccagaatagatgaatagtcaaaagctagctaagtaagaagaaaaccagaattggaagaagaaattaacatcagagtattgacctgtgacgttttgagtaccctgaggttcattagacagagcaggaggagaattgataggaaaatatgaaacttttgctttactcaaatgggagcttaggttctgcaacaaatcaacatctatatctttgagaacgtagtttctgcaagtcgagaactttaagagaagaagaagaagaaaacccaacctcatgagccaaatgtgacatcaaaaccacagtgtagtgttgttgaacacgagcgaaagctgcggcaatggccctgcaaagagtgcagcaccttctttggttttgttttctaagaggtcccacaattcgatacagagtctgagagtagagagggagattacagagagagggtagacatcgcctttggtaccgaaagccatgaagagagcgatagctttccttctctccggttcctcctccattgtgttgctcaatgctccgatgaagcgacagagactgttcaccgtagcgatcaccagtaaagtgcgtttgtaacatttaaggtatcgttgaaaaacattagaatcgcgtttaaaacacggtcgcgtctcaccatttagtaaaagctactcaaaccggttagagtttagactacaatgaataaaaactcaaactttgtgttttggcaattctgatctgcaaaaaaaaaaagttttgttttgtaaaagtgtatacttgaaacactgttatcaatttaagatcgatgtccttggttctaggaactcgttggattcatcatgtgacaatccatcttataatgtatgaacgatcacttcacaacaaaccaaaagaaaaaaaaagtctcatagctctatagaaaaccatcatttttgtttgatacaacaactcagctgtagaatatacagatctcttgttaatctttcttgaaactgtcacatgtgttttccgagagattactttggcatgtgaagaacacaacgcagacactttccttctctcataagatcaaaagcttcgttgatttcatcaaatgacaggttatgcgtaacaaattcatcgatcatgatctcctgcgccacggaagagtgaaaacgtaaacaaactattcatagactagaagtgattttgcttaatgtagctgcacacgtatataccttgttcatgtacttgtcaatgagtgaaggaagatcagatttaggcttccaaccaccaaaaagagtcccttttaaagatttcccagaaaggaaaagtccgtaatgagctgaaacttcaggcttagctttcggtacacctagagtaaccgtcattccccatccctgagatattcacattgaaaaagtttttaaaaggcatttctatacaatacagtgaagcaaaatgcaaacaagttgagagagcaaatagaacataaaatcttacatccgagcacgattgtaaagcagttgtagctattcctgtatcaccaacacattcaaatgagaaatctgcacctcctcctgtcattcttttgatcacctaaaatcccaatggttcaaacttatacatcagcaattactacaatgtaaccaacatgggaacaccattttatcgaaaacaccggcttttgttatcctattataagtacataggaagatactgtaattacctggggtataggttcagagaggtcatttgaattgatgaaatccgtgacaccaaatgtctttgctgtaacaaataagaaacactcaaaaccagtccagaaccgcgttatatcttactgccatgatataccttgttcagccttagnnnnnnnnnnnnnnnnnnnnnnnnnnnnngctgctcctctaagtttggcaccttgagcaacctactcataggagattaatcccacatcagactccattaaaacagaatcatcaaaacttctgtatctatacttacagaaagaccgacagttccaagaccaaatatcacaacacttgaacctttttgtacatcagcaacattccatgctgcaccaagacctaaatttacacccaagattctcagtactgactatagataattgttggcatttcatcactttaaaaacattattttttaactacctgcagctactccacagcttagaagacaaattttatgcag

SEQ ID NO: 34406 - DNA, 1030 bp, Arabidopsis thaliana landsberg
taatacagcagtgtgaataataatttcttttaagacccttcaacatgaaaacacacaattcttaccatattttcttattattttgatttccacccacatctagaaatactattaatgtgctaattacaaattttttgggattagatctggtgtaggtaaaatgaatgctgatttggctatgattattaattctgatgaggttcagattgtggttagaccgattgagaaagatgcgaagagtgctgtgttgaagaagaatcctcttaagaatgtgatgttgaagcttaacccttatgcgaagactgcgaggaggatgtctttgctggctgcagctgagagagttaagtcgaaaaaggagaagcttgagaggaagaggaacccatcgcaaaggtagtaacttttctcctcttctattagagatttataattccctgctgcttattggtttatgtattcgattcgaagatgttgagtctgaacattctctctgtttccttagtgaacttagaatctctggtgtatattatctggcttgtttgatcaaccttcttgttgttgtcttctaggaggtgacaatgaagatcaaagcagcatgaaaagcgtggtaccagactatgatatcagacagtgactttactgagtttgacaacttcaccaagtggctcggtgtggaacagtaattatccgcaaccttagatcaagttttagatcattttatttctttccttgcttttatcagtcccggatccttttttttttcctctcgtaattgcgttttaccatgataaaatgtcatgttaaatcgattaattttgccagtgaattagattctttctaacacaactctcccattttataaaatcttattactttagtagaactgcacaggtcatattttttcatacaatacaagtaaatttaaagataacattttttttatctttgaatcaagttgtccacagaatcttactatattttagttctaaacgacgtgcttagatattcgtggaatatatgcaaaaatttattt

SEQ ID NO: 34407 - DNA, 659 bp, Arabidopsis thaliana landsberg
agatgatccctcgcacttctacccacaccacatgcggccacgtcgcctgcgccacgcacggccccatcgaccccgcctgcgccacacacggccccgacgaccccgcccacgccacgcgcggccctggcgactccggccccgtcgacgagcggcgctcgcttcgctaacctcgtcctcgtctaccatcgtcgcaggagcgctcctctctcggcacccacggacctagggccctcaacgagcgcgacctgattcgccaaccccgccatcgtctatcatcgccgcaagtcgaccacgcccgcggccttcgccgtcctggcgcctcgctctgagccgcctgtgttccacccggtcggcattcactgcaaccccgagcatattcacctgatggtgactcgacgcgtcgcaggtgtcctttggcccgtcgatcgactgattctggccgctgatacgaccgctactccaccggacgtctccctggtcccctcctccgttcgcatcgccctcgctgacccacactggtgttgggctatggagtactgcgccctgctggccaaccacacctgggacctagtgacgtgtcctccaagcactaacgtcgacaagtggctctttggccacaagctgccttcagatggctccctcgattgctacaaggcccg

SEQ ID NO: 34408 - DNA, 703 bp, Arabidopsis thaliana landsberg
tcaaatccggtatagatgtgtatatcgattgcgcccttcacacactaatttgcattttcacttagacatcacatgaacactacaaatttttacccacggtcataaccatacacatttagactacaacacgaaatttattgtgattacgtgcttaacccaagctatctaacaattcggctaactatagtgacgacatagccgctatataacatacacgtcggcttgtctattgttatcgctatctaaggcacaacatacaccacaagatttttataaacatacatattcacatgtatattcacacatctaccaaatcatacgaaccgtatatttcaatatttatcctaagacaactaactccattacacacatgtatctactttacttacttgaagcgtctactcgaaattgtgagcacaatcatacactatacgcgacgcataatttaacgaacacataatacgcatcgttacgactcgacttataaacatagggaagcgatgactactttggcatgtcaccacctcacctcacacgcaaaatcattcttaattggactgaccaatttgaacgattgtccttccaattattaacatataccacctttctaagttatttgcatgacaacatagcataggttaaatctatttatctcggaaggttgtacacagttccacataactcccatttaggcctactaata

SEQ ID NO: 34409 - DNA, 1371 bp, Arabidopsis thaliana landsberg
acacaatcccgcatccaagcaacgacaccgacggtttgttagctgtccagccataccaatcaaaaccgcaaaccaagtgagagagtcccaagctgatttgtcactgagacaatcgtcccagtttatgactcccaacagcagaagtgttgatagacctatcatcgcggacacaacacttgctattcctattgcctctctgcaaggagatacgaaaaataaagttcataatatggttaacgttgattttgaaaacttttttagtgagttttatgtagttatagacttatgtatcaatacgtctagttttagacactaaatagttttatgcgatttctcttgtatgatactaatgatgctttgttcaaattctgcaagaaaccgtacccgaaaacccaaagagagacggtgaaagccatagcgccgagcatgatccattcgtttttcgtgatgggacctaatcgttcgagcttcttagcagctgcagccggagcttctggtgtgtgtttcaactcaggagggtaaagcttgtagataatgagaggagtacaaagaagagacacaaacgcaggaacactagcgactttaaaccaagtgatccatggattcgagattacaacaccaacttctcttgctagtttgagacatagcaagttttgtgcagctgatgtgagtagaatcgcaccagaagctcctgaacactgtcacagacaaaacataaacccttcaagatacaatttctcattccaaacatttaatgcttaatgaacatagttgatgttatttccaaagaccaagctatagttactgattagagtctttgagttattacctgcaattgagtttgaatgagaaaagaacccaattttctggaagatgggtctccgggataacttccggcggagatcgccaaagatttaatcaccggcaagaaaacgccaccggctctagccatggtagacggcataatcaaacccataagcgtttcacagaacgcaagaccataagagagaccaagagtgcttttccccagccacttgacgaaataagtagcgattctgtcgccaagaccagttttgatgaatccacgagcgaagaagaaagaaatagcgattaaccaaatgagctcattggtaaaagcggcgaaagcggttgagaaaggaagcgttttggtgacgattgaagcggttaagccaatgaaagcccaagcgcctacagggagaggaccaaggacgagacctgagatggtgaagaggaagattgagagtaattgccatccttgtgaggttacttgttctggtcttgggattaagaatctgactatgaggccgattgagacggagatcgcgagaggaattagcttcgctccttgcg

SEQ ID NO: 34410 - DNA, 2913 bp, Arabidopsis thaliana landsberg
agtctcccctctatagattggggctacaatatagcttgcaattttgtggcccgttgtgcatctcttttaagccaatttatgaggtatttttcccaatcttattttcagcctggccaaggcctgtttctctcaatctattcgcttttaaatatgaatcgacatcgttagcgtggtattactcccaactgatatgattctagttgaagaaatcatctcagattatatccgaaaaacatatattcttaaagaatttcatgttctctatattgggctctttttgtcgatggagagattgactttttaataagtaggtttttaggcctacttatgtgctgaagtactgtgaggttcaattcaattccccttaaacactaacatgtcagtgcagctatagggggtgtcaatccagtccactgttattgctagcaatcaagatgtgtacagaagcaactaagtcaagccagattataatgatggtgggtttctagtaacaatcctaggtcacgattcaaacaggtaaaaataagaacttaagagcccaactcgatcattgggtcgagtagaaccaacaggtgacaatattaagaactaaaatgcaatcaacaggggatacaaataacaggtaaataaaagtgcaatcaacaaaggatacaaataaatctaatagaagttcaaaggatgggttcattgataagggcaactctagggttcatcaggtggctaacaggtgaaaggtagatacccttgacgatagattcaaaaaccgggtcaatccattgtcgtgacagagacctccataactcaaccacttcctaatctcaattctcgttgataaaacatagtagatcagagtttaagcaacaatctaccaaagtcaataagcggtctagccaatctctttgtctagagtctataaatctctcaaattcgtaaatcaggcatccatttgaacttcttttggacgtgggatacccactacaagaaaattgccatttaccgactacagtattagtcactctgtagtcgttaaactcctatttacgacaaataaacgactattaaaattagtcgctaatcgagagtcgctaaataacgtaatcgtattttagtcgcaaaagagcgacaaagttacgactaagtttgggtaatcgcttttttagtgacagtttagtcgttaaatttagcgactattagacgacaaattaacgattaacttgagggttatttagtcgttgtaggcaattagtcgttaaaatttacgactacgttgtcactaaatttagcgactattagacgacaaattaacgattaacttgagggttatttagtcgttgttggtaattagtcattaaaatttacgactacgttgtcactatttttaagactgatttgcgactaaaatagcatttagtcggaaatttttgtgactgagttgttataaataaacgactgcttggttacatttttgatgactaaatttgcgactattgttgttattagaacatctatatgattgttataaagattgaaaccttcctgagaaaacaaaactttacaataagcataaacacaatacaagaagcatgaaaacaaatttattgtcatttcagaaaagtacaaaacccaaattacagaaacatgttcgattcactacaacttagaattttgttcagcataagcacaagcaacacaagtacacatataaaaactttgagccttgatattgagtcttgaggaaggagttaagattcagacctatgaagcagatgaagagggagaggcagctggagaggttgagataggatatgtggttgtctccttagctgaatgagattcgaggaaattgaggaactgaggatcattttcgcgcaaaaacttctccactaaggacaagtgctcaagcttcttcttctgctcatctacagctcgggaattctcagcttcacgccaagcaatctcagattcacgcctttgattgtaagagacctgctcttctatcttgcgttgagcttccagtaattgttcttgcaaagccacaaaagaagttgagtcacatgcttgcttccgcttgccattgacaagagactctttgaggcttcctactccataaggaacgcctctcgaatccctctcagtggactgcaaagtatgataaaagctgagattagagaatgaaaaagacaactcgaaaacactaaattgggaaacataaaacgttacctgaagaaatatggttgtatattcctcagctgtgagctcccgtgcccgcgaagtgccatctgaaacagcagaagcttcagcctcgagctcagactgcctcagctgtaaattcttctgatataactctgcaatcttctctgcctttcgatcaacatacgtcccatcaggttttgtatgtgttttgatgaaaacgtcaccaatactgacagttttgcccaattgctcttcccctaatgaaaaaaaaacaagtcatagaaaagtacattgaaacatcgagttaaagttgcaaaggagtaaacagagagaagacttaccaattcgtcacggatttgatgatatgacttcgaccctgagaagtgtatgtgaggacctagactgttacggtcagacatacgggcatttgaatagatttgacttctttcttgagcttcttcagtgtcccagtatgcagtcattgttttccatagagttttcccgatccatttaggtttcttttgactagttctcacggtgctaaccatgcctttcattcgccttaaacagatctcattaatataatactggacagtaccagttatcaaaggatcccaatggtgtgttttctacaaaaacaaaaggtaatgtcagtaaacaaaagatgtgtaatcatatataaaagggctgaaagaaaacttaacagcaaactcgacgaag

SEQ ID NO: 34411 - DNA, 3379 bp, Arabidopsis thaliana landsberg
atcttcttcactctccttctccgagtcgccacggcggttttatcttttttcttttgctcctcgcgggaggcagttgaatggacgacatcacctgaatccggtgtaccggcgatgggagaaaccggagaagaaagagtttgtgaaggtgtggaatcataaatctcacggagattcaaatgtggccatcggacggcgggagaagctcgactgtaagtgaatttctgggaagaagaagtagtgctgctgatgttcgcttgttcatctttaatctcaggattaagagtggcgcgaacggataaagcaggaaaagctaaagcccctgcagaaaccgccattaatgtcttcttctctcagcttcataaatttcgttgtaccgttaaaagatgagaagcgagtgaaagagaagagtgatcttttaaggttcctgagaaagtgagaaacaaactccttgccgtctaagatttttaccaacaaacaccttgctgtttttaactgtgacaaggattttatgaagcgagacgaaagttgcgttataagaccaattttaaagatgaagaatataaaatgcaaccaaaatccgtgaccttttgatagagtgtatgatgataattaaacaaaatttgacaaaatacaagatttacatgagagccagtttggaaaaattggataaactaaaagcagcgacaatgttgagagagttcctcagcttaaagttgtggccatttgatttgcgctagacttggaacataagaacagatacgtgggtgataaaggctatgtagcgctcccgcgtctctgtgtctttatccaaaaacacgacaactttcttctcctcgtcaacaaagaaattcccagcggcaacctgaaactgcaaaccagttagtggttccatacccaccgctaagaacaacttgctccacgacgctgtttcgggctcaatcttagtcgtaatccatatctccatctgtaatgtatcatctctctcaaataacactgtaagttgctcatctctaacactagatagagtcacagtatcttcattaaaagagtgaaacggtagacttagagggggtccaaatatctctcttgtaaaatcataacagagtaagaactcagggagatgcttttgttgagtatttcccttgagagacacgcaacgtgcagaaaactgtatctcccagttcgcagagttaatgttagggatagtaatattcatccgtggtttagaggagttgaggacttgaggtagtagagttcatactgaacgtatccgtaacaaggttcactaaatcccttggaagattggccatcatcatctcaaggatcataaataagttaggttaatgcttcagaagatactctcctctgcttccggtggttacaaatttgaagacaaagaaacccaccctaactgaattgggccaatcatgggctttagaaatctaataggcttgtaatgtgcccggtgaaagagataagagtgatatattatagggatgaattgtgaagattgaacctcaataagaccaatcggaagatcacgaaggtaagtgtaatcaaaatcgtgaccttttgatatatagtgatatgataatcaatggattgtttttttctcttctggaaattaaacaaaaattgccaaaatagaagtttgcgagagactaatacaatactgacgcagtctggaaaaattaaaagcagctacttttttccggagatttcgtgacttcttcttcatcttgttgtgatctctagtaacgaccaataccccagaccctgacaactccatcagtgtaaccactgaacaatgtgcttccatctgcactccagttcaagcttgtgcagtagataacctgcattttcattacacattcccattagataccattatcaatctcttcctatatgttaacatcaaagtcaaaacctttagagcacagcaacatttaaagaataaaattcctagttctaaagccaatgggtaagggaaaagattccctacatgcaatttctaaccaaaaattcacttttttttgtcataaccacagataaattcatcacttactttggtgcattcactaacctatcaatagagaaccaattactatagtgaaatcataagataatgaccgtccttcttttgggtaccagtttcaacaccaacttcatttttctctgcctcagacttgagatcaaccttcaagtcctcaacaacagacttgctctcaagatcccaaatcctaatgctattctcagtagcagcacacaaccagtatctgttaggactgaagcaaagcgagtgaataatcgaaccagcctcaagcgagtaaagcttctttccttcagccaaatcccacaacaagataacaccatctttcccaccactggcgcatagcgaaccatcaggcgagacagcaacagtgttgaggtaaccagagtgaccaacaagagagttcctcagcttacagttctggagattccaaactttcacagttttatcccaagaagcagatacaatagttggtacaagagtattaggactaaacctaacacaactaacccattccttgtgaccatcaccttcagagatggtatacttgcactcaccaagtgtgttccaaagcttaatcgtacgatcacgagaagcagacacgatctgacggttatcagtagagaaagcaacagagagcacatctttcgtgtgaccaacgaatcgacgagttgtttctcccgtggcgagatcccagagacggagctcaccgtcccaacttccggagagtgcaaactgaccgtccgatgagagaacaacatcttccacgaagtgagagtgacctgtgagcctacgctgagcaacaccgtaagacttctcgtcctttgtgagtttccagaggatgattgatttgtcacgcgacgctgtgacgatgatgtcggaattgtcgatcggcgtaacgatggccgtgacaatgtcggtgtgggcgcgcataatgcccttcaatacgagtccctcggccatggtttgaggttttggggagagactcttagggtttcttcttcttactcacgaaaatggcgtaacagagcgagagatttcgaggtcgattgaaatgtttggtatttatactctaggtctaaaaatgaatcaaattagggtttagtgtggtttctgcgaggagactggctcatttgggccggagtttccgagtcaggtataaatgggcctcttctgaaataaattttgttcgagcatttttgttgtgtatttgagaaatgtttgatcagagagggaacataagagcaatttgaacgaattcgattgaaatgtacaagagtttactaaaacacaaataacacaatcgtagtttgttcataatttagcgtt

SEQ ID NO: 34412 - DNA, 651 bp, Arabidopsis thaliana landsberg
cttttatagaggcaaggagagagtccaggcgtacaatagggggcgtactatgcgctaacgtgtccagcagtggagtgcctaagccctgtgtacttgccaacgtggccgttgggggagagcttgggccctgtacatgtgatagcgtggcatcggagaagcgcctgagtcttgtaggagcacagctggcagcgcggcaaggatcctgccgacgtctccttgctgccgtaaggggctgagagccaccgcgtcatggttgcacgcggggcaccatcattactcgtcgctggggtaagccagatgggacgccggtcttgttccttgtagcctgagctggctagggatagggtaatgatgtatcccctgttggcgcagtcggtccgagcccaaggtcggacgaggcggagacttctcttgaggccgaggcggcggtcgggcgaggacgcgattcctcccgagaccgaggtcgaggccgagtccgggggttgggcgaggcggagactcctcccgaggctggacctgaggtcgggcgagggggaggcctcctccgagtccggagcctgaggtcgggcgaggtggagcttcctgttgtgcctgaggcgaactcggtggttgattgtgacttgttgtcagcttcacctgggtggttggcat

SEQ ID NO: 34413 - DNA, 2012 bp, Arabidopsis thaliana landsberg
gtctataatttgcatgttttcagtgtctattcatcatcactttgagtctagtttcgtatcattcatcactgttttatattatttctcatcattcttgcatactttgcatgattatgatagctttgcatacatattgcatttctaagttgttttcaggtgatttagagctgttggcgagcaaattggaagaagcgagccagaaccaaaagacatactcgacccccaggccgagtacatccagcacaatactcgaccacctggtcgagtgacattggagccattcttcccatctactcgaccccgtggtcgagtaaccgcagctcaggccattagataaaaccactcgaccccccggtcgagtatcacttcgtcacaccacctaaccacactcggctgttcactctaccacactactcgaccccctggtcgtgcatcatcactcaacaccaatacctccactcgaccaagcactcgatcacatcttcagagtctactcaaatccgcactcaaccagacaagctgagcattaggaagagaagaggagaagaagaagtgtttggaagcggtccggagcttcatccaatcacgaagcccatctctgtccattatcactctatgggccaggcgattaggttcccggcccatctactgtcattttatttcgttttgtataaataggtgtctgagggttttgtcctgggacatctagtcgacattgagtttttgcttcagttttattttctgttttactctggctgcgccgcttttgtttctgcaacctgtaattcgagatttttccaagttattcagattccgcatttgattttacgtgtcatcttgtttctctactctttatctctttacttatgcaatatacttgtttacctgcgtttatgtctttgagcatgttgtctcagtagtgacatagagttcttaaggatgggatagaatggttgtggaatccttagtctgtagaatggttaagttttagaattgattgaatcccttcaggactagttgtgtttactgcttatttctttctgatcaactggaattcgatccaaagcattcccgtacccagaaggtgttcgatggaatgcttgatctactagttcctgagatattcatctctatcccaagggattggccgtttagagcgtttattgactttatcagtccgttcttattgcctgcatagttagattccgttaatggaaattagtttgggctagctttgcttgaggatctctatcaccgggagtgaattgatttgttcttgaacatgttgtctagggataggttgattgtgcttgttaaccattcgaacaatcaaggataccactctattcgattaccccatccttaggaatttctcttctatctgatttctctgttttatcgttatcgcttaatcgttgtcattgcctgtttcttagtgtttgcaattactcgaccagcttactcgaccacacccagtgtctggcaacagactgtgcagtcgagtatagctgtttcaattcctgtctattactcgacctgttactcgactacatcctgcttctggcatcagcctgttgtggtcgagtgattttagtaattctgttattgtttccgttttctacatgttcgcttaggactgttagaaacctcaaaactgttattgcttggcttgaattagtgacttctgatcacatctcatctgtttgcatcacactcatttggattgacaaccttaagtactacaacgatatgatagtgctataggattaattgatcccaaaaacctattattagagctactatcggacctcgtcgatgtcagaccccgtcccggacgtctcggcgtccgacgaccatggactcacattcgagcctcttcccagtagaacctcttaatttttcgcgattcaacatagaattacctttacgaggcctaattctataatcgctttcttattacacagcggaagtctttctatacttggtttaataccaaccaacccttgtaccgg

SEQ ID NO: 34414 - DNA, 1966 bp, Arabidopsis thaliana landsberg
  unsure (1)..(1966): unsure at all n locations
ttttgtttctagatcgtgacttggcatgtccttgttgtatgtcccttgtcttctccacagaataaacaaaacaaccatcttggttgggagctgaatcttgcaccgaagcttcttcctcctctacctcttggagctggtggtctgaaggagctttgttgtgtccctgatgactgggagctttgatgatggccttgagtgtgatttcccctgtcgtcgcttgagttcggattatggattgtcctaacatgcctagggtggagtcttcctccaaagcccctggtcatctcgaagtatctataggcatcttcccttctctgccgaaagtcattatcggtcctgatgtattcgtccatcttctgtagaagcttctccaaagtttgtggtgannnnnnnnnnnnnnnnnnnnntgttggtcctggtcggatccctttgatcatagaaacaataacaatctcatttggcaccattggcgcctaggccctgagacacagaaaccttcggacatacgcctgaaggtattcctcatggtcttgtgtacactggaacaaggcctgagctgtgactggcttcgtatgaaagctttgaaaactggtaaccagcatgtccttgagcttctgccatgacgtgattgtccctggccgaagagaggagtaccatgtctgggccacatttcggactgccatgacgaaggactttgccatgacagctgtgttgcctccatatgaggatattgttgcttcatagctcatcaagaattgttttgggtccgagtgcccatcgtacatgggtagctgaggtggcttgtatgtggccatgggatagcctgcaattctgctgctaggggagaagcatcatcaaaagtaaagctaccatgattaaaatcaacgtaccattcatcttcgttgaatgagcctcttgacgaagctcctgtgttgggccctcggtcatgatcatcttgggtaagatgacgcacttcctcagcagcttcttcgatcttcttctgaaggtcggctagccgggccatcttctcctttttcctttgcacctgctggtgaatgatttctaggtccctgatctcctggtccaactcctcctcctgaagtgttggactggtggcctttctcttttggcttctggcctctcggagagagaaagagagtctcctagttcgtgtccagtcgctgcagtgcagcccctggcgctgttgtcctcttcggcggcatgacgaaggttgatgctttgccgaaggttgtggaagtgagtacaccggagatagcgccaatgttttctcaaatgctatgaatcaagaacaaggcaacacaaaatatgaatggttaaagcccttcgtccttcgaaacattatctcccttaggatataatgatcttcagacgaaggtcatgaaggacttaccttcatcatcgcaatatatgatactacaagaagaagcatatgaaacatgagaaataacattaataatcatatgacattaccaattcattcttattatattaacatggaaaactagagacaatattgaattacatatgtaccttcggcttgacagaaggcaaaaagtacaagcgtgacgcacgagtgaatatcagtcagtgtgaacagtataggggtactgttcatctatttataggcacaggacgtagcctgtgagaaattacattcatgccctttacatttattattggcttatagaaaaatctatgaggattggatagccttttcccttttaagtcggttcctcctcccgtgattgagccgaagctcccttgcgcataacttcgaagtatcggcaaccttagtcatgattgcgcccttctcatcgtgtaatccgaaggtacctgtccataaatcatacttggaagacattgttaaattatacttttgaggacttcggaggacgaaggcccccaacagtagcccctcgtagtgttaatttgtttgagataacga

SEQ ID NO: 34415 - DNA, 824 bp, Arabidopsis thaliana landsberg
gtagagcaggaggtagacggtgtcatcgccatgccgatggatgaacagggacacgtctgacttggcctcgacgaagccgagggaggccaagtaggaggcgacgactgtaccaggcccgtgacgcctgcttgaggtcgtacagggagcggttcagccggcagactaggtccgggcgagcggagtcgacgaagccggtgggctggctgcagttggccgtctctgtcagagtaccgtgaacgaaggcatttttgacgtcgagctggtggaccgcccaatcccgagagagcaagggaaacgacggcccgaacggtggtgaacttgacgacgtggttgaaggtctcgttgtagtccacttcggggcgttggatgaagcctcaaaggacccaacgagccttgtagcagtcgagcgagctatccgaggtcagcatgtggcgaaagagccacttgctggtgaccacgttggtgcctggtaaacgaggcacctggtcccaagtgtggttggccagcagggccacgtactcctccatagcgcaacgccgttgggggtcggcgagggcggcgcgaacggaggggaccggggaggcatccggaggagtggcagccgtgtcagtcgccaggatcagccggtcaacggggtggagaacgccggctacgcgacgagtcgccatcgagtggacgtgcccggggttacggtggatggcaaccgggtggaacacaggaggctcgatgcgggccagcggggcgtcgggagtggccgctcgcggcggtggtagacgagggcggggtcggcgaagcaagccacgctcatcaatggggtcagctca

SEQ ID NO: 34416 - DNA, 1223 bp, Arabidopsis thaliana landsberg
cccctgttaactaatgaaattaaattaccttggcccaaattaaactaacaaatgacaaaagcaatcgcaaagataaggtctttgttttgtcaaaactccaacaaaattgcattcaccattcgagagtccattcgtgtccttttcttattcttttgtctaaactccattacaatcctcatagtgtttaacgagtaaaagggactgaatattacaagattacaatggcccaaattaaattacctaggaactaaagattacaagatttagccgactataccagaaattatcaccaccatcaacaaccgttgcaatagggagtcggtacgagctctttattccaacagagtcgtaaaacaaatactggttacatacttacattcaaactagattttcacccacggtataccgcgggaacaatttatattttaaaattagtatatataaaagtttgcaatttgtaactatctatgtaactatctataaaatatttttattttatagtttagaattgttattaagtaacgtcctgtcaaacccgttccgtaaaaaaaactcatttattttattaatgttgatcttatttatcatatgtttatgaatcattgtctaaagattttgtaattttgtagtaattaaatgctatcaaatatctctgcggtttgatgattataattgaattgtaatagtcatgcagaaaaacaatatcaataatgataattttgtagtaattaaatgatattaaatattttgaaagttttattttagtaaccaatcgtgtagttaatgtagagagattttaggaaaattgttaaatgtcaaatatttaattcaaagattttttttctaattatcaaaaacaaatattaaaatccagtggcaaccattgtaaataaatctcaactacaggatttatttcacaaaatggctgcaaaaatatatatatagattaaattattcattttctaatgatatttacaatttagaaaaacaaaaaacgttcatagccttagatttatccaatctcattttaaaaaatatatttgttttggttaaatgtttgcattgatactcttttcttttgtatatctttttatttaatataaaaatgtaagtatcatttgattaggttttgcaagatattcaaactatataatcgggtctcatttaaaaaaaaaagaattaaaacatggaagcaaaatcacttataatttaatacatcgaca

SEQ ID NO: 34417 - DNA, 519 bp, Arabidopsis thaliana landsberg
ctccatctcaatcaacacaccggattcttgattcaaacattttcgatcttttaccgaacttttcgcatttcccgcttccttattcatcccatcaatctgcttctgcaactcttctttatcagattcagccttttgcagcttcgacttaagctcattgatatacgaaatagcatctcctaatagagaagctttatccatcttagacacattaggaacaacagctcttaaagagtagaatctctgattcaacttctctcttctctgcctctctgcttcaacatgattcaaaggctcttctcttccattcgctggttttctcccccgtttcctcggtttcttctccggttcaaccacaattctgttactctcagcttctttagccactgaagcttcaagatcagagtgattcgagtcacatggaagaacagaggtaaaagaaagcatcccttcttcattattcgaaaccggtgatctcttcttattactactatcttcttcttgaccattctcagtcccatt

SEQ ID NO: 34418 - DNA, 3089 bp, Arabidopsis thaliana landsberg
taatgtatgatcatccaattatataaacaattatttaactgtttttaaacatttatacacaaagtacaatacattacggaatacataataataatatacttctttttgtttaaaatatgttgttaattattttgttattaatgtgttgttgaataattaagatatatataaagttttgtttgctgcgatatgataagtttccctttgaggggaaaatgttattcttcaaaaacaaaatgaatttatcgaccgttttttgttttttgctagcttatatgggaaaataagtaaataaccataaatgaattaataccctatgataatggcaaaggtaaagttgatatagtgctaatgtttctttttcttggtaaataatacattgacatatagtaagaatggttaacacataatgcaagatttgtagctgatatgtagattatctaacaaatcatataggaaaaagatgatatttagagagaagacgtacctgcatgttattgtacctattgaatgttttgctgcaaatagagcaagcaaattgcattggaccgacatgaatctgagccggacttggtatccaaaacctcttcccacatacttccacatcagaatcaattatctcctcatcaaacttcatcttcctcctcttcttcatcatcaccacaccatcttctattatctctctcttgatgggtttcttctgatgatcgaaagttatatcagagccatcctccgagctaccacggtggtatttaggaaatccgatttggagggtaaccacatcatccttattctcttctttgatatccgaggcttgactattattttccatgagcttgtttaaaaaaggcaagcattgaatagacgtgttgagtggttcttgtggttggtacaagaatagagatcgttccaacatgttcatctgactctggtggtgatttgatcttgatatagcatctcttgtcttcccacgatataacacagatttagaagaagtagtagaagattgaggtttaagccattcaataaagcttggggattcgaaacttaagcctttcgtctcataagaattcatctctcgctttctctcctctctttcactctccctctctctctctctctctctacctccacacgaagaagggtaagactagtagtatgaaaaggttatatattaatatcaacctacctggtgtgtatcgtagccgttcgtcaaaataggttctctctttatttttctccaatacaaaatcttcttctttaaagttttgatttcttttcctcctaccccccaaaacgtatagtgcagaaatgtcgcacgtgtctgtctacgcgtttacatcaagaggaaaagagtgaaattttcttcacaaaaatgtggtgggtcttacttcacatagtgaaaaggaaacgcacaagcgcaaggcttttcaatgaaagagaatcctaagaatcatagtcttttttttttttcttctttaccctcatttcctttcccattattaaaattttgtaacatcttaaaccaacaaatacgatatcctttcatcattttatagtcataattgtcttttaagtgcatatagaccggcgaagacaaaattcatcattacatatcaaaacaacaatttcaacatcattttagccgtctttttagggacaaatgataaaaaaaggtaaattgttataaaatcacgcgttcacttttattgacgttggatgatccaagtagcagattacacgatattgatgatacatacactgtttttcatacgcaagacttttctagctagtactctaatccatgatttgcactttatttaaagatatatgaaaatatttattagctttggaaatgagttcactgatattctttgatgcatgattgggttcacgggtctatagttgatatggcagcccacacacgtatatgtttgcaaatggtactatagaaaactgaatccaaaaagtgtgaaactactttggttgtatttcattcccgttttaaatctgtcgaagctatattcattcagaagtaataaagcttaacattaatccaaaaagcagtcgcattagacattcccatcctcacggtagcgttagaaagactggaatggagcacaacaagcagatgagatgacctacacgaaggagtacgttgacccaaaaactgtaatgaatttacgttaatttttgtgttatagacgaggttttaggacgttgtaagattttgaatacaaagaggtagtggagttttgacccattaagcacaagatttttcttagaaaacaaaaaggttaccgcaagtaagtcaatacctgaagaataaaatacttgaaagaaaaacctaagaagagtgagtattcattttaagacgaaaatagaagctgattcaatgtatgtgtcatgttgtggtggaccctaaaacaatattaaccgcgcaaaatttccgaatggtagtatagctaaccgttgaaccgtatgctactatgctttcattcactaaagaattatggtttacgtcccatgcggttcaaacacggtatatacatatctggtcatattttgtgaaaccgggtttgaacaactcaccaatacaatagtactacaattcaaattaaatttttctttttgtaattaaacttcattttggtataattaaagaaaaaaaatgtttccttttgttgaccgatacaatgactgtatattcaaaaaattacttttagacatccaaattatattttcatctatcaattacaatattatgaaaattatatatttacagatgctaaatcaaaaacggtacgtttcaccttaaaccctaaccctccgaatcagctagagagacaccagcccttctattaaaagttaaaacccttccctctttacttctccgatagctttttattttcctcgtttttgcgccgaccaatgcaagggaatcgcgacggctcgtggtcactacgcgcctccgcgtacggtggaagcggcaatggaaacggagggtatcttcctaaaacgactcctgtatttcacaattcattgtcaaacaacaacaacccatcagatacaatttccaaacgcagcag

SEQ ID NO: 34419 - DNA, 3076 bp, Arabidopsis thaliana landsberg
tcactttgaaaacaaaaaagtgcagagagagatactttggaaaaattttgtcaacaaagaaagaaagaaagaaagagtgaaaaagtaaacaaagaaacacaccaccctgtttctgtaaaacaagatggcggggaataaagattctagctgggacgatatcaaaaacgaaggcatcgatctcgtaagtatccttctccattaatattcccctcttttacttttgagttagctgctcattcttggttttgaaaacaggagaaaataccgatcgaggaggttcttacacagctccgatgtacaagggaaggacttaccagcgacgaaggccaaactcgcctcgagatcttcggtcctaacaagctcgaagagaaaaaggcacacatccttaaatatctttctctttttgtttcttcactctcaagaaactccatctaaaaccaatttgaatcatcccacaggaaaacaaggttttgaagttcttagggtttatgtggaaccctctctcatgggtcatggagctcgctgctattatggctatcgccttggccaacggaggagtaaactaactcacttcctctctttctttttccggatccatctttctcacatttgtatactctgcagggaaggccaccggattggcaagatttcgtcggtattacggttcttcttatcatcaactctaccataagcttcattgaagaaaacaacgccggaaatgctgctgccgctttgatggccggtctagcacccaaaaccaaagtaagttttacaattattcaatgtacaagcaaacatgtggatgattcatgactaataataattgaaaaggttctgagagatggcaagtggagcgagcaagaggcagctatattggtgcctggagatattatcagcatcaagttgggtgacattgttccagcagatggtcgtctcttggatggtgatcctctcaagattgatcaatctgctctcactggtgagtctttaccagtaaccaagcacccgggccaagaagtttactcaggctccacctgcaaacaaggagagctagaagctgttgtcatcgctaccggtgttcacactttcttcggcaaagctgctcatcttgttgatagcacaaaccaagaaggccatttccagaaagttttgactgctattggtaacttctgcatctgttccatcgctataggtatgctcatcgagatcgttgtgatgtatcctattcagaaacgagcgtatagagacggaatcgacaaccttctggtgcttctcattggaggaatcccgattgctatgcccactgttttgtctgtcaccatggccatcggatctcaccgtctctcccaacaaggagctatcacaaagagaatgacagcaattgaagaaatggctggaatggatgttttgtgcagtgacaagactggaactcttacactcaacaagcttactgttgacaagagcatggttgaggtttttgtcaaagacttggacaaggatcagcttcttgtgaatgcagcaagagcctctagagttgaaaaccaagatgctattgatgcttgcattgtaggaatgcttggagatcccagagaagcaagagaaggcatcactgaagttcatttctttccttttaaccctgtggataagcgcactgctatcacttacatcgatgctaatggaaactggcaccgtgtcagcaaaggcgcgccagagcaagtaatacaaaattcatttccttcttctctcaagagttttcaaattctttcccactgattattctctgtaattcttagatcattgagctctgtaaccttcgggaggatgcaagcaagagagctcatgacatcattgacaagtttgctgacagaggacttcgttctcttgctgttggcagacaggtataatatttagtgccagtcccaaaactttgggattcatttgtgtttctttctcttttatcaatgctctttttcctattttttgaatttcagactgtctctgagaaagacaagaacagccctggagaaccatgggaatttcttggtctgttgccactttttgatcccccaagacatgacagtgcagagacaatcaggcgtgcccttgaccttggtgttaatgtcaagatgatcactggtgatcaacttgctattggtaaggaaaccggtcgcaggcttggaatgggaaccaatatgtatccatctgcggctcttctcggtaccgacaaggactcgaacattgcatccatccctgttgaggagttgatcgagaaggctgatgggtttgccggcgtctttccaggttatgccttgctttcagtttcaaacctcatcacatgttcattataaagttttgttatattgatccaaggttcttatggttactgattgcagagcacaaatatgaaattgtgaaaaagctgcaggagaggaagcacattgttggtatgaccggtgatggtgttaatgatgcacccgctttgaagaaagcagatatcggtattgctgtggccgatgctacagatgctgctcgtggtgcttcagatatcgtcctcacggaacctgggctgagtgtcatcatcagtgccgttctcactagcagagctatcttccagagaatgaagaactacaccgtgcgtattcttaatctcactctaatatattatgcccaccacttgtgttcgtttgcgctggaaactaataattttagtttcctgcttgtgacagatttatgcagtctcaatcacaatccgtattgtggtaagtagaaacccgttttacaaatctatcacttgtttagcatgattttactttttgtatactgatcatattgcgttgtaactcttgcagtttggtttcatgcttattgctttgatatgggaatttgacttctcagcgttcatggttctgattattgccatccttaatgatggtgagcaaagaacatcctacttttctagacagcgtcctcactcgttatcagctatatcttatggtattatgtgttactaccttttaggtactatcatgaccctctaaaagaacccagtcaagccatctcccacacctgatagtaa

SEQ ID NO: 34420 - DNA, 4380 bp, Arabidopsis thaliana landsberg
ccgatcctcgaaaagtctggcatggattccgagcatcggaggttgaaggccataactgcgaaagaaaagagcggtattgttagtaaggaatgaaaagaaccctagagaggaaatttatagggaggtctcttagctttcagagatgcgactccatttaaagccggagtgattcgcggaagcattcacgtcgctttggtcgccctgcattcaaagagtatctccaaaacgaatatttgatgaatcaaggaaatttggaaagtctccttaaataaaaacggccaaagcccaaaagaaaagtccatacaaaaataaaaaaaaagggtttcaagtttcggggaacatttaagaaaggggttcaggaacaggttccttcatcgccggttcggcgttcgagatggatgcctcgttcttaacatccacatcgggctcgttcttcacacgcttccaagggttgctgtcttcttcttcatcgtcaccctcttcgctgtcagacgggatcacttggatcagagcgtttacgagaccggggacttgacctcgagcacggaggtacatccgaagcatgtgcgggatcttcgccacacagtcgaagttcctccactcccattgaaagggatctctctccatagccctcaccttcctctcgataccggcaatttaggccttgagcgtttgcctcttgaggcccaaccgctgcctctcatcgcataggcggcggtgcttatcgacgacctagtacaaaaattggttagtatgagtaggagtcgtttcggtaagaaaaagggtaagagacctaccttatccataaaatcgtacgcaggcatgaggaaatagaacgccggcgggctcaaaaccatcgttggactgaaacagtgggttaccggggtcaagaggacatacggtggaggctctttcgttttccattcttgaagtatttaccaagtaaatttctgagatcatattttgggacactaatgactgtttgtgctcttatttatagagagttacggtttttctcgaaaccacaaaattaataattggggcgtgtccaaatggtttaaatcatttttggaaatcgaggaaaaggcaattattgccttagaggcgtgaggcttttcctattttccgaggaaggaaatggcaaccgtcgcattaaagacaaacaatttattaaataaaagaaaaacgattaaggcccaagcccagtaaataagtcgaattgaccgaacgcgagttggggaattcacggagttaaaatgagttcagactcacgttttaagagataggtctgatcagcctgtgaatgtcataacttggccacatggttaacaaaatctatttccaaaagatggactttgcaaatccacacttaaatatagcaaaaaccctcttgggatcgtagtcttaaaaaggtttaaaagcctcctcaggcaaacacttgttccaaaaataaaaagcctacttaggcgatgaaagtagttcgaaaaataaacttcaagtttttaaagggacaaccccattaagtggacgcagccactaaggatccttagccacctcgaaatctgtttgagtcggctcgggatcgattagatccacgacagctgtaacgcccccgagacgctctatgaccggacaagtcacgggcgtctcgaaaatgccccattgagattgatcatcaatatccaaccgaggttcgggaacccatccaaacccttggccggtgtattgacgaccactctcccacttaaacatcgcgatatttaaatgttgttccgactcggactaagttattatcaatcattactcgcaatttgtacaagaaaacccgatttatttcataagtataaatattatacaacatgtaaccaaacatttataagtttcatggccagggcctagtgccaaaagcacgatacatagtagaaacatacttgttttacaaaaggcacaaaactactccgggtttcctaatgtccaccacaccctctatttcccataacgggtttcctgcaaaacaagtagaatcatgagtaatctaaaccccaaccctgcaacagacattagtttaccccaacccaaataccctacatggaacacgcatcagagaatggcaacaaaaggtagcttgccgaagcaactacataaatatgcaatgcattaagactccagttttattaagtttttaaaagggcccgatatgttgccttcaaacccaacaccatacacacacactcccgtgatcatccgcgttgcaaccacaaaggtatgcaactggagcatcactaccaaaggctacaccgtcgtgtagacactcggccagggtagctagccccatctctccgagttcttcgcacctcattgcgatcaagtaacatcgttacaagaccccatgatagcacggttcactatgaaggccagacatatcatgatcttggcatgcttatggtctttgcctcctaccacaagcaccacgtaccaagatcccagagtttaagatattatgaaacatatggttaaatcaaacacatagaatcatcaatatcccaacataacctctcaaccataaacaatagcataagaatctaaagatcacatatgcactcaaatataaccattcacacaattcatataactcatgaaatcaatcaagaatgcatgagaatatgattatgcaacttaaaccattatccagaactcacttagtaaccaacaggaagcttccaatgattcgggcagagttttcggctatgggaccctaacttgaatcgaacggacggtttaaactcggctgcctctcactcccgctcaatttctcttcacaaatcaaatggggtcgagttgggcttttataggcaagggaatggcgagttagcatgtccacgtgtcgtgagtatgggcgagtcaccactccacgtgtcatctacccgcgatgacacgcttgctactcaagcggatgagtgacacgtggccacctaaaacttggctccaagcaacttttcttggaccccaagttagccgagccacgcgtccttggcgcggtcaacggttggcaaacgcccgacggggcaaactttcgcccgtggcacgtccgtttttgccccaacttgcccattagtgcccattctttcccaaaattgccctttgatattctatggtgttgtgggcacgtaaggttaattggccatgcattcaagcaactttcggaaattcggactcttgcctatggccgatgtccttacgcgggtcactacactaggtcccatgttttattcttggtaatagacatgatttcatctttacacgcgtctctccatacctttagctcttttgcttcattgtaatcccatggttcttcactgattgtcatcaagagtttttcgacttcaagttgaggaaacaaaatattgtcatcttgatgagcaggtctatgacgttgtctctctgatctccttaagatgacctcattagtctgttcatcttgatcattatcatttggaatgtcttcttcctcttcaactgaaccctcgttattctcatcggctccgttctcctctgtttcttgtactgagtcttcattctcaataccattgtttccaaagctgactttaaacgttcatggactctcacatatatcgttttctgtctcattccaagaccagtttttactctcatcaaaaacgacatccctactcacaataattctccgcctatatggatccaacaagcgataagctttagagccaggttctgttcccagatgaactaaccttctcaacctgttatctagcttctttaaatgtgaactctcattctatgcatatccgatacacccgaacacacataaatgttcaatatttggccttcttcccttgaatacctcatatggagtttgtttaaccactgatcttgttgcgactctattaataagataggtagcatgcctcactgcttctccccatagatatttggtacatccatgtgcttcatgatgcttcttgtcatctctagcaaatttctattcctcctttcatcaactccgttatgttgtggtgagtaaggtgcggttaagtgtcttgtgattccggatttatcacaaaaatcttgaaaattcatgttaatttctaaaaaattcaaaatgttctaaaacttttaaaccaaaatataaccaatttgtaaatttctttaaaatgtgtttaactcaaaacgttacgcaatttaactcaaaatttatttaaatatctatttataaagtttttataatgtttattaataaagattttaaaattttaattattttcttaaccctaaaattttatttagtgtaagtattttttcttgatatatcactccacacttagaaaaaatataagagaattacat

SEQ ID NO: 34421 - DNA, 755 bp, Arabidopsis thaliana landsberg
aacaaaaccaacgataggggtcaaatctctatataaacaacgtttacaaaccttaatatcataacacaaacaaagcttggaaatagccagtttttcaactaagaaaaatgaaagtcacaagctactctcgaattctaataatcttagcagcacttgtgggtgctcttgttgttcccttgaaggctcaagacagccagcaagactatgtaaatgctcacaaccaggcacgatcgcagataggcgtaggccccatgcagtgggacgaaggacttgcagcctacgctcggaactacgcaaaccaactaaaaggagactgcagactcgtacattcccgtgggccttacggggagaacttggcaaagagtggcggtaacttgtctcgtgtagctgccgtgaacttgtgcgttaacgagaaggctaactacaactacgatacaaacacgtgcaacggagtttgcggtcactacactcaggtcgtttggagaaattctgtgagactcgcatgtgctaaagtgagatgtaacaatcgtggaaccatcatcagttgcaattatgatcctccggggaactatgcgaaccagaagccttagtgatgtgtgatcatgttacacatatggcatatacacacacatataaaacacggacctgcacaaaggacgtgaatatatatttcaataagaagcatcatatgcaggctgtgtatagatatgtattgccaaatacagataagttaaaggcctctaaaaccaaaagaa

SEQ ID NO: 34422 - DNA, 965 bp, Arabidopsis thaliana landsberg
ggctaataggtgagagaacaaaccgagttactatttctcattctcatcctcaactagcaaagttttcagggatggggtgtgaactatattttgcgtgatttgcctaaggatcagctcattagtggtgtagcaaactacaacctaaactctttagggagactttgaaacgatgtctttctgtaatcactaagttgagaatactaagtgaaatttctattaatgcaaataatttgaccattaatcatgtttaaactcccttaattaggctcccttttagtcgcagtaacataggggtcagtatggtatggtcataaatggggcattatgagaaagttcataaatgttggggaagcgttttttccgggggtcactcaaacaagtgtcagaaaggtgatacgtgtcgtgactctaggtggctagtggtaagtcccaaaggagcacgtcagtgcgcaatggaagctaaactattcagtgactgcgaaagtttttgactgatcatttttgtgcccgggtcttgtaaaacctcgatattatctcgctatttttgtttttccccttttacccctttctttcacccttgttctcttctctatgctttcttggctcttttcttcttttagctgctttagccacttagacatttagccgagcctactagtatcttagtgctagctatgtttgttagagttggcatagtggtagaatttgctttctacattgtcaaatatgctaccataaatagcaccaccatacattctcctagtacattatatcggtatgacacggtatttggcttaatacgtgggaagctaatcattattgaatcttctgtatgacattattctcatgtatgagcagatgatggtgcggtttcatctgacgaggaactgagagaagatgatgacatagcagcggatgacagccaacaaagaagcaatgaccgcgatctgaaggaccagctacta

SEQ ID NO: 34423 - DNA, 2011 bp, Arabidopsis thaliana landsberg
  unsure (1)..(2011): unsure at all n locations
gttgttatcctcggactcttctctttgcttgaaataaattgtgatatcagactttgattctttcttgatcagtttctttgtcacagacttatcttccttgtgacccgcacccgccatgagtttaacgaacaccaactttaaaagccgccgaaaaaatctcctcttgttgtcatcatcttttgctctctgcatcgtctatttgtttacatgaatgtctaattatggtgttggtttattattatatgaaaaaattagtgggattatggatttctttttccgattgctttgctttgattcnnnnnnnnnnnnnnnnnnnnnnnnnnnnnnnncttttctatatctaaagaaaacagaatttatctagtttcttctttcataatactcttttttgttttggtcgcttttttaactaaaaagaaatttgcttttgtgcaagtttttcttccgttggagctggagattcgcttctttattgaaagatgaagtcccttatcactgtaaatttcggttgagtggacggaaacttgaaaagatctttatacacttacaagacttgttgatctatctataaaagtacttctcacttatgtttttcacttttgttattgtcacgtttcaattcgcgtgaatcacgtgttttgatgatagctgttgactttaattttgacaaaattctctcgacgaaagaaaaagttgcttgtcattgaaacgtaagccccgttcagttagtccatagaggaacaggtgaataactgtcgaacggccatgatatcatcggcggagagaccacataagctccacacacgcgtctcagcaatttgaatctctccaccgcaagattccctcgttaccgaggccgcatctctgcggataagtggcccggggactttcctgggtcggaacttggacaagcccatatgacccattcacttcgtccagtgacaattgtgtttggttttactttgcagatgtatatatagatacgtgatattattcttattaccgatgtgggatgttaacctaaaacgtttcatagtattattaactttcgttttttctgggttgatgaagtgagggatttaattttagggtgaattaaggcaataaccatttatgataatatttaaggatatagcactataacttgcgaaattaaaagaataacatatggactttatcaaggacgattttaacctctgttgtcaaaaatttgacgacattttagtagtgatgacgtggtgtttacgatggtggcagtgatgatgttgtgatggtggtggtgactttgtgatggtgatgacatggggatgatggtggtgccgtggtgtcggcgatatccatgataaagagtaacggtgtggacgtgtggtggttttaggtagtgacgacgtagtggttacgatggtggcggtgatgacgttgtggtggtgacggtgactttgtggtggtgatggtggtggtgctgacgttgtgatgatggtggtgacttagctttgtgatggtgatgacatagggatgatggtgatttcatggggatgatggtggtgccgtggtggttgcgatggtgatggtgagggactaagggcatgatgatggtggtgccgtggtgtcggtgatatccgtgataaatagtaacggtctggtggttttagtagtgacgacgtggtgattacgatggcggtgatgatgatggcggtgatggtggtggtgactttgtggtggtgacgacgttgtaatcggtaccggcgagttgattggttttatcttagggtcacttatgtctaaaatataggaaatacacacaatatcattggactatttattttggttagttacctaattataatatttttgtatgttataaatgcaaattttcattaattttaactagagaaaaattggactttgaattttgatgggttgagccaggcccgtgcaatgatttttatttgttttctagtcctgaacgtttctaaaatagcaaataacatcctatattctttcttattag

SEQ ID NO: 34424 - DNA, 121 bp, Arabidopsis thaliana landsberg
cttagggggaagcaacgcgcgagctggtggacgaagcggacgaagaatgtggcttgagtacgcaacattggtgagatcaatgcccgaaaacccaggggtctcgcaagttcgttcggaggtg

SEQ ID NO: 34425 - DNA, 1238 bp, Arabidopsis thaliana landsberg
  unsure (1)..(1238): unsure at all n locations
gtataactaatgtatgtataaaatttggcttatattgtttgataagaacactagacctctttcaagttgttcgttatgtttatgtatattacttgactcattttcaattctgttgacaatatttgacattgcatttacatgtggttcctgtgtttgtttagtgttcaacctgaatgttgaagtttaagacataaaaatcatctatacttggttgcttcttgattttgaatccttaataagacatggaatttctcctctcatcaggtaagtcactgaaagatggggcgtgttagaaccaagacggtgaagaaatcttctcgtcaagtcattgagaagtactactctcgcatgactcttgactttcacactaacaagaagatccttgaagaggttgccatcatcccatcaaagagactccgcaacaagattgcttggattctccacccacttgatgaaacgtatccagaagggaccagtccgtggaatctcactcaagcttcaagaagaagagcgtgaacgccgtatggactttgttcccgatgagtctgctatcaagactgatgagatcaaggtcgacaaagagactcttgagatgcttgcttctctaggaatgtctgacacatccggcatctctgcagtcgagccacaacaagctatggcaccaatcgctgctttcggcggcagggcacccagaagatactaagatggcctcagctaatcatcagctacgattggctctcttttttctcagttagggacaagaaagacttgtgtggttgtttattgtttcttttgattatgtcttaaatcaatgtgagactctttcgtattaatggtttttaagttatgtggaaccaaaattggagttcaaacatttgatagtaccaatactttttgcttatcagatccgagttgattcatgggagagttgttgtatcagcgaagaatgttagtgaaacattccacaggtcgaaaccattttaaaactttgaacaaggtagagttgttccacaatgaaaatgtgtatatatgcgacttctatgttttaatggatttattgcctgctgcttctattaactctttagtccaaggtctagaggaagatatttttgtgttcagtctttggatttggttaatatcatgaagatgttcttttggttacaaggtcttcatgaactaannacaacacactaccatacttaagtaagcccaaaccaacattcttaacatggagccta

SEQ ID NO: 34426 - DNA, 1215 bp, Arabidopsis thaliana landsberg
cggggcaactacctggattcataacaaataaagtttgtggttttttcctatttatattatgtgtgaggctatccttttgcaacaatatcacatatatgtactccgtcaatatctctattgtccaaaattttctctttattgtgacgaacttttttcagatgtttttttacatatatggtaaacctctatatttgcgtattttgttgattgtctatttgaaagtgcatttggctaatcactctttttcttttttggtttttgcaaagttttctaattactggtaactcaacttatttaaacatacaaaaatattttaggaagatggcttagtgatcacttgcaacccaccaaatagtagggcttttgttttggtagaataagaagtttccatcagctacaaattgattattgattgaagtcaaaaagttatagaagacgaagtttagtcacaatacccaatccaagatatcatatatccattagaaataatgatctcttacttatatatcacaatgatgagaaaaatcaattagaacatatctatactacgcatttaaaaaataaatgaaaacccccacttattatctgatttttatggacccatttacatgttacaaggtacaatatattagagcatattattgatattgatttgagagacaaggcacctaacggtctattttgttttttcccggtacagccattttgtccaaactaaactttttcagatgatatatgaaaagtgaaaaccaagaatatcccaatccaaagaatacccacgagtgatttttttggagtatatgtattgtacaatttccatattttgaggggcataaaaatcctacctcaagaaggtacatatgcatggatataaacttagcaaacgatgacctattatataaagcaacactaaaaaggtcaaacaacactatatgtttagggcttcattaactctcatcctcaatgtaatacgctatcaactcaagagcccaaaagcaagatatgcactgtagatcacatgttatgtattttttatatgcaacgattgttaaaaggaaagttttgaacacggtcctcaaatctcattatacgcagtcattagttcataccccatatgtataacaaattcggatatttatgttatataacccatacgtaggtggagtaaatagttgcgatttttttgaccattaactttcctttttataactattt

SEQ ID NO: 34427 - DNA, 1207 bp, Arabidopsis thaliana landsberg
atatcttttatcttctctaataatcacctttctctatacccatattctttacttattcatattcaaatgcaaagctatgatccccaaatagttaagtaacatatgactatggctggtcaagaaagacatgaggttcacctggaagtcactagaagtggaggatctaacgggaacagagcgtataaggagatctttccctggagcgggaccttccagatagagaacaacacgatcaggcatatttgatatcgaaaacgttccttccagatcaacccacttgtctctcgaggcatatgttctgcagataagttccacttcatcagaaatctctacaaaagctcaatcaaatttcaaagatataaccataaaaaaaaacatactttccgatacacaaatactcggtaggagagtcttcatgctcaagcctcacagtagaaagaacctcagctgattcattgaaaggaccagacacaccaacacaagttgatacagtatagttcattccagaagcaaccctggttgtaatatcttgttcaagtccttgccaagtttctttcctattagttacaacgactatccaccggtcgaggaatcagcagacattacctctgagctaaatgggtcagaggaaactacataagcttcacatccgttgggataccaaggttcaatcccagcaaagaagtcaccgttcattacaatgttaagatccgccatgagcttagcctgtactaaattcggatataatcaaatcaacaacattaaccagtagatgataaaaattcgaaatgggtcaacccaaaaaaaaaaagtcaaattaaaaatctcacctttgaatgggaaagaagagaagagagaagcgagaggacacagaaaggtgattagttgaagaaagagaaatccaacagacatcaatcagcaacacttcggagaagaaaggtacaaaaatctcatcggttttttttttttttttaatgattcatgtcgtgctttcgacgttgtggttgctgataaaaaagtcaaaattgttgtttgactcttccagaagaagaaacaaactcatgattcatgaagtttccttttctctgggcaaaacttggatctaatctttgacattaaatgggccgggcctgtcttttaaagttattatataaaaataatcttaattatcatcatcatgtctgaatatgctttttaacttatgcca

SEQ ID NO: 34428 - DNA, 1345 bp, Arabidopsis thaliana landsberg
acgcaggttctccaaagaaattgccgaggtagaggatgctcggcacaaattctcatttacacgttttgtttcaagactactgccgatctcttatggcgcatgcaggtgaaatactttgaagtttaacaatatattataatttgatctatatgaatacacttcagaagataaattttttattctgtgtggacataacagtttcttagggagaagaaattcgaacagaagattccacgagtgataatcgaggatgcaagaaagataaagtacgaagatgcaaagacagcattgaaaagagggttactctatttcacagccttgcaggctgatgatggacactggccagctgaaaactgtggcccaaatttctaataccctccttttgtgagttactattataaactagcttcttcttttttttttccttttttttatatatataaacttgctttaatagctatatacagacattttccaaataattatttctgtaataataataataataaattttgtgctgcacagttgatatgcttgtacatcactggacatctggagaaaatcttcactcccgagcatgttaaagagttactacgtcacatctacaacatgcaggtacgtacacatatatttcatatacttgaaggtttatatatgaactatagaaagagtatttaagcaaaactgtttttgtagaacgaagatggtgggtggggtttacacgtagaaagccacagtgttatgttctgtacagtcattaattacgtctgtctacgaattgtgggagaagaagtcggtcatgatgatcaaagaaatggttgtgcaaaggctcataagtggatcatggaccatggtggtgctacctacacgcccttgatcggaaaagcgttgctttcggtatgtggctactatttattttataaagatccatattactatacttaaaaaactatattatttattgttaaatattagatcatatgtcttttgtcatcttcaccttggaattgatcaggttcttggagtgtatgattggtctggctgcaatcctatacctccagagttctggttgcttccgtcttcttttcctgttaatggaggttttacttttggacacctcataatattgtgctgttggttatatcattaaatgtttgactttaaagtaattttgtttatatatttaataaaaatatatgtatgtatgtaaatgtgtagggactctctggatttatttacgggatactttcatggggttgtcatacttgtatggtaaaaaatttgtggctaccccaacacctctcattcttgcagctccagaagagctgtattccgagccttatgc

SEQ ID NO: 34429 - DNA, 3250 bp, Arabidopsis thaliana landsberg
aagccttttctcaaggccgcaatgatggctcatttagtgattttttttgaatccagccaaagcagagcctgaaggcaatgattcagttactccggactcatcattcttcggctacatgatttgaacgggtacccgagtcactagcaccagcggcttctgtagccgcttgtttcttcctcctgctcttagctttcttagctttcattcgacgtttcttctcagctgaatcgatccatttgtaatctgaaggtatcaagaaagggtcagcctcgtctttgtaacggttactatcattgccacttgatttgccacttctcatccatgagatccatgatggtgatgagttctctgaagaagacgactttgcatcatgaaataccggactagaaggaggtgttgagaactcctcctcagctgcctgaagttcttcaaatttggtgaaagtaacaacaactcgaaccgtaggaataatgggaatggcgagctgcacataaattaccgataagaataaaccctagagagtgattcaatcatatcagtaacatacaatttacgaatcgaaaaagatttatacctttacagggaatgtgcctagcggaagtttagttgcgagaagctctctgagtctcctaacggctttaaccttgttagctaatatgtcaaggagcggtaaaagctcgtctgtcgttagaggaaagtccggtgttaaccacaagaccgggcttaggcctttcttgtattcactctcacgcttaacctcatctccggcaacacctttcttcttcttcttcttctcctttcctttctttgcgtctccatgatcctcatttgcatgatcagataccatcgaagatttctggcttttccctttctggttcccgtcttctggcgcagactttgagcctttcttgagctttgtatcttcagtgtttgagcctttcttattccaaccaaaccagcccttcttatccttgagagctccgttttcctgttgatcagtaacttcacactcttcatcttcaatggcatcggaatttccagtctgaagcgcggaattcaattggagtctttcctcaggtgttagtacgtcttcaaagccgtcggtctctgcaccatttgttacagcagttcgctcttcatcaaccgcaaagagctcttcatcagtcattgcaccgggaacccgtctagatttgacactcaccatcacatgaagcatatcgtaaacttttgctttccaattcccaaccatctcggttctctcttgccgtctccaattcaaatgagaaaccagctcagcttgagttacatcgattccaggtctatacatattagtctgagacatcaaagccacttcatgagcaacctcagcatctgttggttgcgcaccagctccttccaaagcatttgtcatttctttttccttatgcgaaagaacaatcaacgagcccggagatagggacattttaccatcttcagacgagtaaccatcccctagaaagagaaatgtttgatctgaccgttggattttaaacccatcaaaaccagcaagagtcatatcagcacggagatttgaaccacgtttccatatcctgtaagtatcggaaggagcaatgcggccaataaacggaatgaccgagctctcaaaatgaaaagtgatctccatgtaaaaatcacggatccgagatgctgacgcaatgatccgaggaagtctcctacaccatttagcccaagcaagaggctggtaatgccgagcaattatcatagcgatggcctcttctcttgtgcaaaccgcttcttgtaacgcactccaaccattctcgttctgtagactccaatcggcaccagcagacatcaaaatctcagcagagacaggatctctaagacgaacagcgagatgcaatggagtttcacgaccaggaacatcacggcgatcaatgacagctgaaacagaatcagcacgagactcagactccatagactcagcctcagtagtaacttcaccagccttagctaaccgaggaagatccgaaacaattcgcctaagagcagcatgatcccgaagcacaacagctaaatgagcaggactatgagtatacttggagtaatcttccattgtttatccacaacactcactaagctccaaaacaaaaaagcttttctgctttacttctctccaaccctaatagaaaaggaatcagattcttccaggaatcacaaacaaaaccctagaaactcaccatatgagctcaaatttgaatccaattcaagaaagcttcctcctttctcctcctcagaacataaagaaaaaacccaaattccaatacacaaaaagtaacaaccttcacaacaagcacaagctgttcatcaaaaaagttggagcctttacaaagaaaacacacgcctttttcactttcgctttatcaaattttcgatttccttgtgaggaacagaaaactaccagtggaagatccgttaagccgctggagttttctcaccaacccgacccggaaacctcaaaagacagagagaggggtacgaaggaaggagcaatggggaagaagaaagagagagaatcgatcggtgaacaatgaatgtttgtagcgattgagaagatctaacggctaggttcctttcttccacttacgccattattaatgccaccaccactactctcagatctatctctctctctctctctctgcgaattttctggtctcgctcgaccaacaagggagaaatatggaactacccttgactttacacttaattacggttttaccatttttcattttttcttttcttttgggttcgctttacgtctgaatttccaggttggacatttccactttggattctttttaagacacagtttcgaataaaaaatacatttgttttcatttctgaaccaaagtccaaagatttgcatttacaattttttagccacaaatgtatctgtattcagagtaaaggatgttatcattgcatttaacttatacacgtgtgatgtgggtatcattaaaacctgtcgtaatagggtgtgtgacataaaagattcatataatcaaccataggaataggatgcttcatatttatcgatatataatcttgttagttttgtattaataatcagtactacataagactcaaatttacggtgctaaaaaggatgctgtgaatcaaattaaatatttaaacttgttagtacttttttggaccatcctatagtgatatcaaattaccctcaccctct

SEQ ID NO: 34430 - DNA, 1171 bp, Arabidopsis thaliana landsberg
tagaaatatatgtttctcatttgaatgcacttaaaactagatttgaatttgctaaagatattaaaaattgttatttttgtgtgtcgaaggtgtttgatgcacagtttaggccaatcctaatagtgttcatgatacttggtcaatgagaattgatgattaaggtgagattagtggactaaaatggacctgtagttttcattgccaattgatttcctaatttgcaaatggaagttcagataaattgggtgtttaatagagcaattaaaaccatggaagtaatctaccttatttaattgtttcacccatgatccatagcttatcttatttgctaatctggtttcattattttgtttaatcttattgtttagtagtttcccacttttcctttcgaattgaatgtctctttatttacttgtttacgccatctatccacctagtttaattagtataacatacacttaagtgtgttatagtctaattctttgtggattcgatcacaatattgtgctacaagtgacttaactgtactcttcccgttttacaattcatatttaaaatttgacggacctatagtccactcaatttagctggtattgtaaatgtctacaaaatgaaagtcatgaatacattttcacttcaaagtacgttttttatttgtttgagatgtcaagcacatgtttatttcgttgttttccaaataatatctaggagaggaaggttatcaactatgatctctatctttctagtttgtgggcacgcatgagtcacttcaccggtcatttcataccttcgactttaacatatgacactgtacacgtaccatgttaaaaatgtgtggatagtaaccttttctagaaacccccttatttgatttttgtatatcgaatgacaaatccatgtgatgtgacctaaccataataatacaatgcaaaactaaaacgtgattcggccaaaactatgacaacctaaaaagctagagagtaatatatatagacatacacctgaagagttacgtatagcataataatacatttattcaatatggccactctcctgcaaataggttcaggtgtgatttatagtaatgcccttaggaagacgcttcgacgtcctcagtcttctacatgcatcatagtgaccgaaaccacaccatgtaataagtctcccacag

SEQ ID NO: 34431 - DNA, 806 bp, Arabidopsis thaliana landsberg
  unsure (1)..(806): unsure at all n locations
aatttttttcctatcgaaaaagtatagtttggaaaaaaacctaacaaactctctatattatgagtaccagttatatagttcaatacagagtaaggactaactacaatccttcttgatcgttgtcgcaaatgttctctattttattaaaggattttctcataaaagatggagcagcacaaacgatgatattgagttgctccctggggcagccaagatatgacgatggagattcacatgtcagttccctgtatttcacaagaaatcttgttgatctttcacgtccatcacatagaaatctctactcatttaaagcattattgcatcagtttcatgtgccgtatgtcacgtgcgaaacgtgtaagtctgtttccctcctctgtttctagcctaccaatgggtcattccacccatgagaaaccacccaagcccaccttgacagaaagccgtacatagcgcacgcntcccacatagtatcacctcactagtcgaaggaggacgagcgaccgaaccagctattaaaaaaggttcgggctccttttcaacgcataccattctcagccttttggctaagatcaagtgtaatatttgttttaccagttcaatatctagtatatgaacaatatgttcactttgacattaaattcatttattatgatatttttatgtgaagggtccattaaaattctcaagtgtcgcttagtcacccaatcaatatcatcaaatatggttgggtacatcgcaacacacgggtattagactagtattgttttaccataacttcttcgttttactatgtttttagtggt

SEQ ID NO: 34432 - DNA, 657 bp, Arabidopsis thaliana landsberg
tgattatcatgtagcaaaatacactatagaaggggtcagactttaggctatggaaaatattaataaatatcaagccgaaacaataaaatggcgcgacagaaaagtctagctgaaaaatatcaagccaaggcatctggtgcttcggagagtggctaatccggacacagtatgcaaactacagttgaaatgggagggacctcttcttagtagcatcttcgtcaaggcccggttcttacagactgaaggacatggatggcaatgaaattccaagatcttggaatgctgatgagcttcggcggttttatgtataactcgatgtaattttgacttttcttttctttttcatggcacccttttcctttctaaagggggagaaaggtttttaatggggccatcttatgtaatttcctttttagttttataagagcaaaatcccccaaagaatgtaaatgtaaaagctgagagcgcaccatcgagtgccgaaactaaaaaagagaagaagctccaaagacgtccctaaggggatgcagagcttacagcgaaaagtcaacgctgattccgccgaaagtaaaaggcgaagaagctccaaagacgtccctaaggggatgcagagttacagcgaaaagtcaacgctgatactgcctaagtaaaaggcaa

SEQ ID NO: 34433 - DNA, 380 bp, Arabidopsis thaliana landsberg
tttgctttctttgcccctttctctcttcttccatctcaaatctgtctcttcaatattactattgggcttttggttagtctataatgggactcaaaataaggctttggcccacatcataagagataattcacaaatcaaaactaatttcagagtcttttgtcccacatcggtcaatctactcgttttgtgtttgtttatatattacacgaaacgatgtacccaacgtcgagctaagtaacagtagcttgtaacccatgtggggacaataagatggtgggacactggttcggttcctcgggtcggttctggtgttggcatgtttctgagctgcccagtccaagctgtgagtaatccgtgtgaatcaagcgaaggcttggctc

SEQ ID NO: 34434 - DNA, 1388 bp, Arabidopsis thaliana landsberg
cccgttgctccgattccagacccgcggggcctcggaccccgtcttcgttctcgatgatgagcaggaggaccagtcctggggtgagctccgcgagtgcgcagaggctacggtggggtcgctccggtcgtcgctggaggttttctgcagagacgtccccaaaatcctccaggtagcggtttcgggcataccttttttccttctgtgggcgagacacccgtcgtgacgccctgtttcctttccccaggatatgtcggaccggagcgccgccaagtcgtcgttcatccgccgcgaggttgatgtctggggctcgctgcgatccctgaggtccttgctcgccggggctaccgcgcgcctttcccagcaggatgccaaggtggcggacctccagctgctctgcgccgacctgagagccgaggcggctgcagcgcgtgcggaggcgcaacggcagcgatcggagctcgcccaggtcgtcgaggaacgggaccgacttcaagaccgggctgccgaggccgaaagccgagccgagacccttgcggccgacttagctcgacgcaagtcgcggcctcggagcaccgtgcccgagccgggagtacgtcttggtcctccctagttctttttcttgtccgtatccgttgcttgtacttgaggtatctctcctggctacttgcagaacttgagtccgcccttgatgagtccccaatggcgcttgctgaggcgcttgccggagccactgagcagagggaggcggaccttgcggccatgtccgaggccgtctcggacttttaccgtgccctcggttctgatgacgtcccttcaggaagctcccctcagagccgccttcgagccctgggtggtcacgcccgcggcagagtccggaagcgctacaccatggcgtcaggcgtgccttcgccgtgctcgcttctcactatgttgtggatctggagcgggttagtgaggggtactgtcttcctgacgaagacgatgctgctttggcggaggtgcagcggcttgacgcggttccgctggcccgagcgcggtgctggcgaccacctttgaggcggaggtccttcctcttgcgacgtcaccggaggccgagatggaccccaccgatggcgggggtggagttgaaggcgcggctccttcccaaggcggcacctgattctcgtttgaacagttttttgtcgaacgtgtgtctcaccacggccgctgaggcctgaacacttctgtctttcttgcatggagtcgtactctcctctctgtctgtctgcatgttcgcggtacctcgtcaataatagagtggctcctcgagctggcgcatccttcttggcacgtgatgagtgatgtagcctaaccggagtacggtaattctaggctcaatcgacttgcat

SEQ ID NO: 34435 - DNA, 1057 bp, Arabidopsis thaliana landsberg
cattcatacattatgctgcactgtttgttccacacttaccatacttgttcaacatactacgttttaggtaactgcattctggtaaaaccacaccacgcttctatacccgcttgtcccgcactctctaaaacgttgttaccattcaaagtcataggttgtgaatgggggaagcgttttgccgtttttcatatttttattattgaaaaccgcatatatgtcaccgttcaacaccttttcagaaatctgtgttttattatttaaaaaaaagtgtaaactgcggatttaaaaaaagggataaaatggcatggaccgcatttcaaaatgaagtcaggtccttaccctacggtccaactgaaaaatgcaatggacaatagccacttatgtacttttgattttttttaatgttataaattattatgtatatatatatatatatatatatatatttttccatatatacatcatttctctcactcttttccctcacactctttttcacaaaaaaaattcttgtagccatatacatcttttctctcttatataatggattctcatacttggaaagaaaaaaaaaaaaaaaactttctgtattattctctctttatatttactttagctatattctgttaattgtttttcattcatcttttacgggtttgttcatcaaattttaacgatcgaaggttaaatattttttcataatttgtttcataatcacattttcaatgttatcataaatatactcaataagttctttcagcaaacatttttctgtaccgcttattttgtacaaaccgcacttgtcccacatatatgggtctaaatggtaaccgcggtttttgttgtgcgggaaaagcgttattacagcgcagtacggttcaactgcggtacatgagggagaaatatatttgcaaaacaagtgcggtttgtacaaaataagtggtacaaaataatgtttgattggtgaaaaaactacatgcggtgcggattatagattatatatatatatatatattaataattaattaattttttgtgttaataaatgaacaataac

SEQ ID NO: 34436 - DNA, 1142 bp, Arabidopsis thaliana landsberg
tttgcagacattcctcttcgaaaggttacgccaaaggcaaaatcctggttttaaatccagtttaatccactccggtccgacctgaaaatcgaaacatttgatcccgaaaccgaattttatttttaatatattaaatagatatactttttaaaaagtagctttgtttgtagttattgggcctaatgggctgttattgttgtaccgttatttgcccttttgggctttaaatgatatatcgtaggtcgacacaaacaaaataaaatattggcatagacgagctgctggtcagaagaagactcagaagtacctctctcctctcttcttcttcctctagaactcccaaaaatggcgtaagccaaaaaatccaccgaaatcgataacgatggagtctagtatcctcgattccctcggagttgagattatcggcgtgatggctcccgtctccatctgcatgttcctcgtcgtccttctcacctactctctctctgtcacttctgaccctcagatccgtagcgccgctaacctcatttacatcgagaatccctccgactccaccaccgtcaagctcgaaggtagtctcgccaacgccatcgtcttcgtcgtcctcattgccgccgtcactttcatccttgttctcctcttctactataacttcaccaatttccttaagcattacatgcgtttctctgccttctttgtcttaggtaccaatttttgtttcctcattcacttcttcttcttcttcttcttcttcttcttcttcttagggttaactcgaattcattgttgattctttatctcaggtacgatgggaggtgcaattttcctatcgataatccagcatttctcaattcctgttgattccatcacctgcttcatattgcttttcaatttcacgatcttggggactttgtctgtgtttgctggtgggataccaattgtgcttagacagtgttatatggttgttatggggatagttgttgcagcttggttcactaagttacctgagtggactacatggtttatcttggtggctttagctttgtatgacttggttgctgttttggcaccaggtgggccacttaagttgttggtagagctggcttcgagccgcgaagaggaacttcctgctatggtttatg

SEQ ID NO: 34437 - DNA, 649 bp, Arabidopsis thaliana landsberg
gatactacaaaatcaagaactttagcgaccagaaacgccgtggacaagcttatctacgagtggagaggttttaagcacaccattgactggaaacaaacggtaggctctttagaaatatttatctcccatgagacactatgagcttcaattcacttccccactccactctcctgactatgttattgcatccacaagattgagcttggattctggtactccgctttcgaaaataaagtttgttgagaaaagcaaaaaccgattcaacaaaaacatttacagagcatgatatataaattactgagcagccctttttaaaaaaaagtttcatagacaaacaaaaacttatcatcattatcaatttatcatcatcatcatcaattcatcataatcattcgttggctttgagccattccagaatccgtttttcagattcactgagctccgcttctgtctttccctttatagatccttcaacaaactcaaagtagtctttataattcctcttgtaaaaactgtccaatctctgtttcattttcccaatatgaacgaaaaaaaaatcataagaaaatttcctacaaaagacataaactatgtgcgttatggtatataaaatgtcattctctttacctccttatcattcttggctttg

SEQ ID NO: 34438 - DNA, 559 bp, Arabidopsis thaliana landsberg
actaatccgatttgccgaagaagaaaccaccccaacgttgaaggatgatgaagtaattgttttcaagagttctttcagagccagaccgcggttccgtcttaacgagatgataggagaagtgctgaagaactttgaaatttatcttcatcagctgacccctaacgctatcgttagactcagcatcttcaactgggcccttcgaagccaagggatggatccaaatgccgaagcattctgccgagtgcatgagttgcattatcaaacgaaggccagggcagatgggctgcatgaaaattttggctgctataacttcgcgtatcacaaagatacaaaggctccggtcctcagctatcgtaccaagtggccaaccggctggatgagcgaatgattttatatcaaggccgatgacaagaaaagggggaaactgatgacgatggtcatgtgcccgatggctttgagcttcggaatgaccagacctttgtgcaacatgaagccagggtcagcatgccaacagtctgtatcagaattcagggtggtggctgaacagatcagtactaga

SEQ ID NO: 34439 - DNA, 708 bp, Arabidopsis thaliana landsberg
ccttattgcctgcatagttagattgcgttaatgagaattagtctgggctagctttgcttgaggatttttatcacgagagtgaattgatctgttgttgaacatgttgtctagggatagcctgattgcgcttgttaaccattcgaataggctaggataccactctattcgattatcccatccttaggaatttctcgtctatctgatttctctgttttatcgttatcgcttaatcgttctcattgcttgtttcttagtttttgcaattactcgaccaacttactggaccacacccagtgtttggcaacagactgtgcagtcgagtacatttgtctcattactcgacctttactcgatcacatcctgcttctggcatcagcctgttgtggtcgagtgattttagtaattctgttaaagtttttgttttctacatattcgcttgggactgttagaaacaccaaaactgttattgcttggcttgacttagtgacttctgatcacatctcatctgtttcatcatacctgattggaatgacacctaaaatactacaatgacaagatagtgttttaggattaattgatcttaaaaacctattatcaaacacggtcacaaagaaatcagaatctcctattcaacgatatcatcgaccgtattgctcgccaactcagaacacagacagaaacagatacaatggctgcaattgtagatga

SEQ ID NO: 34440 - DNA, 623 bp, Arabidopsis thaliana landsberg
ggtggctccggaggccaggtcagggcgtctgctccccaggggccgccgctcgtaccgacagcgcatgggggtgaccctcaagtcatcgcgaccgtgcccgggcaatctgctccccgggcgtccaaagcaagggtggcgccgaagttgccggtgaagcggacctcggcgactgttccggagcgcgggatccaagaaacctccccgaggcgcggtggatcatggcccgaagtgggtaagtatcgtcagaatgtcttcgtcttggcttcccattcatatgtctcggccgtgattttccttttctattctttctcagcaagcgaacgcatggccagaccgacctggcaccccggaaggcccttaagacagcgccggtctgtgcggccagcgcccgcctgggccttgtcgttcagccgaccctttcgcagggcgtttcaccgcagggggctcgggtgtcgcctgtctctggggagcaggttcccgaggctggctcttctgccgaggcggccatcgtgataggggaggcggctgacgcgacggtggtcccgagcccgcctgtcgtgccggccatgctggcgcctgccgctaccgaagtcgacagcgtcccagtcggagagcgaccggtt

SEQ ID NO: 34441 - DNA, 478 bp, Arabidopsis thaliana landsberg
gcaggtcgactctagaggatcccctgtctctcggcccacatgtcaggggccgagtgcctttgctgcatgccccacttcagctataaaatgggaggcatgcgacgttacacacacgcaatcttaggacacaccttagactcgcaagctcatacaagctcacaagcaatacatcccacagtggagtagggtattacgctccggcggctcgaaccactctaaattcttatgtgttcttgcatgtcctcagactaaccctagtcgatcactttgctcttagaattaggcggatgtattccgctacctggctagagtttatttacctccgaaagcatcgttgcacatctcaagcggttaactagtgtttaaattccaccgtgggatctcaaaaagtttaaggtgtgtttggttgtgggacagctaggacgggatcgtccctgacgtcctctctcgtccctccaattttgagggacaacagggg

SEQ ID NO: 34442 - DNA, 553 bp, Arabidopsis thaliana landsberg
cttaattaccctcagatatttcctatgtttacgtgtaaaaggataggggtaggaaggtgaatgtagcatctcttgattatggggaaaaatctgtaaaattaaatgcaccgcatattacagaacagagaatagcgaatccagcgaaagaaataagactgtccaatgcataaattaataacaaaaatgtaaataatttgtatatgtaagtaacgatacgaaaaggaacaaaacttgtagaattattggcggactggtcaccagtgcccaattattttcaaagaggtttcagaagtttgggtccacgttgggttatgaattgacaaaagaggtttcagagacaaaatctttatctgccattaaatggctgccatttcttttgctccactcttgtaacttttaagggtaaattctacattacatttttgcatgctattaaaaacgagtaaaaattaacacaagattcatattctgatattgaatttgaaaactaacagcaaatttgattatcaagtgaaaattactaaataaatacaccacactgttttatcccaag

SEQ ID NO: 34443 - DNA, 533 bp, Arabidopsis thaliana landsberg
aattaaaacaagcacattaactagacattatttataaccaggttaggaaaatagcagatcgtttgtgtcctaagaaaacatggtaagatatgataagaaaacaagtattctaagaaattaatttaatatgataagaaaataagtattctaaaaaattaatatgataagaaaacatgtattctaagaaactaatttaattagtctaattgtctaaaatatcatttctagatttttgtaactcttaagttcacttaactacttgactcattttctcacgtgactcactgcaatgaatcactaacacgtggagactgcaagaaactcatacatgtgccatagacctataggtatgttttgcgtaaggtatatatgttcttcaagtgaatacattgctacagaaagttatgatactttttctccataggcttaatcatttggtctttttgaaacatactcatattcaggattcatctaataagaaaccaatcagcaaaaaatacatcaaccaaaaagttgtaatactacaagaaaac

SEQ ID NO: 34444 - DNA, 1523 bp, Arabidopsis thaliana landsberg
agattttcttaagaacctaaagttgtagttagagagcaaagttgtagagtggaagtcaaaagtacattaattcaatctcttacgatctttttttggtttcggtgtagtgttctcatagttctgggaatcatagttagagagcaaagttgtaaagtggaagtcaaaagtaaattatatagatttgtttaagaacctaaagttgtagttagagagcaaagttgtagagtggaagtcaaaagtaaattaattcgatctcttacgatcttttttggtttcgatgtagtgttctcacagttctgggagtcattgttagagagcaaagttgtagagtggaagtcaaaagtacattatgtagatttgtttcagatcctaaagtctctatgatgaattagtttgagtgaaatcaagagtatatgatagtcacacatttgatttaagaatttgtttgttgacgtcttgttacttgcatctatatgtttctcaacatccttagaaaccctttggcatcatttgaagcgaatgggattgcatgaaaatgatgagcataatcctgtgtttgggaacaacaagcagaccctggagacattagtccaacaaaggtgagacctttcgttaaccttgtgcataactctgcagggaataaacgactgagggggttttcatggttcttctaaaaaggttttgtccttttaccaggttcttgcatatggataaagtaagtggcccggagggtagtactctgttttacgatcttgcagagagagcgctagatccgcaagttagcgagaaagtaaaagattacatttcacaggtactacatgaagatcatacatcttctctgttgattttaatcatctattttcagctttgaactaagattcggtattatgtgaaatgcagatccttaagaatgatgtagcagttgtagagcttgatgaatagaggaagatttggccttagagacttaaccaaacagattggtgcatgtcttcgactcatgtattttgtaagatttgattattcaatgtgatatgtgaagtttcttgaggaaacaaagtaaaggcaaaagaccaattctgatataatattgacaaaaaaaatatgaatttgacttttataattttgccatctgatgacatattcacttctactacaaaatgttcagctatgaattaaagccctctccaaagttgttggtctagaggaacactgctgattatacaggacaaagggtaaaactttaacctgaaaagctgtaacagaaacatgatacaggccaaacacattttagctgtgaccatatttgctaaaattatataattatgaagtcactgagaagatgaacttcttctgtttgatgagcttgaatccccaattgagacagtggccaaagacttagaggcccatgctctagcgttcatagctcctccctgcagattgcttcttctatgcatgcataattggacagctcggcttataaacccgacggtatgttctagcacgctttctagtctcatgttctg

SEQ ID NO: 34445 - DNA, 1477 bp, Arabidopsis thaliana landsberg
  unsure (1)..(1477): unsure at all n locations
atctcaatatatactcaattgttatttattttaaaatttgatatatttcaaatttatgttatgatatttttcatgcgttgtgtactacaaaactaaatatgtagagaaataattgaaaccgttacgtaagattttcaataatccatcgttgataccatattttggagatcaagtgtttcgactggtttttaaaacaatatttcaggtaaattttgagtttatttttaattttcacctatgtaacaagaaaaatgagtagttgccgtaaaaaaaaaaaaaaaaaaaaccaaatcaagaaaaatgaggaaacaaattttagttggcttagtggaaaatattaaaagaaggactattttgggtcttgatttttttcttctaaatccaagatactctaattttttccagtcataacaaaattaaaaaagctgatcacatttaattgtatccatttataacaattttatcaaaatatttttttgcagacccctagtttgagaaatagagtacagatattttgtggcctagaaaaactagatctactgtctagcgttcaaattaataataagagaaaactccttaatttggaaaatgaaaatgatctaataaaagtctaagagagaaaatattgatatctcgtctttaaactgtgtatgtataaacggggntttgttttttcttaagcctgtcaaaataagtttgattcaaaaaagggaaactgaaaaagatttctcaatttttaacggatttttcttatcattgttagcatttttaagaatattcatattaatttgctttgaaatcttttcttttgagtcatagttttaaaactgagtaatatatatgtgatagtcatttgttcgaccatataacacgaatctttggtaccaaaagctaaataatcttctataacatatatgatgattgacgaatatttaaaagcattcacagtaagctaaataattggatgtcaaaaaactgttaaaagaatatttctgttacgatcatgtcaccaattaatttctttttttatttactttaattattggataaattacaaatctgttttactattggataataacaaatcttttttatcaaatcaaggagttagttttaaaatatataacctactagatattttactgaatatgaatattggaaatagttgactttgaacaaaaacaaatatgttaaaaagaaaaaacaagctgagaaatctaataagggagaagagtggggaagtacaaaagcattttggaaggggagttaaacagaagcacagaacattgtgccattaattgtttttaattttagtttgattttttttcactttctcacactactttcaatgttcatatttaattttgttaattttgttaaacagaagcacagaacattgtgccaataattgcttttaattttaattagatattttttctttactcactgtctcacactactttcaatgttcatattt

SEQ ID NO: 34446 - DNA, 4130 bp, Arabidopsis thaliana landsberg
aagggaaaagttcctttccactgtcagtataagtactgttattaacggacatgttttaaaatctggagggggggcttatcaccttgtttaaatcggtggactgtgacaaaacattgtttctgactgattcaatgttgcagagatcatccatatcggtctgacaaaggtcatcagagtctccatctcgccaaccaaatcctgagttatttgacttctgtgggtatataatggaactcctcaagcttcccagttcacagacatccttcaagcctgaacatgtcgacctcctgatcaacgaatttattctggaacaacagaggaagtaaaataagaatcaagggatcaaaatcatggatagtgagaagattgaaactagagctgcaagaaaaaaacttacgaactccgaacattcattccttgagtagttattgggtttccacattcctgatatattagaaaggaggtcagaaggttgaagaaccagaaaaaagtttactgcataatgtactaaccgtaagagaattacggtaagctggataagattcctggcgctttccagtgacaaacgggtgctgcaaatgttaagaagctgtcagcactatgagcaacaataataacttagtattgtgcattgagagtaaagaacattttcacaattgtgaaatggagaagatatgttattcacaacacctgaagcaattcggttgcagagagtctcaagcttggttctctgaaaagataatttctcttattaatagaacaacagatatagatgctctcttgaaatagaatggtggacattgatctttacaggagctatctagataaagacaaaaacgaactggggaaaaaacttatgacttacttgtgtaagcatttcattagaaagtctttagcctctggtgagaggtcttctggaattggaggatgagcttttgttctaccaatatgaaggacagcagcaaactgaaagaaaaactttttaggtcttcttaggtttctaaaataaaagacagcgtcatatgcatcaacaatactggaaagtgtccttcacccagtgactctttacctgctgatactgctcgctccagggaggcttccccgtagccatctcaatcacagtgcacccaacactccatatatcagcagagcttcagattaaagaagaaggtcagaatgaaagttgcaatacacatggaaaaatagatgagaacccattcccactactcagagcatgtataatctattatcttacaaaaactaaggagatggggagaagaacataactggtagggtattcttgaaatacttacaagctatgaccagtctggagaatgacttcaggagccatccaataaggcgtccccttcatagatttggcaccatttacagtagcctagaagcataaagttcacaaagttttagagtactgaagagagaggcaacatattgaaatatgattaaagagaaagagaagcgcaatcatactagctctacaactttcttggaagcaccaaaatctgcgagtctgatgcaacctttgttatcgaccaaaatatttgccccctaggagaatatgacaagagttatagcggaattttgagaaaccacaagcatatcacatgttggaaagaggaaagtaccttaatatctcgatgcatgatcccattgttgtgaagatattccagaccaagcagaagttgctttgtgtacataataatcacctatttaaaaaagttaaagacacaacattcatcgccagcgaagctcaaatacaagatttagcaaagttcaggtacagtcagaacttactggctcaggaaaagatccaaacttcgccaacaaagatgaaattgatccaccaggaacaaactgcatcataatattcaacgaatcactctctcttacagtacccaagtatctctgcaaaaacaaagataataagaagaatgcatgtggaacagacattaaacatatgaaaaatagctgaatggattcgccaactcacaacaatgttcggatgtgaaagattcttcagaagttgtacttcttcctcgcgagccaccagaacttttgttcaactttagctaggcaaatgaatagaaactcttaagtaagcagcgctttagatgaaagtgaggcgaaccaatgatggctcacaaaatcttatactcagttaaatttctcattattgtccaaaaaaggcttaaataagcttcaggccttacctcctttgtgtccaaatttgtgcatttcttcatcctcgtcaatgtagcctttaaaaagttttaagtgttcaaactcacaagcaaaaggccaactcttctttctacctgaaaatccaactatcaagataagattgcacatagtttcaataagagcagtgaaatgattttggtgtgcagcttaaatatgttccctaagttcacaaggccaaatgggtgacaataaagtttcacaaacaacaactcatacgagaagctcatctgtacaagaaaacagaaacatgaatggaataatggcagtcatggttttaaaaacataaaacttgcaatcatatattgtaataacctcatggatagaactggaagggtgagacatttttgacgactttgggggtctaaaatgctgaacaaccgatgtttttaatccactacatacttgaaggtaggagaagagttgaagatgacattggagcagaagcactatatggggttcagatgtaacatttccatgtccaagtgcgtttctgcagagagcttcaagtcatcaaaaatcaccaaccaccactaaatgtgaactttatagttatctaaaattatcactaccatcagatattatctagaatcaatcgtaactaaaaaaaaaaaacaactttcagaaactagataataacagcagaagctagcaacatgtatactatttcactttttttagagtttctaagccaatcagaatgctctatttcacacccactcgcacaaagtgagcgttgagcgcgtgagagcaattctgtgggtgtacccctttccaaatcatgcctttttcaatctacgcactagtctccaaaattctcatcgcgtgaaaatttgtttgttttcttctctaaaccagtataaaccaaaccgcaaatcaattctaatttcaataccaatgtataccgaacctaaaaatcaattttaatttcaaatgttactatcaaatgttttctaatctagtttagcaattaaattgagaagattataatatagctagctagacggcaaaaaggcaacaatcagatgtgggtgggcgtaccggtagcagcagcagtaaccaccgtcggcggccgcagaataccggtgttagtggctgcatcaggcaagaggtcgatggcttcgaattcgggttcattcacgacactaaaagaaaccgtatccgtggagaaagagataaagaagagcaagttcatcgcaatcgctggaccaatctcctccgagcaatcagctcaaatgttcctctctcaggtccgtgatcctcgcgcttctcacaattgctgggcttataagatcggtgatcatcaccatcgatgtagcgatgatggtgagccatctggcacagcagggaagccgattcagtctgctattctctcttctggattagacagagttatggttgttgtcattaggttagctttcttcagtcttgaaacttaaatattgaatctttacaagttttgagaatacaatctcctcataggatgatgatgatgataggtattttgggggaatcaaacttggaactggaggtcttgttagagcatatggtggtgttacatctgattgcttgaaaactgctccttcttgtctggtcaagtccaaagaaaatgtctttttctttattgtctcttttgttgttcaacttcattactcctgtttgtttcttctcccaggttcaaatgggagttgaggtcacatttgatcttttaggtgttctttacaatcaggtgacagattctttctggctgtgatattttttttttgagattctcctgagtgctcatggatcatttatatatatgtgtcatagctgcaatcgtgtcacgctgaagacatcaaggaagactatgatactggtaaagatggtactgc

SEQ ID NO: 34447 - DNA, 710 bp, Arabidopsis thaliana landsberg
ctctagtaacgaccgccagtgtgctctaaagcctttagacccttctggcaatttatcccaatggatataagccttttcatctagttgaactttagaaacatcgaaagcaaatttaatatttacccagcgttgaacaaggacagcaagaatgaacatcccaaggatagaagctcctttagtgatatcttgaaggataccaccagacatatctttagtgatttctgatccagccttgtatccaatctcttgaacataccacaagaatgacatacgaatcaagttccatgcaacaaagaagaggagtggccccaagatattgccagtaagggcaagtgaagcaccgagagatccaaggattgggcgtattgtaaaccagaatactgggtcaccgataccagcaagaggtcccatcataccgattttaaccccttggatagcagcgtcatcgatttccacaccgttagcacgttcttcttcaagcgcaagagtaacccccatgactggagcagctacgtatggatgagtgttgaagaactcaaggtgacgctcaagagcagcgatttgatcttcttttttagtatagagttttttgatagctggaatgagtgtataagccccagcccaagttttgcatccgtcaaagttcaagacccttgtaagaaggttgacagccacaaacttttttacgatctgatttagtaaaatgagtt

SEQ ID NO: 34448 - DNA, 769 bp, Arabidopsis thaliana landsberg
ctctatgataacaatattttttattggttcatgagaagttcgaacaagggttggaatcatgagccatttctggtataccatagctcacctgtcatcatccgctacatacctgtcacctaaacgaaatcaagcaattaggatgcactgatatctcattctcacctaccatactactatttttaaatattgatttataaccaaaaaatcaagattacaattctctttggagatgattatatcttcacgttacaaattaacaaaataaattaagatggatatgaaaatagtgaaataaaaaggaagatgtagttttgaaaataataacatttcttttctgattcctccttaccatgaatgtacagagacaagtacaactagctgtacttggaattggagtcataaaaaaagattaaatgtcataaatgttaacaggtttgggagactaattgcagcaacaaggtactacggaaactaagatctgggaattatttagttaataaatgacccactattgaagtcacatgggttttgtgataagttttggagacaaagtttccatgatatggctaactaggcagaatattagctggatataacactactcctttgacacaataatctcttcaacgattcagtttcgaaaatcttgttgcgtgcatgaatctgttaggcactagaaacatgatgactctgtctaaaagatcttaaaagacgaagactggttctgtttggttttcgtatctagaggaacatctagtaaatgtgttct

SEQ ID NO: 34449 - DNA, 743 bp, Arabidopsis thaliana landsberg
aactagagacggtcaatgcaacattgtgggtaccaagaaatcgtgaaggaccacctttggaaacggcaatgatctatgatcgttacggtggcaatgcagacataaaggattattacgatatgtggagacacgaagttaagtgtgttgtactatgattgtatgacttgtcaggttaggatcattaagtctccaaggctgcgcaaatggtggcagttcggtgttttcttatcttccctcacctctttctttagatagatcacaaattcatagatgattttgatcgaatagattagcgatttggttcaagagagttgttattttttcgtctttagaatatatatagatcaataaaaaaaaggttacaaagttatcttaattaattaccaaaaaaagaagataactctctaaagtagtagagaagagaaagacttcacctaaacaaacatagtttcgtctataaatcatatcacagaaaacaaactgccacaaaacattttaacaaaaaggaaaaaaatgtgaccacagagcgatttggtattcagtttctggcttcgaagaagtcttcttctttatctacctaagaacagattatcatcttctttgctctaccaaaaatcgtaagggggagggtgaattccctgtacagagcgtaggactcatgacatggcgcaaaatgtggacggccatgagtacaatcgaacggatggctgcgctgccacttatgacataaaataatatatctt

SEQ ID NO: 34450 - DNA, 431 bp, Arabidopsis thaliana landsberg
atgttagaggtactctactcttttaggatacctaatggacattaatttgaaattagaaataatcacatgaatctgacatactagacaaacgttcttctctgccttttggttttggatgccatttcttgactggcctaggaattctttatctgttaacgtcaaacaaagtttctggtttcatatatttcatgtttcaatgcatctgagctttcatacttttcgctatatcatctatcaagatcctagattcctcagttccttctttgtatgattgcattcaggtgcaaaacggtgtacagttgttgaagtacatacaataaatagttgaggctgcacgttcaactttcaaagctccagttatcaaaggtaaaccagcagccggagacacactctacacatgttgaacccaatgctcaggagcctgcatctct

SEQ ID NO: 34451 - DNA, 5631 bp, Arabidopsis thaliana landsberg
  unsure (1)..(5631): unsure at all n locations
agttaaactaaaataaaatatgaaatcaaataagagtttattacttaccaattcgtgtgtacgacttaagaagctcgtcgaacccgcatggtgcaccgccatacctttcccaccacgtttgcttctcttccccatgatcaacaccatgcattatccaatcgaagaattcttcctttgagattgcatctaaccggaacgcaggaattgttcattttccatttaccataatatgaagcttcttcttcgaacaaatgtcttgcaagtctagtctagactttaaattatggttcgtcttacctggcacatttaagactgtattcatcatgttgtcatgcatgttcttctcaatgtgcataacatctagatgatgtctcaacaaaagatccttccaatatggcaattcccagaaaattctcttcttatgccaattgtgattaactcatagccgtcaacaagatcatgcccattaccaccaacctcaattgatgtagcagcaccaaaatctcgtaattgagttagcaaatatgtgtcatctaactctggaggtgacccataaaccacttttttgttcttcgtaaacaaagtggtgctttgacgatacggatggttactcggtaaaaatctcctatgacaatcaaaccaacaagttttctgtccgtacttcaattggaatgcatgagtgttatcttgataatatggacacgataaccttccatgtgttgtccatccagataacataccatatgcagggaagtcgctgatggtccacaaaagtgtcgtacgcatgacaaattctgttaggatgaaacatcaaacgcttcaacaccaatctcccataacatttgtaactcgtatataagtggttgtagaaacacgtcgagtgatcttcttggatgatgtgggccaggaacgaggaaggtcaagaatataaactctcgtttcacgcataatgatggctgcaagttataaggtgtcacgataacaggtcacaatgagtactgacgtccatgcttcccaaagggattgaatccatctatacataatccaagatatacgttttttctctcggaagcaaaactaggatgcactgtttgaaaatgtttccacgcttctccatctgagggatgcgtaatttttccttctattgtttgctctacatgccatctcattggcccggatgtgcgcttaatttgatataacctctacaacctctctgataatggttaataccacatctgcttgtatnnnnnnnnnnnnnnnnnnnnnnnnnnnnnnnnnnaggtttgcggtaaaacttatatgtcaagcgatatgaatcttctctccagaacaacatacaattgtcaatgcacacatctatcacttgatacagtaaaccaagaccagctaccaatttttgcacctcgtagtacgttcccgatgcaagatatcttcggataataaatctttcacaaaatcagtaatcgcattcacacaatcctcggacaaattataatccgctttgatacccatcaacttggttgcagcagataaagacgaatgatcctttttacatcctttatataagggatgttttgatgcatctaacatattaaaaaactttcgtgcttctaaattaggttcctctactctatcactattcccatcaaacgagtgtatattttcacgaaaagcatcattcaccatctgaacggtacctacatttgtatctatttttggatttggtcccactaacctatcaacaggataatgttcgctacaactaccataattcaccattcactacaagaaaacagacgttaaccgactacaaaataagtcgtttcatagtcgtaaacggaataatacgactattagacgactaaacaatgagttgtatatacatagtcactaagcaacatagtcgtatgttagtcgtaagtttacgactaacatacgactgctaaacagtcggcaggaaatagtcgttgattggtcgtaacatttggcgactatatggcgactatgttacgattaattaaactgtatatgggggatgattcttgtagtcgtaaaattgtcgtacttttattgacgactactttgcgactagtttacgatcaattgtactggactgtggacactattctggttgtcgtatcgtagtcgctaaatagtttacgactattttacgacgcctttacgatcacttaacgactttcttttgttgttagataatagtcggtaatattggtgactattttacgactatgatacgactattggacgactattttacgacgactttacgacgacattttgtttccaaataagaatttggtcttatcttgattttttgttggttggtcatcgattatgagaattcggtttgtttgttgtttgaaatgctataaagtattacaaaaagacaattattattgaaaatcctatcaaatacataaaacacaacttacacttatgttcaaagttctaaaacacacacacacacattattgttcaaagttcaagggaaaagggactgaaatctaaacctattgatcattctgtggagtagctggtagaggctctgtggttgtcgaagattgagaggccatgaagtcaaggaatggcggatctgtttgtcggagatacttctccactaaggacaagtgttcgagcttgtccttttgctcaaccgtgattcgggctgtctcagcttcacgcgcagcaatctcagaatctcgcttctcattgtaggcagcctgctcctcaatcttgcgttgcgcttccttcagccgttcttctaaatctaggaaggatgatgatgattctccagggagattgcggttggaacagcctaatgtatctttgagactgccaagtctataaagattgcctctggaatccctttcggtggactgaaaagaaataaagaagagattagtgacagaataaccataaactcaaagtcaagaggtttagactacaacatcttacctcgagaaagatggctgtatactcatctattgtgagatccagaggtcgtgaagtgccatcagagacatcagaagctgaagcctccagtttaaacagctttgatctcacattccgctcataagttctagcaatcttctccgccttccgatcaacataagtgccatccgacttagtgtgtgtctggatgaacacctcacctagatggactgttcttcccagtttctcttcctgcaaacacagatcaatatcacaagtcgaagacagcttgaactgaacaagacagacaataaaactctaacttatgatttgaacgactctaaaagacatgaaaggatgctgaaacacttaccatttcatcttggatttcttgataagactttggcccagagtagtggatgtgtggaccgagaccgttacggtcagagagccgagctttagaataggtctgactacttttttttgcttcttctatgtcacagtaagcacacattgttccccacagagtttctccaatccatgaaggctgctctcgagttctcctatcggtgctaaccatgtccttcaagcgcctcttaacgatctcattaaagtagtattggactgtccctgttattcagggatcccagtggtgagttttctacaaaaaaagtgtgaagttagtgaacacttgacagattaaatagtaaagtctaaagaaagttggagaaatacaagaagcttaccgcaaactctaaaaacaatctttctcttttatccaatggcacacaggaccaattatagtagggagcattgaacttttgagtaaaaatccttgtgatctttctaaccaatttagatcctctctcgcgagtaaacctccaaacacatgcaacacagatagaagtaaacatgtttaaaatccaaaacactacaactacagcagactatataactgaacaagaggcaatctacaagattctagacaagtataagccgacaagatcacacacagaacacaatagtcaacataacaagatcacacacagtaaagaacttaacaagattctagacaagtatagaacaaagccagatcctcaatgtcaaagccgaaaacatgctaagttcaacaatcaacaaatgttccacaattaagttcatgattcacaacagaacacaataaagaacataacaagattatagacaagtatagaacaaagacagatcctcaatgtcaaagccgaaaacatgcaatgggatacaatcaacaaatgttccacaattaagttcatgattcacaacagaacacaataaagaacttaacaagattatagacaagtatagaacaaagacagatcctcaatgtcaaagccgaaaacatgcaatgggatacaatcaacaaatgttccacaattaagttcatgattcacaacagaacacaataaagaacttaacaagattatagacaagtatagaacaaagacagatcctcaatgtcaaagccgaaaacatgctaagttcaacaatcaacaaatgttccacaattatgttcatgattcacaacagaacacaataaataacctaacaagattatagacaaagtgaagaacttaacaagatcacacacgagtttagaacaaaggcagattctactatgttacacaaaccctaacaaacatccaactccaacaaaggcagattttactatgttacacaaaccctaacaagccattctacagaccataacacgagttacactacacaggctaagaacactagaataaaatagaggaagaaaacataccactcggttttaggtttgggaattggagataagacacaacaccactgctccctgtttggcacagagagtgtcgattgcagagccaacgccgagtcttcttgtagctccggcaacgtcccaggaacttcctcttggaagttgttcccttgagacgacgggtggctgtttgctggagcgtctgaatctcgcgactgacaaggagtttgctgaggtggcgctgttggtggcggagtgtagtggacctcttcagatagaggcggaggagcttgatgttgtggttgagtcgttgagttctggaagagttgcagaggcggtggatagttgcggacgtggggtgcagacgttgaaggtccatgttgttgagccggctccgtcgcaggaacttgaaccgccggcgtcggagtgaagttgtattggggaggaagatttgcaggtcatgaaccgccggcgccggctctctgagtgacgttcggcgtcgtcttacgcttccgggagccacctcgaccggcgatatgcatgatagtgagcctaatgaagagattgaagagaagaagaagaagaagacgaagcagatcgaagaggctgaaggtgagagatcgaagaagatcgatcgatcttagcagaagaagaagaagatcgatctagaaggagaaaggatcaatcttagaaagagttctggggattagggttttcgagacgaagaagaagaagaagaggaggttggatcgaataggtctaaggtgagagatcgaagaaaatcgatcgatcctagcagaagaagaataagatcgatctagaaggagcaaggaccgatcctaaaatgtgaattggggattatgtttgatcggacgggtaaggattataataggggaatt

SEQ ID NO: 34452 - DNA, 573 bp, Arabidopsis thaliana landsberg
ttcgaccaggtggatgaggattttgggcgagatatctttgaggtcgaagccacgtggtgaaggagtccgccggggccctctatgaccggatgtggggttcatacggtcgtgaggtggtccgggcgcgggccgaggctgcgagggctcaggtaacgttgttgtttgtttggcgtttgctggatgcggtctgtgcgtgtgtttgctgaatctgtgtgtcttgtcctacgcggagcgcggcgagcgggtggacgacttcggggctctgaacagcgcgctgccagacctggagcagaccctcgcggaggctgtgactggggtcgccctggagccaaccccggagaccgcagcgatcgtgacggctgcccccacatccgctgtggccggcgaagacctgcccccgaaggtggccgaaggcgcccctgatgcccccgcagctgctgtgccgagtgctgaagatccccgcggctggtgcgcggcggtagccatacggcggagccaacggcggaggtcccgcagcgtcagggccctcgcaggtggcgtagtaggtgtttagggttggggaatttttggatg

SEQ ID NO: 34453 - DNA, 1474 bp, Arabidopsis thaliana landsberg
gctgacaccactgtactacctatctcttctttatgaatcttcaaatgtctttttttacgctataaactcactttcttctcctgcgggagccaaataaacacacaaaaaaaaactcaaaatcatgagaagctccgatcatatggcgtttgccggcgttttgccgattgttttcttgcttatattatcatcagcggatctagcagcgagtcaatcacagcccggtccaacaaatcaaccgtataactacggcagactaagtccagccatggcagtgatcgtcgtgatcctaatcgctgctctcttcttcatgggcttcttctctatctacttccgtcactgctcaggcgtaccagacagccggtgtttctccagctggtggagctagatccagagcaaccgtcaacgcggcggcgcgtggtctcgacgtttcagttgtcgagacttttcctacgttcttgtactcagatgtgaaaacgcagaagcttggtaaaggagagttagagtgtgcgatatgtttgaacgagttcgaagacgacgaaacgctgcgtttgcttcccaagtgtgatcacgtgtttcatccgcactgcatcgatgcttggctcgaggctcacgtgacttgtcccgtttgcagagcgaatcttgctgaacaggtagctgaaggtgagtcagttgaaccgggaggaactgaaccggatcttgaattgcagcaggttgtggtgaatcctgaaccggtggttactgcaccggtaccggaacaattggtgacgagtgaagtcgattcgaggagattacctggtgtaccggtggatcttaaaagagttaaattctcgagatcgcatacgacgggacattcggtggttcaaccgggagaatgtaccgaacggtttactcttcggttaccggaagatgtgaggaagaggataatgaaggattggaaattgaaccggacgaatagtcttctggttcttcctagaggagggagttcgaggagaggtaaaccgattgatcggtcaagggctcggtctgatcgatggttgtttcgtaaaacgccttcgtttctgtggaggagtcgtgatgatggttcgattaggttaggtgctaccggtagcgttcgagccagtgctgtaccgaattcaaccggtagtgattcggtacgtgcaggagaccggtgggcttttcttagaaacgcgtcgtttttgtggaggaactcttcggtacatgtgccaagaggaggagtcaataaagacggcgaaggaacttcggttaaatcgaccggtgcaagtggctcaactagcggttcggtgagattaccggtttagttgacttttcttttctcatctttttcatttgtttttgtttgggattgttgataaatacgcaaatacattttcaattttttaattgaattatccttgttttgtttaaaattctctgtaacgtacatatgaagtcagatccaaaacggattcggttt

SEQ ID NO: 34454 - DNA, 223 bp, Arabidopsis thaliana landsberg
aaataggaataagctcacaattccagacaacaaacgagccggaagcatacagtgagaagcctggggcgcacaatgagtgagataactcacaggaaatgcgaaacgctgactgcccgcgatagaagcaggaaaactgacgtgctagatggactaatggacgggcccaaactctgagagataaggactgcgtagggcacgcccgggaggtgggccatatcacgag

SEQ ID NO: 34455 - DNA, 5596 bp, Arabidopsis thaliana landsberg
  unsure (1)..(5596): unsure at all n locations
aggttcctgttatactatcgcactgtcacagctctagttatggtggtcattttgcaaccttcaagagaatatccaaagttcttcaagcaggcttttggtggcctagaatgtttcgggatgctcagaagttcatatcgcaatgtgacctttgtcagagaaagggaaagatcagcaagcgtaatgagatgcctcagaaatttatcctcgaagtcgaagtcttcgattgttggggtatagatttcatgggacccttcccaccttccaacaagaatctctacatcctactagttgtggattatgtctccaaatgggtagaagctatagctagtccgaagaatgattcggcgtttgtcatgaaactcttcaagtctatcatcttccctcgttttgaagtgccacgcatagtcattagtggcagaggtaagcatttcattaacaagattcttgcaaaattgcttttacaaatatggagttcagcatcgggttactactccctaccatccacaaacgataggccaagttgaagtttcaaacaggcaaatcaaagagattcttgagaaaacagtgagtaaggcgaaaaaggagtggtcctacaagttagaagatgtactgtgggcttataggacagctttcaaaactctgcttggaaccacaccttttcatcttctatatggtaaagcttgtcatcttccaatggaattagagcacaaagcagcttggacagtcaagatgatgaatttcgacatcaaatctgctggagaaaggagacatattcagttgaatgagcttgatgagatacgaattcatgcatatgacaactcaaagctctacaaggaatgcacaaaggcttaccacgacaagaagatcctcactcgaacctttgagcctaatgaccaggtacttctttatgattctagattgacattgtttcatggaaaattgtcttctcgttggtcaggtccctacatagtccattcggttaggccatatggaaccatcgtttttacagataacaatggaagatcatttgatgtgaatggacagagagtcaaactctactgggctgaaggcgagattccagtagaaaagcctttggatcttcaagacccacctgttgattaagcaactgcaaagtcaagctattgactataaacaagtgctaagtgggattttaacttaggatttttggttttataggattctattcacacaaaaaaaaaaaatcgtttccaccaaacgcgatggggtcgatcaacaccatcggattgtcgatcgacaccctcattttccaggtaagtcgatttaacctaaacttcatcttcttcatttcagttttttttcaaaccgccgaaatcactcttttctctctagattctcggattcttcaccgattcttgtgattttaggctctaatctcattagaatttcatcctacatctaccccaagtgtcaatttaatcaatctgcaacatggctgagcagaaaaagaagacaaggaagagcgttcctccaccttcctcctctggcgctcatcctcgccggaacttctccaccaccgctggcctccgcccttcacaactggaaccaccagctgtagcgcctcaacctcccatccatcgatttccatggccaaagccaccaaatgagaaaattccttctcaaagagtttgggaaaaggatgtcaacagagaattcactaaaggtgactatatcaatcgccttttttctccagattgggatgattattatactctgttctataatgcctggatgagtgtagaaattttgactactcgggttgcgaatttcggtttgatgtagcgtttgcagatagagaaatcttgtttaggactgctagatgatgtaggtttgggaaccatctgttgtaggcagtacgatttgtatcctgagctagttagacaaatcatggcttctgctagggtctactatgtgaatgacaggaaacgcaatgctcaggaaggagctcttatcttcttcatccgcggtgttagatatagtctaccactgagagagagttgtgtgacatctatagttttgacaatgatctcactggagttgcactacctggacagtttaaggatgctcaggttttctggagccggtttggtaatggaacttatgattccaaggacgcagtacactcaaagattcgtcaccctgttctacgatatttggttaggctgattagtagcacattgttgtgcaagatggagcctggaaagatgagactctctgagctgttgttgctctatcatgttgttcatgacttctttccagacagcttaggatttgaggaggttgaccgcgatgtcaactttggcgctgtgtttgctcatcacttggtctcactcaagaccaagccctttacaggtagagggaagaaattagagagagttggcagtcttctcactcccatatttgagcattttcgcatcagctttgagggagaagaggtcaacaccacgaggttctctatggatgagagttatctcaagaaatctcactagctaaaagacaacttcctttggtgtttcagagacgagacatgagaccatatgattcggttgcattgcaccgcgcttacaaagattacaggcgagcatgaggagctcagtttttgtcctgatccttcccttatgcatgcagcaccacgcaccaggcgacatagaggtttagcttcaagagttgcgcctacacagactgaggacgagttcattgatcctgctggggatccgagagttggatcttcttcttaagctctgccatatcagctgccttcccctcctcctatcccgatggagccacatgtctttcagcagtacatcgtcgacagcttcaagagcgtttggaacgccatagctacattgtcttgctgtggttgcattgctcctactcgccatcgtcaacgttcaccagtacccacttttggctccgagcatgagaataagccatcttccctatctttgcttcctgctttcgattaatttttcattcttgagtcatttttcacttctatgagtcggtttgttattttatttgaaacttgttgcacctatttcattatgcttatttgaacctattaatgtgtgttttagtgatttaatagtttcaacttgaggatccatgtgaaaacactaaccttaaataaacaattctgagcaaaactcgaagagcaacatattaacgacatgggtgtcgcaccaaccaggtattgatcgacactaatacacggtaaaggtggcaacttcatttttctaaatttacaaatcatataattattatttttatttctctagcttattaactcaagggatagcgttatataagtcttggggagtcagttgctaactatatctttccttttcttaggagtctgttgcgtcgtttttagtataatgtcattttattgagttaaaatattttttagaaattataatagttcaccaaactagattccaatgatgaaccgtaaaccgaaaaatcgtccatgaagacttccatgaaattttcaatactctgtgaagattgacatcatacgatattgaaaggtgggaggtgcattgtagagtttgaaaggcattcttctacatgcgtatgttccataggtacaagtaaaggttgtcttctcttgatcgtccgtatgggttggtatctaaaacaaatcctgaataaccatttaagaaacagtaaaattgatggttgcctaacctttcgagaatttgatcgatgaaaggtaaagggaaatggtcctttctagtcatggttgagcttccggtagttgatataaccctgttttttacctatgttttcgatataggattttgagtctttttattatttctagagtctttttagagtctttttaggtattctatgaagaggaataacaatggagatgaggatacattttagagcaaaagcgaaagacgatttcactttcaaatccaatcaagagtgtcgatcgacactagtttcggcccggagatgtccctgacgcttaaaagtttacagaagtttaaatttgccccataagacttccctatttgcactgttagtccctggacgtttttaggtcatatatatagttttagaggtcattgttgagatctaagttcttttctaccaagttttccctgagagacataagctatgcatcccttgttttcacagattcattcagttttcaatacagtgaagagatcctttttaactcttttctttattgatggctttatgctttcttacttgaatatgctgcttgcttcaatctctatgtctgagtaggttgcttgctagggttagggtttatcattacgggttcatatgggttagtagatcgccccctttctaggctatctgtagaattcttcatctttgattattcttaatgctagttttagagtaagtagctagaacttgagtccaaacaatagatatacccgccataggcatctgtctttggttctataatttgatgaacctggtttacaggtgtgtaataagaatcggcctatttaccaaggtgaacaatcgaactcgattagaatgcatgtataagtataaggtttctcggcttctttggttatttttaactataggtattgagagtttcccggaacgccacctgttattccaaaattagaattttaatttaagaatggttcgataataacctagctataattagatctactaaccaatagttttctaagaataccctaatcctgaatctatattttatcgtttcataaccaatcaatcttctgtcttcttactttgtttactttttatttcactcattttcttctagcttaatcttgacactcaattcattgtgtaaagaaaagaattttgaggaaattntacattgaagccgttcttaccaatcacttgaccctttggtcgagtaacattggagccgttcttgccaatcactcgaccccatggtcgagtaaccacactccaggttactcgatgacaccactcgaccgcatcggcaagcaacactttgtcacaccacttgacaaccacttgaccattcactctaccacattactcgacccccttgtcgagtatcatcactcaccacccatcaaatcactagaccaagcacttgatcacaccttcagagtcttctcaaatccgcactcaaacagacaagctgagcataaggaagagaagaggagaagaagaagtgtttggaagcggcccggagcttcacccgatcacaaggcccagtttggcccattatcattctatgggccggtcgattggattcccggcccatctcctatcattttgtataaataggtttttgatggttttgacccaggacatccattttacatccagtttttgcttcagtttttatttatgtcttacctagtttactcttgttgcgccgctttgctctgcaacttgtaattcgagatttttccaagttattcagattccgcatttgatttcatctgtcatcttgtttctctactctttatctcacttatgcaatattattatttatctgcgtttatgtctttgagcatgttgtctgagtagtgacttataattcttaggg

SEQ ID NO: 34456 - DNA, 3413 bp, Arabidopsis thaliana landsberg
aagtcgaagcccggcaaaatcaaccgaagcaggtcctgcacactgcttcgtgtcactcaccctacataccagaatatgtgggtaatcatcttgcagcttctgttgcttcggctagtcaacctcaagcttcctggcaacaacctccgcctccaccaccgctgcaacaaggtcaacagccagaagggggccaatatgctccacaccagagggacttcagagagcagtccgaagctcgtacagtcaatagcactgtgccagagtcaaagcacatctattgacaaatatcctaccttaatagcaatctttttcattcagttttattttctgtaataaaggacattgtttaaatttcatgtaattagtttcgttgattcctacaaggaaaatatgttttcttcacaggcttaaattgattgaagttcaaagacttgtgataataaagaggaccttcgaactatcgaaaattcttcgaagcaacaaaaagtcgttctaaggaacgcagagtaagtttgccgaagtcacaaaaaagtcgttccaaagggagcgcagtgtaagttttctgctccaaagtcgttccaaagggaatgcagagcatacaacgaaaagtcaacgctgataccgcctaagtaaaaggctgaaagggaaatgtgcctttgggccatttctaagtattttggtgattgagtgcaaacacaagtgcttaaatgtgaaaatatgcccaaggatgatcaaagtgcaaatattcaacaaaggtatgtttctaagtcttagtacattggttttgtgtactaatacatttgtctaagtgttagaaacagaaagaagaagagaagagaagacttggctgtgtgcagccaaggggctgtttcggtctggggcaccggactgtccggtggtgcaccggacagtgtccggtgcaccaggctgcctcggacgaagaggccgctctcgggtttttctccggcgacttcggctaaaattcaccggactgtccggtgtgcaccggactgtccggtgagccaatggtcggccgggccaacggtcggccgcacgatcgccgcgcgacacgtggccgagccaacggtcggaaggaagcaccggactgtccggtgtgcaccggactgtccagtgcgccagatctgcaacggtcggcaacggtcggcttcgccatttaaggaaacaaatcgggcaccggacagtgtccggtgtgcaccggactgtccggtgcgcccgacgacagaaggcaaggatagccttccagatgtgttctcaacggctcctagctgccttggggctataaaagggacccctaggcgcatggaggagtacaccaagcattcctacaactcttctaagcaccaagacatcaatctcacgcattcgtttcattgtgatagcatatagagctcttgtggagttgtgaactctttgtgttgcgttgcgagctcttgttgcgacttgtgtgcgtgttgttgctctgattttcgagtcttgtgtgcgttgctcattcccaccttactccgtaattctttgtgaactcaattgtaagggcgagagactccaagttgtggaggttcctcgcaaacgggaaaagatcaaaggaaaggaaaacaccgtggtattcaagttgatcattggatcacttgagaggagttgagtgcaactctcgtccgttgggacgccacaacgtggagtaggcaagttttgtacttggccgaaccacgggataaccaccgtgtcaactctgtgattgctttcttgtggttattgtgttttgagttctctctagccacttggccatacttgtgctaacacttaacaagtttttgtggcttaagttttgaagttttacaggatcacctattcaccccccctctaggtgctctcaattggtatcaaagtcgttctcttcaagaaagggactaaccgcccgaagagatggatcctaaggggaaaggaattgtgatcaacgacaaagaaaaggaatccttcatcaacgagccgaagatgacaagtctaccgactccggctcggggcatagacggaaggaagggaagaagaagaagacaaggcgcatcaaggagatcatctactacgacgatagtgatgagtctacttcttcccaaaaggacgacgacaacgactacaaaaagacggtcaattcgaacttttcatttgattattctcgtattcaacatagttcgaattcacatttgctttccattcctcttggcaaacctccacacttcgatggggaggactacggattttggagtcacaaaatgcgtagtcacttattctctctccatccaagcatatgggagattgtggagaatggaatgaaatttgatagctcggatagccctatgcttataaatgaacaaattcatagaaatgcacaagctactactgttctcttagcgtctttgtgcagggaagagtacaataaggtgagtggcttggacaatgccaagcagatatgggacaccctcaagatctctcacgaggggaacgacatcaccatgatcaccaaaatggagttggtggagggcgagcttggaagattcgccatgataaggggagaggagccaacacaaacctacaacaggctcaagtccctggtcaacaagattcaaagctatgtaagcacaagatggacggatcatgacgttgttcgcctcatgctaaggtcctttactgtacttgatccacatctggtgaacaatattcgtgaaaatcctaggtacaccaagatgtcgcccgaagaagttcttgggaagttcgtgagcgggcgaatgatgatcaaggaggcgagatacgtggacgacgcattgaatggtccaatcaatgagcctcaaccctttgctcttaaagcaacaagaagcaaggaggcgctacctagcaaggtggcacaagttgaggcggcagggctaaatgatgaagagattgatctcatcatcaagcgcttcaagatggcgctaaagggtcacaagggacagccaagtaagaccaagacaaaggggaagcactcatgcttcaagagtggtaagattggtcattttatcgctaactgccccgagaatgatagtgaccaggaacaagagaacaagagggaaaagaagaaagcttacaagaaggctaagggtgaggcacaccttggaaaggagtgcgactcggattgttcgtcgtccgactccgacaacgaaggactcaccaccaccgccttcaacaaatcggccctcttccccaacgagcgtcatacatgcctcatggcgagggagaagaaggtatgtactcgaaatactacttatgcttcttcaagtgaggacgagtctagtgatgatgatgaaatagattattcatgtttattcaagggcctagatagaaccaaggttgataaaattaatgaatta

SEQ ID NO: 34457 - DNA, 3738 bp, Arabidopsis thaliana landsberg
  unsure (1)..(3738): unsure at all n locations
atcacatcaagcttcagtttggcatcaacaaaactccacaagggtcaacagaagatggaaaaacctctgaagacgatagagtgatcccaggagaaggatctgagactgagagcgtaaaagagcttaaaaagaggtctgataaacaagaaaaatctatagaggagctagcccacattgttgaggaacttaagagtaagctgaatcagatgcaaaaggaagctcagcctaaaggcgggattgacattatcccaagaaaaaagttcacttcaagatggtccgaagagatagattaccctccaggagagaaagaagcctactttgaagaaaggggaattgagtattatgctgcacacctctccagagaggacgctgaatatgatgatgatatcagagaggacaatgcagaccctctgtattacccattttcttcttaatcaagcgagagactttaaacaagctcacttgggaggaagtcccatgactatctctgtaaataaatttttattttcttgttatttttgatttgttttagttgtgtttgtggttcttagtaacaaaggaacaacgtggagatagagtaaaaattcaaaactcttactctacaaaaggcctgaagatcgagtgtatagcccagtggagtgcaaaattttnnnnnnnnnnnnnnnnnnnnnnnnnccttgcattcgagtacatcagtcgagtatgtgtgatgtttaaaacccaaaaaattttaaatcattattatactcgaccaacagaagctacagagtattacagggagtttatcaagtttacagaggattatagaaggttctaatcaacagggaacagtgcttcaggacaaacagaccaagtgcggcccaccttctctcctctttgtcccccccccacgcgtttttagtgataaggaaatcccaaggcttcatcacagccactcgatccaacctcatctcttcccaccgacgccatctctccctcacaactctcacatgaccaaacctcacccgtcatctctctcaccgtctctctttcactcgattgtgacgtcccctccaatcaccgcttactcgaccacctgaccttcaccgtctctccgtcacctccgtacactcgaccttgccgttccagtttcaccattcctcacagcttcgtctccttctcactcgatcacaactcgacctctccgcgcttcatcttcatcttcatttactcgacttcgccggagctccttgccgttccagcttcgcatactctctcaccgtctctccttcactcgaccacttcacacttcgcctcaacatcttcgccggagtttctcgccattgaccgtgcttccgtcatctccgttcactcgacctcgccattcactgcgcctccattcgtctctttactcgactgctcctcaaaccgccaccgtcttctctaaattcgccgtttactcgaccacgttgttacgtctctcattcgtgtacactcgaccgctatacccgaagccacaatatcactgtactcgaccgtttcactcaaccgcgtacttgactggtttagtgtgtgtgtttatttgaactaacatattgatatttggttttgagttacattctttttcagggaatcaatatgagtaactacagtggcgaatcctccatggatgcggattacaacgtcgatgaagctgaaccttggtcaactagaccagagagagagcaacaggcttatgagagcttcagagccgagacccaacgctcagtagctcgacgcaatgaaaggagagctgagattgctagaggaaagagagcgatgacctgtagatatgagttgatcgacgaagatattgacgtcgagtatgagcctgagtcatggcacagagaaacgaagctgttgaacaagcctgatgaagttacaatggaggagtacatcagacttttcgaggtgaacgacttctggggaacgaggtacccttgttatgagactctagcccagctggggctactggaggacgtacagcacttattcgagaggtgccatcttgagacgctgatgtcttacccgtacgtcgcttacaagaaggaaacaatagagtttctctccactctgcaagtggagttgtatcagggacttactgcagatgaactggagagtgaagggttggggttcttgactttttcagttaacgagcagcgttaccagctatctatcaagagcttggaaggattatttggttttcccagtggaaagggaactaaacccaagttcgagagggaagagttgaaggatttgtggttaaccattgggaacgatttggcgctcaactctgcaaggtctaagagcaaccagattcgaagccctgtgatccgttactatcagcgctcagtagcgaatgttctgtaccctagggaatctacaggcaccgtgtctaacacagacatggagatgattgattctgcactcaagggcattctccggagaacaaaggggaagaaggtcctaaagggcaaccttaatgatacaccaccggttatgcttctgttgatccacctgtgtggatacaggaagtgggcgcacaccaacgggaagaagaaggtgcgaggagccctttctgtaggtggcgttgtgacaccgattctgatcgcatgtggtgtacctctcacgtctccagggtatgatccgaggatgatggatgtagatcacttgcgtcgttgtgagtttctggagcacgatatggttggcgatttctatcgctacaaattcgagcactccttgacccgaacagccaacattctacttcccttcaccgaggccacaatcatactccagggcgaaaacattgacttcaagcctacgcgtgattacctctactttgagagcgctccaccgactgatgacaacgtccctacaacagaagctacagaggatgagattgctgagacaaatgaggatagggaggaggagtacgatacgagcatgtatcattttagtgagcatgtacctccagcgagggagagcaagagcttgagcgaagctcacagaaacaacagcaagttgcagaagtggtgcaagaaacaagatagactacccatcaagtgcttcaaggccatcaagtttctgacagacaagctaagctgctcctcttctaccatagctattccgcagggagagcctcctcaggacatgccctcgaggagatatgacgcgccagagccaactcgccttaggccagagccaagttcaacacaggcctgagcctagtgaccgagtagtctcacaagtccctgcgaggcattcatcattcgagcctcgagagcttgggagaaggaagaaggctggcagcaggagtacacgacttctccagtcccgtagcttacgcgaccgcggtgctggccgcagcagaagaagagaggtcgagtatcatcagagcggtgctggccgcgacgaaggagcagaggtcgagtacccctagggggaagctgagacacaatagggagattcttcgatggcctgggagcaatcacaggcggctattgacgaccaactccgctccttcttccactgaggtaagcacctcactccaccattgtaatataccatctcctgtttttattttgtttctgtgatgtgttttgtcctgagtactctcttccaaatttggtcacacagtggactgtgtgatttaagtttgggggagggctctgggaagtgtgtgttgcattgtatataatcttgagtctgcattcatctaag

SEQ ID NO: 34458 - DNA, 603 bp, Arabidopsis thaliana landsberg
cgtcgtccatacacaaaagacaaagcttggtctggtgaacaaatcccttgcagtgatcttgcccaaattcgcgaagatttgctcccaatcgtcgcttgaacaggggcagaggcaacgggaacacgtgttcgaccgcggctgacacccctggttcacgcgcgttcgcgcaccacgcttcccagtgcacgcccgcgcgcactcgccagtccacgaccgcccgtgcaccgcgccatgcctataaagccttcccaggcgcgccccacttcgccccgcactcaccagcaccggccggccaccttcccttagctccggcgagctcaattccgcccgccattgccgccagagcttcggccaccgtggccagcccactccagccaccctcgagtcgagccagtgcttcggctagctccgccagtagcccgtgaagctcgccaagccctcggaccaggccggacttcaccggaggcccgagatcaacctcaccggacttcggtcttccgccgccgcgcgtggaccgagctaaccagtgagtctccgaccaattccttgcacccatatcttctctggcacccgtgaacctctctgacccatccaattgctctg

SEQ ID NO: 34459 - DNA, 1048 bp, Arabidopsis thaliana landsberg
tattgggtcccatcaaaattaacctatgcagatcattataattaataagaacatggccgggaaaaagtaagtgatcaagggcacaacttgcctggcacctgagattccagttaccagggtgatcttcaggtgactcgaatccttgcgctagtcgtagcaatacaaacaaacatgatatggatagaattaacatcacaccaaacataagaacaaactgaataataataatctacgcgttgctacgagactaacgaaacttgaacggatcaaatcggatttaaaacgaaggagatacgaatttcctaaggttttatgtatttgatacgagattagttaagaaataaattttaataccattttcatgttaaaacagagatgctatgtaataaacaacattattacaaaattataggaattggaatggatcaatttggagttcatatgcattttctatgaattatacaaattctatgaattgttttatattaaaaactcatttcccaattcattttcctgattttataattctctggacggggcctcaatttccagaaagtgcaggggctacggtgcaagactccacagactcggtgaatagcgccccgggacggcgggttggtttcctgaaaactgaggggcctaaatgcaaaacgcgcgcagacagatggtgtcgggtgttatgagccgttggattagggatcgagcgcccagattagatcatgaatcgttacgcgttgaaacgatcccaaccgttggatcaacggcgagcggccaggatttaaatacccgagagtccatcctatccgctgatgaatagatctacggtcaccgcacccgagctgaatcgttcttttgacttctaatctccgccgttgaacaagaatctaacgaccgcgaggcccccaccaacctccgacagcggcgcaggcggcgtatggcacaccacggcggtgcctcaccggcacattgccatccgatgaatcgaacacagcacctccattgatgttatgcgagtagggcgggggcgacttagtggggcaggtatatt

SEQ ID NO: 34460 - DNA, 602 bp, Arabidopsis thaliana landsberg
gtcagattccagagcgacgtaaggcgtgccgcgtatctgtgcttgaccccggcgggtgagcgtgatgactgcagcggcgcctgcccccgcatggcaccatgcgccagttgcagtaggatcgtccaaaccttctctgcggacgggtccggctgtgttattggcccagtccagtcaacgacgaagtctgccaggacttgtgacttgatggctgtcctgggctcgaaattgatgtggtagccgaagagttcggccgcccacttggcaatcctgaccgatgcctccgggtttctgaagaattcacctagtcccctatctgaggtgacccggaccttgaatgcttcaaaataatggcgcaatttgcacgaagacataacaaccgcataggaaatcatctccagttccgtcatgttacatttggatggtgttagcacttcggagacgtaataaactgggcactgcctaatcatgccctcgactgtctgctcctgcaccagtgtcgcgctgactgcatgcggcgcacttctattagagcaacagcgggtagcgaagagtcggggcttgtaaggactgtcactcctgatagtactgttgtaatgaggcga

SEQ ID NO: 34461 - DNA, 772 bp, Arabidopsis thaliana landsberg
taggttcttgacaaagaggccctctaggatatttggttgaggaatcttaagctgaccacccctagctgtaagaaactcttttctttctcaattttatctgttcagcattgcagataattccctgcttgtactagtgtattaatgtgggttttaacaatagtgtatgtgtaatttcctgcagttggtgatttgaaccatttgatctctgcaaccatgagtggagtcacctgctggctaaggttccctggtcagctgaactccaacctcaggaagctggcagtgaacctaatccccttcccccgcctccacttcttcatggttggcttcgcgccgctgacgtcccgtggctcccagcagtaccgagcactcacagtccccgagctcacacagcagatgtgggacgccaagaacatgatgtgcgccgctgaccctcggcacgggcgttacctcaccgcctcggccatgttccacgggaatatgagcaccaaggaggtcgacgagcagatgatcaacgtacagaacaaaaactcttcctactttgtggaatggattccaaacgacgtgaagtcaagcgtctgtgacatagctcgccgaggtctctcaatggcatcgacatttattgggaattccacatcgatccaatagatgtttaggcgggtgagcgagcagttcgctgctatgttcaggaggaaagctttcttgcattggtacacaggtgaaggaatgaacaagatggagtttactgaagctgagagcaacatgaacgatctag

SEQ ID NO: 34462 - DNA, 965 bp, Arabidopsis thaliana landsberg
  unsure (1)..(965): unsure at all n locations
cgcgccatcactgtggatagagaaattgtgggctagaacttcgcaattgagtgagggattagtgtcatcgagggtagaattaggtgttgagcaacggagaggcatagttgttgcattttccggccggtcttggctcgccggagacactgctccgccgccgtggtcaatgatctcaagttgcgaagaaacagaaaagggagggacctcaatgcaaatgtcagtgacacataggaatagtgcgcaggactccttattagttatttaaaagcctnnnnnnnnnnnnnnnnnnnnnnnnnnnnnnnnncgcgcgaacgcgtgtttttcctggtcgtgggccgactgtggccggtttcagcccgatactattcatcattttcccttttctttttctactagaattaggaaattcataagaaatcatagaaaaatgatacaaatatgagaccaattttgttggactcctaaaattatttagtatttattaaaaatgattccaagatttttagcccaaccctagaattatttagcatttaaagatgcctaaaccaagccttttagaattttagaattaaattggtagctccaaaaataataaaactttttgggtaagcttagtttgatgattaaagcccttgggtagagtttgaaatgctttggacattatttggtcccaaaacccaatacaatagctctctaggatttaattacctaaccctaatagaatactaactcaggaaaccctagtgactagtgtgtaccgtgaaggaaagttgtattcaagatacaacttggtatgtttctattatatacctgaatattcatagtatcacataagcattcatgtatatgtattgtaatgtatagaaaacaaagaagttgccccgcaagctgagaatcccccggttgagaacaacttctattttgacatttgtgggacagacccagaacctcctgccccataaggc

SEQ ID NO: 34463 - DNA, 1109 bp, Arabidopsis thaliana landsberg
atgtgttcaatcattcttcttccagcacatcaatgtcttccagcctggttgcttctgcctcagctatgttttcgaaagtcaacttaggcgccccaaagatcagatcggcaggcagcactacttccgacccataaaccatgaagaacagggtatttccatgcagagctcgactgggttgagttcgcaggctccagaccacgtacaatagttctttgatccattttcctgcaagtttttcgctcttgtcgaataccttttttctaagtgcttccagtatcattccgttggccctttccacctagccattggttcttggatgtgccactgatgcgtacttgatctggatgctcctttgctcgcagtaatcgaagaactcagagctggtgaagttggatcctaggtcagtgatgatgctattcggtattctgaacctggatattatatcctggataaactccactacttttgatgaggtcaaggaggcaattgacttatactctatccattttgtgaatttgtcaatggctaccagtatatgagtatagcctcctgagccttcttgaaaggtacaatcatgtccagcccccagcatgcaaacgaccatgtcataggaatagtctgcaactgttccgcgggtagatgatgctgctttcgtaagaactggcatgcctcgcacttctggactaactctgctacatcgttcttcgctattggccagtaaaacccagacctgaaagctttccctactagagtctgtgacgctgcatgcacgccacattgcccaacatggatctcgtccaacagctgctttccagtagctgagtgaatacacttcatgaggactcctcctgcacctcttctatacagtagaccccctataatggtatagtgggccgactgtctcgggatgcgttccgtcctgtcatatggttcttcctagtttcttatgtatctgatgattggctccctcctgtcattgcgatctacttctacctgactcggaacgtgtcattccttcatttgatctgtggtgacacttggttgctttatctcctggacaaaaacccctggtggaacctgggcccgactggaccctagtttagatagtg

SEQ ID NO: 34464 - DNA, 624 bp, Arabidopsis thaliana landsberg
ttccttccccctagatgcaatggaagaagactagagtgtgtgtgtgtttgccaatcatggagagacggttttgctagccaaagctttgaacagttcagcgaccatctcaagtctagagatcatatataatgaaagtaatcatatcattgatgacttgctctcttgcttgtattatatcatcaatataatgtacatttctcactgggcctaaactacactactaagactagttaagtagtagtgtagtactaatcatgatcattttcaaatcataagttgacgaagactttttttatctacattggcattcatatcaaaagctcttttgtgtaatccgatcgtatattttttgtggttaaccgttaacctcgcctgatcattttgagagtggtagttagaaactttcagacgagtcaagttatcaacaaaaacaaaacagtagtagaaagcaaaggccattggaaaagtgaagataatttcattgggctattaatgggccagatcagtagcccattatccacgaccggtgggaggaattcgaactctagttgccgtcttctctgttcatctagttattaaaaaaaagaatggtactctggcaaaattacataaaaaagttcccag

SEQ ID NO: 34465 - DNA, 1672 bp, Arabidopsis thaliana landsberg
gactattggatcgcggtgatctctggggatttgactcaacctctgcgctgaatatgccataaaccggtctatgatcagaaaaccgtgactcccctcttacataagataactgatgtagtccttctccatgccatagtattcgatcacacctttagtaacataaccaaaaaataccatttttagatcattacttggttcttgtttattattctgattgcaagaaacttaccaagcaggagtacgacgtttctcctttggatgcaaatcacctcctgcatatctatccgagttatttgagtatttgtaagttggtgggaagtatatctttccttcgttccatcctttaaacacatgtcctcgtttctgctctatccgtaactgcagtgaaaacgttttcaaatgttttggattagaccattctataaagtaaaagtaatgtgaaactctatagtctctattgctttatttgtctactacgtatacctgatcgttctctagtaatgccctccagttttgcatctcgacaagtgcttttgcggatcggtaagagagtgctattcggtagttcagatccccgagccatattacccgactaaatcaaatggaaacaaagacaaatgagaaatgtaacaaatcatgaatcttaagcaaatgattcgattcttgtcatttcttgatgttcggtcttactcatgctgaaggatgttctcaggggacttttcttccgcagaactcttaacgcgcggaaacctcgttttcttcagtatctccatgacatcagagtttctctttagctcatcgccttctttttgtcccgaagtcaagtgcgtacaaacgaagcaaaagcttgtttgatggagcaacatgcttattgagattgatccctacaaataacaatagaggcaaaagcattataataacaaagtggctctaactcataggacagaacattatataatgaagaacaaagtctaaccttatttccaagataacccatcagtcccctgccaacacaagatactttcatgttcttgacgtgttctcttagctcacttttcacccaaatggttaagaagacacccaccatttgtttgctagcaactaaacaatactgcgaagagttccatgggatcctatatccattctcgtttgctgcagaacctggtgagtacaagacagtgcttggagaaccccaagaccattatcatcatctgaagaccttgagaagtcacttggccgtgaataatcactcggtctagagtagtaatcacttggtctagagtagtcactcggtcttgaatcactgggtcttctggaataatcactaggccttctggaatagtcactaggccttctagaataatcactaggccttctagagtaatcactaggcctatgactgctgctgctaccacggaaactcgggtcgaaatcacttggcctgtggctgaagaagacacggtcacagacgctgaaacgacggtcaagacctggctgaggaatagaaggatcattccatgtactactcggggtctgaaaagaccgtctgtggaagaaagtagagttcttttgccttgtagatccagagaaatcagcatcaagctctgccataggcacagggataggggaaggcgtgtgataaccgctggttccgctagttcctggtcggtta

SEQ ID NO: 34466 - DNA, 1274 bp, Arabidopsis thaliana landsberg
tgatgtcccgcgttcaacaccataaccttgtcaaggtctctctccttctttcttctctttctttgctctcgatacttcttcttgaatacacaatatccatttggcagtttattggagcgtgcaaagatcctttaatggtaatagtaacagagcttctcccagggatgtctctccgtaaatatctcaccagcatccgtcctcagttgctccatctccctcttgctctctcctttgcccttgacatcgcccgtgccttgcactgcttacacgccaatggtatcattcacagagacctcaaacctggtactactcttctatccctgcttccttcctagcacaccttttatgttttaactactggactcataagttaaccaatgtcgcagacaacttattgctcacggagaatcacaaatccgtcaagcttgctgatttcgggcttgctagggaagaatccgtgactgagatgatgactgctgagactgggacttaccgttggatggctcctgaggtttttgcccgctctgtcattcttgtaaatcataccactatttgacattataaaaaagccatatatgcatgtcttgtgttcgtgtcatccgtagctctacagtacagtgaccctgcgtcaaggagagaagaagcattacaacaacaaagttgatgtctacagctttggaatcgtgctttgggagcttctcactaatcgtatgccattcgagggcatgtccaatctgcaagccgcctacgcagcagcattcaaggttcttcttcttcttcttctacttcccgtttctcccctgtgatcatggagttatttagaaataaacctcttttcttcttcttcttgttgaaaacattgcagcaggagaggcccgtaatgccagaggggatatctccgagtctggcgttcatagtgcagtcttgttgggtggaggacccaaacatgaggccaagcttcagtcaaattatcagactgctcaatgagttcctccttaccctgactcctccgcctcctcagcctctgcctgagactgccaccaacaggaccaatggccgagccatcactgagttctccatccgtccaaaagggaaatttgccttcattcgccagcttttcgctgccaagaggaacataaactcttaggtacaagaaggggtcttctttgtctttgccactgccactgctttggtggatccatgcccttagcagagagagagaagtagaaaaatagaattacttaaagtctatagcgtagcttaagtactcaatc

SEQ ID NO: 34467 - DNA, 911 bp, Arabidopsis thaliana landsberg
tttgcgcccaattcagtaaatagcttgtctgacagaccaagttgaagcttgattttctcttaatttcaaatggcaacataagtcaagctctgcaacaaacctgtacagcattataccatctataatgttgccatatgacgctgccacaaaaacctattggagcatgcttaaatttaggcttaaagttgatgtcagttcactgctagtctgaaaattcagacattggcaccctgacagcccaacttcaaccttaattttctccagatttttctcaataacatggcttgcactcttaagcaaacttgttatctattagtaggtctacaagtttgatgtggtaacctagggcatattttcattaatttgaaagttacaagggctcaaagttgtgctcacaacactgaattcagacttaagcatatggggttcatgtggtactttttgcaaataagtccaaatctcaaggtttaatttgcaaatccacatacatgtgaatcatatgagttaaggtatcctaatttcatggtttttgcacttaggtccaaaaatgtgcacacttttacagataacccctagggtttcattccagggctttccaggggtctatttagggtttttgtgcttctagggtttggatgccacttaagtctattcatggtgacaatgagttttgaagttttttcttattaggctttgtctactcttctgagtctagtttagggttaagtaccctattctagggttttacccacaaccagtcatatccacacaacttgtttgaaatttttggctagtgaatgcattctaggtgtaacaaacacatgatatgccaatgcttatgatgtcatgctcaagttttagtgacagtaacactaggggtgttacatccttccccccataaaagaatctcg

SEQ ID NO: 34468 - DNA, 2307 bp, Arabidopsis thaliana landsberg
tcttttgaatttctttattatgtacttgtatattatgcaaaccaaggtaacactcttgagtaatcatatgatatttcggataaacagtccaggttatatctgggacttggaagggatggtctattgccttcaatcttttccagaatacacccaactcttcatacacctcttcattctcaaatctggtgcggcattgtagctggcgttttagctggcatatttaatgtacatagtctttcccatattctgtctgttggtacattggtacgtcaaggtcttaattttaaatatctctttgcttttcttattgatacttatactttccagtttaacattattttcggtgttccatttcttcagactgggtattcagttgttgcggcttgtgttgtggcattgagactgaatgataaaaaagatagagagtcgtccaatagatggacatcaagttggcaggaaggcgtcatttgccttgttataattgcatgcagtggttttggtgctggcgtattttaccgtttcagtgcttcagttatatttattctcctctcagttggtgtggcagttgttgcttcagcagttcttcattatcgccaagtaagtagccttaagtataagccttaattccatagcacactcttcttaatttcatagcgccaaaaaaaataaaataaaaaaaccaagtttcacccctgttaaaatgctagatactaagtcttttactgatacagcataaaatagagaccaccactagcatgttctggcacttagaactctacagtgatactatgaaagtctgtgactattgaagtctttgcattcttggtttagaggagaagtttgttaacatcaattaggaaatataccctcatggttgtctccacaaatcaggcaaatgccttgctagctatgcttcatgttaaacccctcagcttttcgcttccaggcttatgctctgcctctaggttctgggtttagctgtcctggtgtacccattgtgccatccgtttgcattttcttcaacatcttcttatttgctcaggtacacgctaagaactaactttatactaatttcacataccatatgatctacctttgatttttccgctactgtgcagttgcattatgaagcatggataagatttgttgttgtcagtgtgcttgcaactgccgtttatgccttgtatgggcagtaccacgcagatccgagcatgttggattatcagagggcacctgaaactgaaagcgacgcttagtaatgctacattatagttgtgttacttaaagccatttgtagagttgatagcaagtttctgcgtttcgtgagagacatactgtatgtcacatacatattcaggtcgagtttaaggattggatgggataaggcagttaaacattattgttgtaaagaagttaataaaagtatgcttgtgcatttcaactaaagccttgaatgactgaaaatggcttttgtgctaccaaataatcccagaagctagcaatgttcacataaacatactcaatgttagagttattcaacggatcatagtatagaatcagaaacaacaagcttactaataacagacatccaaaccctctagcattgtagtaagaccaaaaccctctagaattgccccaacttagccggctgtacaaatgaagatcaatctccacagagacaagaagcttagcagagacggcgagcattggaagagctactctgtctcaatgtaagaggaggaacaagagcaaaacagaggattccacgccacctgaaagaccaaagactgatgtctttctgatttacccctctcggtgacaccacacgcctcttggggctcgtggtctcccgttagacacaaagatggagtcttcttggactcggcaatgtagttttgaagaaggttaaagaaaaaggcgatgaagaagaagtggaagccccattaagattttgttgtgaatgaaaactgaaaagagtgactttgttgttttatatagttcgttaatccgttctgatttacttcgttttcctcttataataactctaaaggtataatcttttctttttcttttcttgaaagcattatttagagagtgtattgtattaagcatgaaacagagactgtgctaagcctcctgcattttaaacaatcctagaaactcaaaaacccgacaaagtgttaaaagagagatgaaagaaatcctagtaaaaaataaaaaccctaattatgttacctagacccaaaacctcaagaatggcctgaaaagttagaaaaatgtgaatctcaaccgacacaacaaacttgt

SEQ ID NO: 34469 - DNA, 2871 bp, Arabidopsis thaliana landsberg
ccctcctatattcattttcttctggatgagtgtgaggagtcaagctagatacttattacaagctcacttgcggaggaagtcccatgactatccttgtaaataatttttactttcttgttatttttgatttgttttggttatgtttgtggttctcaggaagaaaggagtaacgtgaaggtagagtaaaaattcaaaacttttactctaccgatggcatagagatcgagtatagtggtcgagtatgagtgatgtttaaaaacctaaaaaattttaaatcatcattttattcgaccaacaggagctacagagtcttacagagagttcatcaagtttacagaagattgcgggatttcctggagctttcctagtgaacagagaatacagagaagagacaagaagacattatgggacccgccgctgacgcccaagtcctccatgcaactgaccagaagacaagaatctatcttcttcttctcctcaccacttgacctcaacgcaccttatccccaccactcgacctcatcttatcaattcactcgatcccatcgcccctctctccacaaatactcgacctcgccacttcttatcctcaaacactcttctctcaaacactcgaccaacactcttcaccttatcctttcttgtccgtcactcgacctcaccatctttcttccccacgcactcgaccgcttctcattcgcctcttcaccaccgtctctcatcactcggccacaacgctcatcatctctccatccacgacatcactcgacaacaccaccgtttcttctcttccgcgagctcaagttcactcgaccgctcctctccttcctttcacactcactcgatctagcagtaggagcggacgacttctgcaatctcgtagtttatgcgaacgcggtgctggccgcagcagaaggagagaggtcgagtttcctcatagcggtgctggccgccagagagctgatgaggtcgagtacccacctgctggaggtgatacagaacaaggaggttcgtctatggcatgggagcaatcgcaggcagccattgacgagcaactacgttcattcttcgactgaggtaagcgcctcacttcaccattgtattataccgtctgttgtgatttgtttcttcattttttgtttctgttattggatttgtcctgagtactctcttccaagtttattcacacagtggactgtgtgatttaagtttgggggagggctcaggaagtgtgtgttgcattgtgtatatttttgagtctgcattcatctaaggcatagaaaaaccaaaaaatttgaaaaatttcagaaaatgatttcacaaaaaaaaagagtgttcatgtagttgcatcacatttaggatcgaatctagagtgtttcatttaggattgttgcatatgcataggggatgatgatgagatagccttgtaagcattttgattcaccggataaactcagtgccctcgttgctaattgtctgttgcatagtcaatgaatttgaaaaaaaaaaaaaactgaaccatgcttagattgctctactcgaccacactgtcatgatctgattccactccctatcaatatgaacctgaatctgatctttaattatcatgtctgcatcaaattttaactcatgtataccctaaaatacttggattttcttattcattttgatcactctggttaatccaagtagctgactctccttattagagctgttaacccaaacccaaacctagactttctttcaagccctatatcacttggtagaaagtgttaggttcgtaacgacagagatagtgtctcatgtagttctagttaccatttttcggactagataggactaggtgggcgcttatactttgggttggaatgtgtttaaaagaaagaaaaaaaaaaaaaggggttgattcattgataagaaaaggtaaaagactctaggtgaagtaagctaaagaagcagaaaaagtctagtaaaggttttaggatttgtaaagaaaagaaagagttcttgttagctattgaagatgggcaaaagcccttggttttagaatgttaaaaacaggaaccttagtcgtttaagaaatccaaatccgctagatgtatcaaagtgttgagaaagcttctgctagaattaagagaaaagaaaagaatgattagaaaaagggcttaaaagattcatgaatgcaaagggtagagttttcttatattaggattggagttgggattaccattagagcttcatttgatatactctgggtagatgggatcttatctctgtatgcatagcttgggacttacctttaacattctactaaagcttaatcattttttgagagatcccctgttcttgaccttttaccttagccaaatgagttcatttatgatgcattgcttgattcacgttccaaaactaatgaatgttaaagggattggtagatttgaaaacatgtgtaggtcgagcatatgagtcaaattgattgataatgacgcatggctatcgtttttaagtagaattcgatcatatctcatctgtctgcattacacccatttggattgacacctaaaatactacaacgacaggatagtgttttaggattaattgagcaaaaacttattatcagcagtatcagcagctatcaacaacaacttccaccacctaggttcacacagtagcaaaaccaattaccttcaccaacactagattcagacttgaagaacatgttacagcagattctccaaggacaagcagctggagcaatggatctcgccaaaaagatggcagaaatccacgacaaggttgactccactttcaacgacaaggttgaggcacttacctttaaggtcagatacaggaaggacaaactgtgtcaac

SEQ ID NO: 34470 - DNA, 1258 bp, Arabidopsis thaliana landsberg
  unsure (1)..(1258): unsure at all n locations
gtggcttcggaggaagacagattgtggcacttggtaaaatcataatgtcagttaccttcggttatgttcataacacaaggtctgagcaggttatctttgacattgttgacatggattacccatacaatgcaatcattggtcgagggacacttaatgccttcgaagnnnnnnnnnnnnnnnnnnnnnnnnnnnnnnnnnnnccttcagaacaagggctcattgctatacatggaagtcaagaagctgctagaagggctgaagggagttggacagattcaaaggcaatccatagcatagatggagccgaagcttgtcgacaatataagcataagagagataaggctgcttcggcagatcagccgaagcctatgctcctatgtaaagatatagcagatcaaagggtactgctgggatctcagctttctgatgagcaagaaaagactatgctgagatttttgttcaacaacaaagatgtttttgcatggtcagccaatgatctttgcggagttaacagggatgttattgaacactcgcttaatgttgacccatccttcagacccagaaagcagaggcttcggaaaatgtctgatgacaaggccgaagtgctcgtaatgaagtcaaaagactcctcagtgcaggagttatcagagaagtaaagtacccagaatggctagctaacactgttatggtaaaaaaaagccaacgacaaatggcgaatgtgtatcgattttacagatctcaacaaggcctgtccgaagcagaattcccattgccaaggatagactccttagttgatgccgcagcttcgtcagagcttatgagtcttctcgattgttattcaggctatcatcaaatttggatgaagaaggaggatgagccaaagaccagtttcataacccctagtggaacatattgttaccttcggatgcctgaggggctcaagaatgctggaggaagtttcagcagaatgactgcgaaggttctccagtctcagataggcagaaatgtgctaacttatgttgatgatatcattgtaaaaagcacgaaacaggaaaatcacattgctgatttgcaggagacctttgccagttttagacaagctggtctaaagttgaatccagaaaaatgtgtcttcggagtaaagaaggggaaatttcttggatgcttggtttcacaaagggaattgaagctaaccaagtaaaattgaagctatacttcgaatggagcaccaactacaaaaaagggggcgaaagattga

SEQ ID NO: 34471 - DNA, 927 bp, Arabidopsis thaliana landsberg
ttatagtatgctatttatgatttgtttgtcaaaaacatatttattatataactttgtttccatatgcactaaccgaattataatattaagccgaattggatctattttctagaaaccaaaaaaccgaaaccggaaacccgaataactgaatgtccatccctatacttatagttgaacaaatggtcatatgtatgtgaaatggtatataataaatgcagtgaaacaaaatcaatgatgattttaaaatgttgtcattaatttttttattttaatcagcaaagcaaaataaatcccaacaatatgaaaatgaaatgcacaattacgtaacaagcaaagtcagattaataacctcttgtcgttgtggttaaatgtaccgttctaaacttaatattatcaccaatcgataaattggtgacaagagtaaagtggtataaaagatataccagcttgttgtatcttaccattttttagttttatttacttcgttacaaacttacaatatcctgaaaacttttggtaggaggtggggattacacgcttttctcagaacatatataaccttttgtgtctgatgagaatggagtgtcaaggtcatggacccatccgacccggcccgatccaaaagctaacactgtaaaaatcgtatatcaagcagctgtttatatgacatgtggttgatcaaacggccaaaatatcacaaaagagaaggttgtcataagcacgtgtggttataacgcgttattagctgttttattttccttaccctcatgtcggtggtttcctactcaagccattcaccttttattttttttgagtaagcacgttactttgttttgttttggttttaacttcacaggttgatgaatgatattggaccattcttaggaatgataaattaattagcagataaaatgtggggaaaatggg

SEQ ID NO: 34472 - DNA, 829 bp, Arabidopsis thaliana landsberg
ccaattataaaagaagaaaaagtgttacagcatcacaccaataatgaaaggaaaatagagtgtcttgaaggttactctagtcacggttccccatgccatctcacatttttcatcttcttagagcatctccaacaatggccctcattttgaaggggacacaccctcaaaatgaaagtttgagagtcacttactccaatggtacgccctcaaatttatttaaatattttgaagtatttacattataatcctcaatttttaacaataatcggttatagtgataaaactttcacaaataaatataacacatacattatagaaacaattatgccaaacaaaatttaaaaacaaaacaaaactccatataataatataatattatatttaaattaaaaaaacataaaataacacatacatttataaaattacaaaattactctatataaatatttccaaaatgctcccatatatgatcactcaatgcatttcgaagtgataaattagtctctttattttttatttgtagattacgagataaaaattgttgaaatcttgtatgttcatttaccgccgttttaactgttggcggtggcgtcaatcttgaatctttaatcgatgcattgatatcatgttcatcctcaattatcatggtatgcattataatgcaaactgtcgttatatcatgcgatacttctttgttccagtaatatgacgaccatgctatgatagcaaacttcgattgtaagactcctaacgcacgttcaacatcttttcgacatgcttcatgttatgagatgactctcttgattttttgacaagaaagtgcatcaac

SEQ ID NO: 34473 - DNA, 1103 bp, Arabidopsis thaliana landsberg
  unsure (1)..(1103): unsure at all n locations
tatatgatttatataaattaaaatatgttatttacctcagacataatgacccaaggtagccctcctataccgaatgcaaaacatccgaagtagacctaaccaaatttaatttaagatttcttataacaagttaataccaaaaatttaaaataaaaataaaaatttgcatgaaaaaatgaataaatccttgaaagaaaatgaaagattttaccagaatgtttacgaagacgaaaattgggatcaattcaggaagcacattcatttgctgtctcagaaacaaacaaaaaaaaaacatattataagacgaggattgttttgtccaaaaaaaaaagaggcgaggattgtaatattgatagttatctcatattagtccaatatagaaattctacaagagtaacctgtaacgtgaagctaactccaataagcaaggatccgatggacattccaacagcagaagcctatgataatgtttatcaagagaatgttaataattattatactgttatatttgtaagtctatatataaactggatttttctaaccaataggagtggtcgtcttccccatctatccacattaatcaaaccaaccaaagcttttgggatctacaaggagtaaaaaataatcatagaggtataatcgaaatagctttgagaaatttaatatcgtaaaaaaaaaatcaattagtttaaggtacgcaccacgaacacaccaaatatcattgatccaagtctctctgaaaagcctgtttaaacgacgaaaatacagataacataaataataggtagtattaaataactcctacgagtattatttatatgaaagcaaaataaattcataaataataatagtaagactatgaaaatcctaaccagcttttctaaatatggcatttgaataatatgtgataccgctagctccagataattgttgtatcaacattaaaccaattccaacctgtaaattcaaaacaaatcattactttcatcactgtaaaatcagaagtaaataattagccctttcactaaattccttcctagttcctaacttcctatatantgtaccgtaccacaagagttcgtctatacttcttctgaaacatg

SEQ ID NO: 34474 - DNA, 2033 bp, Arabidopsis thaliana landsberg
tcttttcatggatttcaagtatattattaatatgcattttttcgtatattaatatatgcccctatgggtatgttattttttaatgcgaaaggaatgatattcagctaaattttcggtgtgtctattgctttttttttccctttcctcgttcaaaaaaagtacttgcagagtcactcactctcagtctcagcacatgaattaatttgaagcttccctagaattctttcacatcaattaatacgacaccgtctcgggtgaagaatctctcctctcttgccctaaagcgagttagggtttaacacacaaagcataccctttagatttgtgtctcttagctctgtttttgtcggcttgtgtaaccgatcaactcaagctattggctcctcacctcctgaaatttgacttctccaatggatctcaaagtttctcttatatgaattctatcttcaccctcacaatatctttatatatatgagccacaagaacaagaagagtcagtagatgcggctgccatggacggtggttacgatcaatccggaggagcttctagatactttcacaacctcttcaggcctgagcttcatcaccagcttcaacctcagcctcaacttcaccctttgcctcagcctcagcctcaacctcagcctcagcagcagaattcagatgatgaatctgactccaacaaggatccgggttccgacccagttacctctggttcaaccgggaaacgtccacgtggacgtccaccaggatctaagaacaaagccaagccaccgatcatagtaactcgtgatagccccaacgcgcttagatctcacgttcttgaagtatctcctggagctgacatagttgagagtgtttccacgtacgctaggaggagagggagaggcgtctccgttttaggaggaaacggcaccgtatctaacgtcactctccgtcagccagtcactcctggaaatggcggtggtgtgtccggaggaggaggagttgtgactttacatggaaggtttgagattctttcgctaacggggactgttttgccacctcctgcaccgcctggtgccggtggtttgtctatatttttagccggagggcaaggtcaggtggtcggaggaagcgttgtggctccccttattgcatcagctccggttatactaatggcggcttcgttctcaaatgcggttttcgagagactaccgattgaggaggaggaagaagaaggtggtggtggcggaggaggaggaggaggagggccaccgcagatgcaacaagctccatcagcatctccgccgtctggagtgaccggtcagggacagttaggaggtaatgtgggtggttatgggttttctggtgatcctcatttgcttggatggggagctggaacaccttcaagaccacctttttaattgaattttaatgtccggaaatttatgtgtttttatcatcttgtggagtcgtctttcctttgggatatttggtgtttaatgtttagtttatatgcttattttggtttctcgtgtttatttcttttcttctcatatcttcggtagatgttacatgttagagaaatgcatgtgtgctcgttatgttagaaaattcctttccttatatggctttgttttattcatagctagggtttcgtgttgtaccctataactattattataattagctcgatttgatagatatataggtctagactatgcaataatgagttcgattgttcttttaagaattttgagcttcacggcgtattcttgatgaaatattatgtgggcacatctcaggcgctcatttgaatatttttacaatacgtcaatacgttaccttaatcatagtataatatagttctttcaactttttaacaacctcaatgtaatattcattataaggttagaaaattattatacatattgatcaatatatacgtgttgtgcatctaaattcattattcgtaccatttgagtacttgtagcgtcttttagccgagtataccttttaagatcacaatttctgtgtcatatctatctatc

SEQ ID NO: 34475 - DNA, 2067 bp, Arabidopsis thaliana landsberg
gtattacagtggaaagtcaaagtcttttactaatttaacggcggaggcagcttcggcgttgacttcttcttcgtcgatgaaagatttagcgaagccggagaatccttacagtaggagaggaggaatctcctctgccatcagatttgggaaataacaagacgactccacgtggtgggatctcgaagaaacacgttatgagttctagcagaagcgctttgacgctagctatggctgttgcggctggtgtgatgaccggagaaggatcttcttccggaggtgactcgtcgccgggatcaagtccgacgacttctggatctcctccgaggcagctacatcatcatcaacatcagatgaagaagcttcctccgttgtatcctaggagtcaagggtcttttggtaatttgacttcgtctcagtcgtcgttgggtttttgtgcctggagatcgttttcggtggctgattttccgaggtgttttccggcgacggcgagtgggattgggtttaatgactcgtaggaaatgatgataacaattgttttgttaaatttttatattttgaagttagtaacaaccacatccggagaatgtatgtgtatagaagagtttcaaaacttttgaatggatcatccacatcttttttttccattttggttttttgttctatcaattacatcttttcaaaaatctttgtcatatcgaaatctgttatctgtgtggaaagtccaacattcttctttatgtgttcttatccaagttataaatgataaatgcctagaagcctaaaaccatatgaaggtatctatatttgcttattattgagaagtagtaattaataacggtcgtgtttagtcataagtgggttgagtctgatccaccaggtacatttacttgaagatgcatttgcgtccactctttttaagctaactttggaaagtaagtgatttggcctttatccatacttttctcctttttatggaactgatttgttaccaccagactggaagtgaattttgctggtgagatgttgtcgtggagtttcaaagaaacctagaaggcaatagtatatgcttaagttaagattatctatatttacgtataattatgatataacctcagattcatgaataacaatacaaggttcataatcgctatactgctaaataacaaacaaactccaaaagagcagaatatacaaaaccttcattcttctgcttggactccaaaatagatgtggagccgatcacaagctatttttacttgtttcagacttatggagctgcagaagtaatgaatttgaaacgacaaagatcgagctcaatgccattagtccacctgaaatcaaattaatggtaagtaaccatatgatatatgatatatgatcggattgtatgaatctactagaatggaagtggaacaaactgttttgtaactaattaactggaatcgtataggggccgcttaccagataacgaaggtgtcatggcgaaatcatactgaggaagcaagacacctgcagctatagggattgagatgacattatacgcaattgcccacgctagattctgatatactttcgacatagttgcttgtgcaagactcagtgcatccacaacctataaccacacaaaaaaaaaaaaaaaccacaagtgatgagcttattatatagcttagattttgaagttgagtggctcctgaagcatttacatgtgaaagtttgttgcggacaagtatgactgatgctgcatttgatgcagcgttttcttgtgcctcgatctttagagttattccaacatcagcttgagccaacgagggagcatcgtttatgccatcacccacctttgaaaaacacataatatgccgttagccttactaattccattctttataacacaccaaagccatgattttttgacacaccaatgccatgattttctgaggggaagatacatgtactacgaagtcggtgaggtacccgttataaggataacttcattgattgaagattcttacaatatcagcacgaagttcacaggattgtagaatacattttaaactcaaaatttttttc

SEQ ID NO: 34476 - DNA, 1787 bp, Arabidopsis thaliana landsberg
  unsure (1)..(1787): unsure at all n locations
tggctttatattctttaatcttaccaaccgatcccgccatttgactgtttcagcttgatatttgctgatatgctctattgcctgaagtctggtcccttctatggtgtcttttattattttgcaatcctcttcatcttctgccgaagctgaagtccttattgaacccattcttgcttcttctagtgttattgcttcgtcaccaaacagaagcttaaacggggtaaattctattgacctcgagacaacagtattgtggttccataccacttttttcaattcatctagccactttcctctgggctgattgaagaatgacttcattatgcctgttattatgattccatttgctctttctactagtccgtttgactccggatgcctgactaatgcaaagtatatttttgtaccaatttgatcacagaattccttgaacgtttcgacatcaaactgtgttccattgtccacagttatagccttcaacacgccaaagcgacaaacaatgttttgctagaagaacttctggacaatgaccgaagttattgtggctaaaggcttcgcctcaatccacttggaaaaatattctatggccaccacaacatatcttaaattgtcttgtgctggtggtagtgggcctagcaaatcgaggccccatctttgcagcgaccaggtgggccgtattaacagagtgagtgatgaaggttgtttctggtctcttgcgcatttttgacaattttcacatttttggactagctcttctgcatccgaagcnnnnnnnnnnnnnnnnnnnnnntgtcgaaacacttttcccagcaaaggcttagacccaatgtgagatccacacagacctgcgtgtatctccttcattaattcaataccttcagctcttgataaacacttgagaagtggagaacagactccatgtttaaacaattccccttctattatcacatatggtcttgtccttgcctccattctcttattataagattcctcatctgaaagacaattaccttggaggaaggatataatttcagtcctccaatcttcactatgtactggagaaatagtaagcactgctctctccatgagttcaaccaaaggtgtctttattgtttcaaaaaatacttccgaaggtagagggagccttgagcggccgatttggctagcaaatgtgcatgctcattttccctcttggaatattcttgacagaaaaaccttcgaaagaagcctccaacttcgtactgtatccagatattttcaagtttcggatctcttgtcttgctacttttatctacatggccagaaatgacttgagaatcagttttcagaatagcccttcttattcccattgcccttaacttccgaagccctaacaggagtgcttcgaattcggcaatattatttgtacaactaaagtctagcttggctgcataacatgttctgactttcgaaggtgctactagaacagcagctgctcctgcgccgaagttccccaagaaccatagcagaacactgtccaagcttgggcatctttatttgtctctgcttcctgacctctggcgtccagtcagcgatgaagcctgtaacgcctgggactgaattgaagatctatgcacataatcaatggtgaattcattaagctctacagcccattttccaatccttccagtagcctctctgttcctcatgatgtcctttagaggttgtgacgaaggaacaattatgtggtatccttgaaaataatgccgaagctttctggaggccaggggatcctctagagtcgaggt

SEQ ID NO: 34477 - DNA, 1095 bp, Arabidopsis thaliana landsberg
gtccggtgccgacacgtgtccaggccttaccctacgcttcccgctcaggctgaaacccgctgctgccgcgtgtcttgtggcttgtgacataagccaataggccaagtctgacgtaaggcccataaagctgcgctgcctctccatttattgcgaagaggacgcgccgcctgccatcgcgctggcgggcgacgtgccctctcagcatttaatgtgtcatgtccaatccgctggcagacgacgtcagggtcatccagcagacgacgcgcctgactagtctgttgacaaacagtgcgtccgtgccgagcagcgcacttgtcggcgtttcggacccgcgaggaccgtcaaccgactagtgaatttatcgttgcgtgtcctgcccagatgagttgatgcaagatggaacacaagcgggaggatgaggcttatattatcttgcaccagggtgctcgtagtaggggttacaagcgttgcagagagagagagggtttggccttgaggtgagctatctgagtttgcctccacgcgtctctcctactctgcctgcatctgctcgcatgccttcgtccttcatctctccccgaggaaggccctggacatccccttttatagatacaaggagatgcccagctgtacaatggggtgtagctatgtgctaacgtggctggcggagaagcgccttgagccctgtacgcgtgttaacatggctgtcggagaagtgccttgagacctgtagaagcatagctggcggtgcggcatggatcctgctgacgtttgcttgcttccgtagggggtttgagagcaaccgacgtcatgggcgcacgcggggaaccatcattacctgttgctggagtaaccttagatgggacactggtcttgttccttcatagcctgaggcggctagctaggagtagggtaatgatgtatcccctgtagcgtagtcggtccgaggctgaggtcgggcgaggatgtgagtcctcccgaggccgaggctgaggctgaggcttggggtcgggcgaggcggagaccttctcccgaggctgaggctgaggccgaggctgaggtcgggcgaggcagactccctgttgtgccaaggcc

SEQ ID NO: 34478 - DNA, 323 bp, Arabidopsis thaliana landsberg
gtcagcggttcgcagtcgcttatgtctaagtcgtgacgttaggtgctacacaggtatatgctacgagccaattttcccgattcggcagtctcgcactgtatgattctttgattcacggaggttgataagatattctggatttaggagcacgttaggatggcatacggctaaagtcaagggcgaggtttaaacgaggaaagggtctacggtggatacgtaggcatgcagagatgagcaagggcgtagtaagcaacgaaatggtttggggagttgaaaataagcgtagatccggagattcccgaataggttaaccttttgaactg

SEQ ID NO: 34479 - DNA, 4011 bp, Arabidopsis thaliana landsberg
  unsure (1)..(4011): unsure at all n locations
aagcagaccaaacacagactgcagaccaattcgatgaatgtgtgagccaacataaaacaaaaagtttcagaccaaacaaagactgtagaccaaatcattgcgctagagccaacactaaagccaaataaaaatttgtctagagccaacacaaaacaaagagtgcagaccaatacaaagactccagaccatacttagcttaatcaccattcataatcttcatctgtttctagaaggagagaaagatagagcttaccagagagtctcgacttctggaataggctcctgagacagaaccgaaaggtgttgtcggccaggcagggcaagtaagcgatccaacagctcttggtagtcgacattagggttttgttcttctttgtcgacttcctctccatcttcttccccgacttcctccctatctgtttccccatcgtcctcctcatcttcctcttcatgattttgaagttttggtatgaactgtgtctccggtggatcctgagcaagctgttcttgaagatgaggaatctgatgttgacgagcaggaggttgtggttgctttcgacgaataagaagcggttgttgagagccaaattgcgagtgagaacgagcaggagtcggggtttgtgtcgtttggggtggtgatttctggggtcgtgtcgccggcagatattgggaaggaagacttctatttgaatgtgtaacggagagcatcgccattagggtttgaggacagagaagaacctccgacttcactcccacggccgagaggatttttaccgtaaaaaacctttgccttcggcgtcgattccctacctcgacctcgacttcttgacgattttcctttaccaccaccagccatagttcaaattcgagtttacaaagaaaagaattccaaaccctagatctagaatttgactagagaacaagagggtttagagaagagaaattaagaggattgaaaggattttggagagtattctagagagaatgagaattgaaaaccctagattgagaaaaggaaacgataaaatgagagaagtcgacaagtttatttccacttaaaagaaataaagagtcgctctttggtccctcttcggttgcactataattatgcgagaatcacttaatatattttacaaaattttaaaaacgttgcacaatcgtcgcaaatcagtcgcaactcggttacgcaaacgtcgcaaagtgtgactattttgtaactattagtaaaacgtcacaagaaaaaaaaaatccacatagtttgatccaatctattgataaatattattgaaaagcactcattttattacgtacagaactttaggtatataaatgattggtttcataacttattttagaacttgtttgaaaatatcaatcatgacaatgaaaactcatgaaacttatcatatagattatgtttttttggatgtatagtttgtaaaattcagaattgaagagtttggttatgattttatatctaatttcaatcaaattaaagtaacaacgtataagaaaacatatacatagacaaaaacttaaaaatatcgaaatgcaaaaatgagtgtgggtaatatgtaggtaatcagttgcaaagtgcgactgtaactttcattggtcacaaataagttgcaaagagcgaccgttttgtgacgaataataaagtttttcaaataaaaaaaggggtcaaatggaatcgaaccgcgatcgtataagattgtgggctagtatgtgaccaactgggctggccaatagtatgattttcatcttcgaaaataagtacttaaagagatattaaaataatattttatttataattttcttacaaatacacattaaaatcatgtccattcaaaatattctgattgttcatcatctagttcttcttcatcttcatcctcagatgttgatgaattacaatgaaattcatctcctttttcagcatcttcaatatcaaaatcaataggttcatcttgatggtttgtttcagctaagctctcaacgataatttcttcaattatgctcagagttgtttcatcaacggattgttgcaatgcaaccacatcatttaaggtaaacttcccttggacaacattccttggattgactttccaaactgaaagccacgattttcggagtcgtttgatgttcgtgtaagaaagataacaaacctgatcagcttgagacactgtaaaaaaccgacattttaaaattttaactgaaatatgaatttcttacaaatcacttactaaagaaatttaaaatttacctaaaataaatggttcataatttggatatctcccttattctagcacgtctacaacccctccatttctcatacgaattcttttcccaacttttgagtcaaaccattgacagtagaaaagtgtgatctttaagttaacaaatcctggatactcgagcttgattatagtttcaacgatcccataaacatcttcttcatgagatgcttcagaataattttggcctcgaacacataccccataattcattattttattggtacgcccatgatcctgcgtgtgaaacatatacgctcttgtaaaatacatgggccaagacttgactttattttcaggaccttctactatttcataaacccatggaggaaaactttgatgacttctcgttgcttccacctacattaaaacatatgatatatcaagaaataaagaagtaaacactattaatttggtgaatgtcagagaaatgattacatattggcgaacccatatatgaaaattttcatctcttttcgacgcgacctcatcatcagagagttctggatattcattccgaatttgcgcatccaacatactcttttatcaaacatgtcaaagatcttccattattaattgtaaaagagagattttcaaaattaattattacttggttaaaatagaatacctttcaagcgggcgaaaatattcacaattacgcaaaacatatgcatgtgcgcattggtaatctctctcatttaaccaaaattcaatacttttgccactaggacgaccaacttgagtaaatatgagtggtaccgggacagggtatacattgtaggagcccaaaaaccaaattgagaaacaagtacgaattttattaagataatgataataataaaattncnataacagtaattaaggacaaaaagtaaatcacggaggcaagatatgatatatttttccttaattcaataaatcggccgtaagtgcttttcggacattacaatttttgaatctcaggatacaaccgatcacgaactaatacccgagcacacaagtattagattcaagcgaactagatctatgatatactctcgaaacaactaaactaagaacttacttttaagaagcaatagagagagaggagagactttagaatttagagtgttttgtgtttgagagcttgagaaataatgagaggctgggtctctttatatagtagagggagataggattttgcagaatattcttaggataagcatgacatattttgagactatcctgagaatattctgagactatcctatcctgagaatattttatgactatcttgagaatatttccataagatttaactcagcaagctcaataactcacaagcatgacggtccgcaagcccgacagcccttgagccgacgacgggacgtcccgacaacccgcagcccggttcagcccggttcggttcggtttggcccaagtatcccactttacaccattatttctcattcaatacaactccgtttttactctttaccagctttccaatgcactaatgacccgataattctgttcagccgtttggctggaatttggccggaaagtcaccgaaaacattttaagtaaaaaaagttccaacaaacccccacatgaatagaaataagtctaaacatatgaaaactttactaatcctaaggactaacgcaactagctagacagaccttcgagagcataaacgaaaattgactgtatttgagttggtggcgtttatctg

SEQ ID NO: 34480 - DNA, 1769 bp, Arabidopsis thaliana landsberg
ttaattaacacgtcaaatgttggaccatcactataaaaaaaaatatttgttcatcacgagaatcgtccttggccaaaaaaaaaatccgaaaacataacaagaattataaggttagtaaaatgaaaaaatcataaacagatggaaaatcacagataaccataattacgaaagtgaagttgagagaggattggacaaaaatagtgacaaggaagacgtagacagtgcagtgctgtgattgattcgagaatgtgaaacctaaataaaacaagtctttctagattgctttttcgtatttttaggcggttggttttttttttttttttaaatagctacgtgttcccattttattggaaaaacaaagtggcatttccttttaaataaaaatttttaaagataaaaagggagaaactgtaacaaactggtagcaaaaaatcagtaagtcaggtcaggtgttaaccctaaaattaaaattgaaaataaaactgagagaaagagagagacaaaagacatcccaattgcagagaaaccgtgttgaagttggtctctgagctgcttcttccttcccttttttatttttatttttccagctctttattttcttatttacaaaaaactttcccaagaataaaaaccagaagaatccgtataaattatcctaacagtttcttccaatatccaacaaatttcagatttttttttttgctttcttcttctctacttgagtaatcatcaacgattatggcgtccagtcagtggacgaggtcggaggataagatgtttgagcaagctttggttctttttcctgaaggatctcctaatcggtgggagagaatcgctgatcagcttcataaatctgctggtgaagttagggagcattacgaggtcttggttcatgatgttttcgagattgattctggtcgagttgatgtccctgattacatggatgactcggcggctgcggcggcgggttgggattccgctggtcagatctcttttgggtctaaacatggtgagagtgaacgcaaaagaggaactccttggacagagaacgaacacaagtatgtttctttatcaatcatttcaaaaaaattagggttttggttggtttgagaatttaggaattaaatgcaattttgctaaatttaggtgatttaattacattgtttgatatgaattttattgatgcagattgtttctgatcggattaaagagatatggtaagggagattggaggagtatctcgagaaacgttgtggtgacgaggacaccgacgcaagtcgcgagtcacgctcagaagtattttctgagacagaactcggtgaagaaggagaggaaaaggtcgagcatccatgatataactacggttgatgctactttggctatgcctgggtctaacatggactggactggccaacacgggagtcctgttcaggcgccgcagcagcaacagattatgtctgagttcggtcagcaattgaatcctggtcatttcaaggattttgggtttcggatgtgatgaagaaagggggagacaaattgggatggctttagtttaatagggttttactcattttatgtgaatagggaaagaaataggattgggtattttcttatacagatgatgatgatgatgatcaaagaataaaaataatgtatagggaagccttttgtgacccccaaaaaaaaaaaaaaaaaaaaaaaaaaaaaaaaaaaagggcggccgctctagaggatccaagcttacgtacgcgtgcatgagaagtcatagc

SEQ ID NO: 34481 - DNA, 1588 bp, Arabidopsis thaliana landsberg
tcgtatatattgcatgttatttaataaaatgtgacgttttttttttgtagagatgcatatccaaatgattgggagcgttgctgcattagcaatgataacgtccctccttcggattggcctgcctttttctcaatgttagatgcaaatcatatatttttcgtccgttatttaagactaattgtttggtttcgtagtacgactcgcaatcacatcgaagttgttataatttaaacttacatgttgacagaagaaaaagagaatgtccacaaagaatgttaactaggcaacagtatttgtaacaaaagaaatctcacatttattgggctcaataaattactacaaaagcccattaactcaagaataagcccatcaaacaagctcaacaaggaaacagattattgggtttggtggtcatgtaagaggcagagcatcaaaggagtgaagaacttgttccaacgacattctcgtacttgaatccaatggattctctggtttatctgaatgaacaacattcaatagataaagcttgttagaactcacaaacgcagctgagaaaaccctcttgattcctcctcttgtactatcaattttgtattcaaactcatacacttgttgtcctaatcctgctctctctcccactgatacaacttctgcttcctttgtgcttttcttaactcaacaacaacaagaaccaaatcacatacatgtttatacagaaaatcttgtttttgggtttgtttgttttctcacctttcgtttctctgcgttgataagcttatcagcaacaaattgaggagaaccaaattggtcaagactctttatacggacaggactaacaacaacaccaatattgttgcttccattgtttagttcttcaaacagagcattagctcctgctttctctacctttgtataagaagagggtatgagaagagtgaagccattgttggaatcagtgtatctttgaagttcttccatggatttggctttattatccaacaagaacccattgaagaagagtgtgagaattgagagattcaaatgtcttttgctgagattgatgctaacagtggatgatggattttgggcaaagcagaagaatttatggatcttgtgatgagagaaaggaggaagagaagatgagaagagacataatttgggagcagaacctaagaagctttgcgaccacattttgcttctttctccttatcaacaagttttggatattaattactaaaagatttattttggacaaattctcaaaaataccactggaaaaaaaaaacagaaaggaatcattagcacaaaacttgatggtctactcaattcaatacacagtcaaaatgatcgctttaaccaaaattctctgatggtaaaacttctgaaagccattgttactaaaagagatggaattggagacaacatttcatcaatcagacatagcaacatccatattcctccaacggtcaggtacgttctgaccacaattctccaggacattcaccaatggtccagcttgataagaagcagcatccttttctgttatataactgataagatttcccatagcacacgctcgatccgtatc

SEQ ID NO: 34482 - DNA, 1262 bp, Arabidopsis thaliana landsberg
tataaccgtcggttcggggtcggtaacaaccatcagccatgtctcggttaaccgtcaatcttaaaccaaacggaataccgacgaatatattactgacgatattaatttgttgaaagctcgtcgggaatataaccgtcggtaatccgtcgagctccccgacaaaatatcgacggaatttgtattaccgatgctctagaaccgacgaccatattttatctgtaaatcgtcggttaaggccttaactgacggattatcaacggttttgtttgtcggttacacgatgttttcttgtaattaccaccacctgtactaatccttctttgcctttaaccctctttcaggcgagtaatgaactcaatgaaactcaatgatatgattgagcattatgaagggttgctactcagtagggaaaacgaaacaagggcctggagagatctcttccctcgaagctgatcaccacgccctttcgaattctctaaaagggaaacacgagatggaagatcaggttgccacttcaaatatgagctcaataagtcagatgatgagctacaggcgcaatacaacaagtatgacaacttcgaaagagaactgtcgagagttcaagacagacttcttcaatccgagtaggccgctaacatctcgcacaatcaactcaccgaactcaacctaaagtatcacgcattggtcaagctaagggactccgaattggcaaagtcagcatcgagggccagaaaagaagttaaaagtcatggaatggaattgattcagggtgccatccgtttcattcagatggaaaaagcccgaactgaccttgaatctgatatcaaggaatacgagagcaacctgcttttattggaccagacttatgaggatgacttctccgaggaagaagagagattcaaactagaggccaatctgaaagacaaaaaagaacgtcttgcggcacttcccacgtcttctttttatcccagcacttcgcggaattcttcaaagcttatcacatatctgccttgtgattgatttgactacttttcttaggttcaagcgatttggctgaacctgtttagcccgaggtgcctgacactttggcaccgatccttgaacctagcgctgctcaaggcgaagtgcctctagttgagaacgatgagcaggtaatgactctgaatgatggtcacgccatcaaaactgggccggaactctgttctgaacaagatcctaccaaggactcatcctaggttgagctagctgtggatgaatccgag

SEQ ID NO: 34483 - DNA, 1312 bp, Arabidopsis thaliana landsberg
tttagcaaatttaaattttgggttttctaagtcaggctcattaattttagcactaagttgagctatgtgatcattttgttgtttaattaaagctaggtgatcatgaatagtatcaacattaatatctctacatctagtgcaaatggtaacatgctcaatggtagatgtagagggtttgcaagtatttaattcaacaatcttagcatgtaagatagcattctcatctctaagattggaaatagaaacattgcaaacatttaaatttttagccttagcaattaatttttcattctcaattttaaggctagagagagatgcattcaatttgtcaatcttagtgatcaaattagcattatcatttttaagactaacaattgaatcatcacaaacatttgatttttcaaccttagcaattaaactaacattctcagttctaaggttggaaatagtgtcatggcaaatgctaagctctttagtcaagttttcacatttttctatctcctgagcataagtatttttaactttaacatgctttttgttttccttaataaggaattcctcttggctatccaagagttcatccttctcatgaatagcacctatcaattcattcaatttttctttctgttgcatgttaaggttggcaaatagggtaagcaaattatcctcatcttcactagaactaccctcatcactaaatgtattatatttgggggtggttctagattgtaccttcttctttttgccgtcctttgccataaagcacttgtggccgatgttgggaaagaggagacctttgttgacgatgatgtttgcggcatcctcgtcggaggaggagtcggtggagctctcgtcggagtcccactcccgacatacgtgggcatcgccgcccttcttcttgtagtatctcttcttctccttcttcttcctcctcttgtcgtcgccctgtcactgtcactagaaataggacattttgctatgaagtgaccgggcttaccacacttgtagcaaactttcttggagcggggcttgtagtctttccccctcctttgcttgaggatttggcggaagctcttgatgatgagcgtcatgtcctcgctgtcgagcttggaggcatcgatggagagtctacttgatgtagactcttctttcttctcctccgtcaccttgaatgcgacgggttgtatctcgggtacggaggaggcgccttgctcgatgatcttcttgaagcctttgatcatcaattcaaagctcacaaattttcctatcacttcctcgggagacattagtttatatctaggatcaccacgaa

SEQ ID NO: 34484 - DNA, 1247 bp, Arabidopsis thaliana landsberg
ttcttgtttatatatttagagagaagttgatcaaaagtagatacaacgctaatgagacggccagatgccttggacatattttgcttccatgatcctacctctgcatgtcgcggtctaaaggtccgaggtcgctggcatcactggccattcttggaacttctgtggtaggtagctgaaccattcgcgtggagtccagaccatcttttataggtagccggaccatccgatgggtgctggatagaagatatcggcctaatgggatatcatgcttgctcctcggtgcccctagcctcattagtggtccttacaatttctctcttgcctggagccttctaagaaacctctccttgtgacagattggacatgcgaggatcatcggtgattatgctcttgcccttacctttattggtcactttgggccgaaccaagaccttcttggcgttcatctcgagtgtattgatggagaatgattgtttgtcaaattgcacatcttgaaaaatcaaccagccttcgttaatggccgattgaatctgtcgacggaatacattacaatcattagtggcatgagaaaatgagttatgccacttgctgtatgcacgacgttttagctcgtcagcggatggaacagtgtgatttattttaatattgccatttttgagtaactcgtcaaatattttatcacacttaccgacattaaacgtaaacttaacctcctcttgccgtttcttttgaaccggctgcaagtagggacaagccgaagatttggcctgttttggccaaaccatttcagcagcatacacttccgctgattcgtcatccgagctactttggtcgcattctactatatgtacgttgtgacgcattgttttagcagtttctttgctccggctttcgcaagccaaagctctctggtgtaattgtgctagcgtaaaaaattggatgccttctaatctttcttttaaataatatcgtaaaccattaaaggctaatcctgctagctgtttttctgctaaatgaatttgaaagcatcggttccttgtatctcagaatctccagatgtaatcattaactgattcatcttttgcttgtcgcagggccactaggtctaccaaatctaactcatagtcaccagagttaaaatggtcatggaatttttgttctaaccccaccatgacgaaatagaattaggaggtaaagtggcgtaccatgcgaacgcggttcctgttaaagacaatgaaaaggggatc

SEQ ID NO: 34485 - DNA, 929 bp, Arabidopsis thaliana landsberg
acaacacttaccttcttgttggatgttgcaatgatgagactacccataagtacaagggaaggactgtaatgactgcagaagagcgatatgaatcacttcgacattgcaagtaattgttttctcctatgttctgttgaatgtgttagtagaaaaacccatggaagtggcagtgagtggaattttagaacacgttttttttatcatgcaggtgggtggatgaagtcatccctgatgcaccatgggtggtcaaccaggagtttcttgacaagcaccagattgactatgttgcccacgattctcttccgtaagaacatgtgtctcttgtgttagtttttatttagttttaaaaaatggtgaaaacttagttttgtagtttttacctttcacgacgtgcttgttgttagtttagctctttttttacaaatgattttagaactacaataaccttctttgtataattctcatgcacagctatgctgattcaagcggagctggaaaggatgtctatgaatttgtgagtcggaagaattttcatactcctgcttttgacactttcatagttctgttgtaactgagcatctgttgcaggttaagaaagttgggaggtttaaggaaacacagcgaactgaaggaatatcgacctcggatataataatgagaatagtgaaagattacaatcagtatgtcatgcgtaacttggatagaggatactcaagggaagatcttggagttagctttgtcaaggcatgtcattattttcttatctctacaattttgtcctttctcaaaaaaaattcacttgtaagaatcaactttggatttgtcgatttgcaacaggaaaagagacttagagttaccatgaggccaaagaaactccaggagagggtaaaagaacaacaagaaagagtgggagaaaaggcatgtcttct

SEQ ID NO: 34486 - DNA, 3704 bp, Arabidopsis thaliana landsberg
  unsure (1)..(3704): unsure at all n locations
aagttatcttatatttactcaaactcaactctgatgtccttttgttgctctttctcttggcagtgttgtcttttttgtagataagaaagtaaaagttacaaatagagttttgccgtcttgctttgccggaggagctttcttagtcactggtaacttctcgatctgattttcaggtgcagtcttccggcaaagttcttaattaggctttggttcgtgtaagctaaaacaatatgttatgtttttgactggaaattctcgactgagtctatatgtatatatgtatgccgcctctgatttcaagggccttctaaatgtataaactgtgcattgtccatcaaaaatgatggatattatctttaatacaaaaaacatatatgagtgagagaattttactgtcctctgatcagacactatatatatggctattttagttcttttattattttattcttttatttcaaaacctccaaaattcagtaatatgtttattcaatccaacacaaacattgctgcaattgttatcaccaaaaatctctgcaagagcaagacccgtctctaaaatggtgaaatctattacaatctctcacaacaatttctctactaaaaagcttcgagatcatcttcattacaagatgacaatctccacagattctgaggttcttgatgattctcactggagttccaggccttgtcttcatcaaacagaacgcaatagccagtttctcactgtggtaagacaaagctatctctttatctttctcgttaagatcaagtaaaacctccttagtgtctgtaacatatccagcttctctcagcctctgcattatctcatcgagcatagcatagatcctttcgctctcttgttgagattcgtctcctacaacaaactcgtgaaccactccctctacttcaacatacgctacatcccggaactttattaatgccctttacctgtagagagaatctgtatttacttcagaaactgtgcaacagttaagaaaagagttggaaaagagggaaatagttttgcattgcctccatttcgtgtctgatacacttgacttccatccacctccctgttttggcatagacgttagagagaagaacatatgctccactgttcataggatctagctcgatgagtcgcttgagggcaccttcacaagtcttgatatccccaagcattcttgatccgcttaagagagacccccaaataagtacatcaggctccataggcatagatgctataaagctctctgcttctttgatcaaaccagatcttccgtagagatcaaccatacaaccataatgctggattgatggcgtgataccaaattcctcaatcatcattttaaagtaagattttccttcgtttattagacctcgatgtacacaagcaccgagaatgcccacaaatgtcacagagtttgggtttatgttgtcactcgtggtcatctcagagaacagttggaagcactcatctgtgagaccgtacattgctaagcaacatatcatagcactgtaagctttgacatctttcttggannnnnnnnnnnnnnnnnnnnnnnnnnnnnnnnnnnnnnnnnnnnnnnnnnnnnnnnnnnnnnnnnnnnctgtgcctaagacaatgtcaatctcaacgtggtacttatcgatgtaagcgtgaacccatttcccttgctcgagcgcacccaatcgcccacaagccgagagtacagtcgacattgtaaactcgttgggtctgacgaatgcttcgtttggtttaggtaattgcatctcccggaacaaatcaagcgcttcttgtatttcccacacataacgtagccgttaatcaagcagctccaggaaatcacgtttctttcaggcatttcgtcgaacagtttccgcgcatcatcgatcaacccagctttggcataagcattgaccacagagttccaggccggtaaatccttcgagcccgagtcatcgaaaactcgctgagctgatctcaagtcgccacaggaagaatacatgttgagcagtgaagttcggacaaatgggtctttgtcaagtccaaaaagaagaatctgagcatgagttcgttgcccaagaggaagatgaagcggattgtggaaagaagggagaagaaacggaaaggtatgaaaatcgggagagacgcgatggttgcgcatacggaggtagactgagatcggagaatgtcgttgaggcgacgaaacattgtgaacaatggcacgaatgatgatgttccacaagaaagattcaagctttagatgtcgaatatgaaagatgggatttgcataagctattattgccgcccccttgctcattgtctcaatctaacaagtgtatcagaaatcgattttaaatatcaagtacgattttgacaaaaccgaattgaaccggtatttaaatgaatatttggtttcttaatcaatgtacggacggagaggtaacaaaacaaaagggttttgtcctaattcaattttgcagagatggaggaagaattgctctccgccgtgccgtgctcttccctaaccgtcgagtcagttctccgtgtcgcgacggtaatcactagtatccaattgaaattcatgtttgtgttagtgtgtgtatagatagatgtctgagatttttgttgaagctcaggccggtggattatatgggttatgcgccggacctcgtgacgctcgtaaaataggtattgaaattagctttgatttagagagtttttacacttttcaattcattaatctgtgctttgttgctgatttgcttcgccaggtttaagcggcgtttctcaggcttcctttgtggcgaaatccattggcagattcggatttcaatgcggtaatttgcttcctctattgtttttccatccaaattaatcttcaatgactatggaatttgggtataaatctgtaattttggacttaagataattctcttctttgtcactagaagaagaatgctgcatatactttttttttgttttgaaagatcataattctctgttttgcttgccatgtaataatatataatgcagatttcttttagttgtaattttttttggattagttgctctgctcttctttaacttagatctaaattcttcaagtagtgattgcttctttagattttggtatatgcatcaagaattcatttttgtttcaggtcttgtaagtggtgtgtttactatgacacattgtgggcttcaacgatatcgaggcaagaatgattgggtgaatgctttggtaggaggagctgtggcgggagcagctgttgccattagcacaagaaactggacacaggttgttggcatggctggcctcgtctctgcttttagtgttttggctaattgcaccaggacagaaaacccaaacaacactaattaaggtgatatttagaacactgaattttgctaataatgcgagtgtctgacgcagccacattcaccggatattgaaactatcttataagcttgcaggtctttgacaagtccattcaagaaactgtatggaattggaacttgaagatcaatacactgtctctccggttcgatcctatttagttggctgaacccgtggatggttcttcttttctatagaccacacttttggtcttgtctctctgtaccccccccgtacacacaaagtccctcgaaacagaaaacatatttgcatcaatgcttattactgtataatgtt

SEQ ID NO: 34487 - DNA, 727 bp, Arabidopsis thaliana landsberg
ctggattaagaaggggggggcaggcctttttgagtgctgacttcttttcaagatggatggagttttgatgcgaacttcaagctcaggcaaaacatgagtgttcgtgtgtgtgctccaaatggtatacttgtttggagatgtcaaactgtctgcgcctgattctgactcctttgagctcggattcggttgtgttgtcgagctcgcatcctctgattttcccttgattgttcttggatgcggctgggggctaatcccgtcttcgttacaagatgatgaaggatctatcatacttatacaaagaaaaaacaaaacattaatgataaagagtactcattgaagattataaacgcaaaatgaaaaaaaaaaagtatattgttgtttaccattgaagaggagcattgtctggtgagagacataaggcattgttgctaaatccatacattagaatcgcttttaactcttccttctccacaccgcaacaaccgtatttcactctcgccgcttcagccaccgcagctttgtttccacagcagctgccgcttttctttgcaacagactcagcgtatatttgaaaggctttaagcttagcttgtcctaatggtgtttgaaatccgttcttgagaattgatacaatctcaaactgattgcttaagtgagaagttagcttagattggcaatgacggtagataagctcgtaaactttatcgtctttaggcaactccgttag

SEQ ID NO: 34488 - DNA, 988 bp, Arabidopsis thaliana landsberg
gaagaaatatccaaaggcatggagcgtattgctgcattgtttatggcttaggaagatccgatactctctcctctcgattctgtctttcctaattctcttttttttcttatagaaacattaacacttgtgaagtgggaccaaatcatttcacgaggagtactagtaaccctttttaacaacgcaacggtaccgatatcttccacgtggccaatagtaaacggttctagagatgtaaataaggaggcacttttgctcagacacataatgacagaatcgtgttatagagagaaacggtgttttattgagacacgtcacacaccttctctttacctgcggctgtgacagctgcctgcatctttcccgtatttttcagatatttctctctttttctttttttcttaaaccaaaaatcctccgacggctccgcctttgccacgccatttttgaacttattattaagcttcctgtttccttgtatacaaaaatgatcacatagtgagtaacgcccacacgctacaaatttaccatttcgaaaaagactaatacatacatctctttttatgttattggctaatgtcttcaacttttgtccaaaaaaagaaaggctaatgttttcaactaacaattatttgtggtttaggtaatgctatgtgtatattaaaaaaacaaaatcctagttatttacaaacacatgtaaaacttaagattttcataatttgagatatttggaattccattttgttaatgcggcctgtatagttttaaggcccatttacaatacaaacggacaatatgtctaaagcccagcttcttcttttagcaaaactcatatttacacttttgactacttcgatcaaaacttggtttccatgttgttgttaacttgctgctagttgccaatttctattacacgatgatgagctcacacatcctattagtgtcagttattggacaaacacacacatataacgctgtcaatctcgatcac

SEQ ID NO: 34489 - DNA, 887 bp, Arabidopsis thaliana landsberg
tgtgtctgagcttaagaagtgtctccgtgtccccgaggaaccgttaccaatggaagagctcagtgttcagggagatttgacttatatggagtatcgtatcaagattcttgatacattgactcgagttacaagaaataaggtgataaagatgtgcaaagagcaatggagtcaccatggggaagatgaagctacttgggacagagaagaagagcttcgcatagattttccccatcttttccctagtccttcctaaatctcgatgacgagattcttgttaagggggggggtatggatttgtaatacccaaaattctagaacttataaaaaagttgatctccctatgtgatttgccatttacttttgagacatatgcttaatcatggttatgagggaataaacccttattaaaaaaattcaaataagccatcatcatgttggagtttatgtgttgttgcatctataaacaataaagataatattaatgaagatatgttagtgccaaacttggaatttagacccaacttaccacttaggaaaaatgaaaagaaaacaaatggcatgaagaaataagggagtggtacataaatataaataatatatatataactcccaatactattccatactgatgaagtttttattttgtacacttaacttttatgatggatccacaactcaagtttgaagtccaaatattagaatttgaagacataaaagcgaatttgaaatagaataaaaaaagggaaaacgaaactgtacatgtgggccgaacccaccattctggcccaactagacctctcagcgcgcgctcagcccagcaacttggcgctgacaccttggcccacaggcagtcgctctagcttaccgacgtccgcttgcacgtgggt

SEQ ID NO: 34490 - DNA, 788 bp, Arabidopsis thaliana landsberg
gcatccggactccgattgcgacgaacttgatatggttggaaagataagcaaattatctaaccatcccaactggttccaccctaaaattcatccagagtcaacggaaatcgtcgaaacaagtcagcgttcagattctgttttggtgctgcgacaccgtctgttgggccgttggggcatgtatcgcgtcggagcccattaggggcgagtccagggtccacgcacgccctaatgctctatttattcagcagccgccgccatatttaggtttgggttttgcttagatcaattctgtcatcgaacagtgaccccatcccgtaatcaatacaattttggttgcgtttctttcctgttcttgcttgtgttcttgattgcgcttgctgggataagccttcgtggcgaggtcattcgtgtgtcacgggtgataaccaacggagccgtggtgtagtgattgcgaggaaccgttcgctcggagccttggatcatcaacgtcgacatctccactcaatcaagctatcgtatctcacggaagatcgggccacgtctactatcacgtaccttcatcatcttgataagtaaatgattataaatgaagaaacatgaaatacagaagaagaatataaataatgaaaataaagcaatacattatttatattcttctttcatttcataaacataaatggatgttcacaatatttatatatcattgatagcttcggcttgacagaagatgagaatgtgagtgacacacgagcgactacaatgtagtgtgaacagtacgggtgtaaagt

SEQ ID NO: 34491 - DNA, 475 bp, Arabidopsis thaliana landsberg
cattcgtcccaactatcattgtatagaagagatacaagagtcaaagacttttttacattatcaaaaaactgagacttggcaaacaaatcagtaaatcaccatatgaagaattctcttatttataaatagtttcaaatgatttcaaaccgattagaagccagtaactatattggatgaagctctaaccttttgttccaaccctgccaaaagaaatcatttacatcttcaaaactaaagatagaagcaaaatagctcaaaagaatgattttaaacatatacagtatctacttacaatgtaatgcacaaaatatttccattcattgtctttaaattcaactttaagaacctgagaatattattataaaaaaaaaaaaggaaacgatcagagacataaagcataagcagagaagaacactctaattcaagaatacagagagtgtatttcactaaccttggcttcgtagaagcaatcact

SEQ ID NO: 34492 - DNA, 856 bp, Arabidopsis thaliana landsberg
tgaaacatcttgcagagaaaaacagtggttcaccatccattccatcacaaagcttagctcttgagcaaacttcttcatgtctgcttttctgtctaatagatcgtaacaagcttgaagaaatcgctgcaatacactacttagctctgtagttttccattgcaagacgcgagcagtgtaacctgaaagcctttctgattctctgttggacacatgcctctcatctttacgactgactccctcgataacgtcaatgattctgtgaattgatttgctgatattacactccatatccagtctatcctccacagtaagagtcttagtctcctgatggtttgtagaaaagcttgaatggtttacacttgacagagcttttctgatatcttcaagtacttcatcagtgtttctctgcgtgatatgcttatgctccattaccgctttcaagactatatgaagagattgaggtaacgaatctgacttgatatcatctttgggagatgcatcaggattcaatgaataaactgttccagaagttttagttgcttctgatgaattctcattaaattcgttctctaccggaccagtagctgaaatagaatcagaagaacaaataggagaacttccatgtcggttatcgattgtgcttgcaaccattgcaagcttctccatttcagcaaaatcatccattactttcatctatgaagctctaggggttccaaccaaactcgtgcccatttgcttctggatcttgaaattgtccaactctgaaagtaaagcagatgcccaggaatcggctcagcttactttatcgtcattgtgcaactctgcttcggatgcaagagaaacttcatgtgacaca

SEQ ID NO: 34493 - DNA, 2000 bp, Arabidopsis thaliana landsberg
cccatgcaaatctctcggaactccaggacgtagttttagaagtgtttttaatctttatacagataaaatcttttggattggagaatctcagctctcacacgggcaaagattcatgcaatttctatcttactcttacctcaaatacaccaaaccagattttgttagatagtgtgatatgaatatcatcaattgtcgctatctgtataatatcgtatcatatctgtctgataacaatcataaactcaaaacattaaatgaaaattagtttatattaatatcataaacacaattagttatcacgtttgcataaaatacactcatatacccccaaaaacctttttattactatttggttaaccgatggaatcatagatcgaacccaaatatattttcgatgagattgaagcctcttccatacaaatttcgaacccaatctttaaaatgcaacttttgaagggcaacaactaccttagatgatataaaacaaaactttcattaaattgctgttttatttattttttcctttcgcagaagggttttaatttccaccacatagcgatttttagtaaccggccacgaacgtaacgttctataaatgtagaagacgttaatttcgtttgtcttttacaataatatacaaatcgtcaatgacgaagttaagtctaaatatgttactatagctcgtccgttacgcatgttgatccgacccggcccatacactttggtttgctattcgtctcatacactgacctgtgcagtgtgcatgtaggccatgtaagaaatgaaactatgtgtgtccttgccacgtggattcactagtctcgagagaggctgcaataaactttgggatttcatgatatcaaattgtttgtggacttcaatgcaaacctctttattcagagatattctctttgatgtgaagcaatcaacattaaccgaataataataactactcgctatgacaatagtctagattacctttccaatatacgtttctcgtcacttatgcaaatccttttgataatcggatgattgagatctatggagagctctcgtgaaactagtgatttaacttttttactgcaattcaaaaacaatataggatgaactgttggcagcaaagacagagcgtgttaaatgctaacccatcggagacactatttatcttcggaatgatcgtaccatataagcaaagtttagagatattatttttcgagttttccacaaatttattattttgattgttttcagtgtactatcatttgattgttatgttatggcacaaggaaccgaatcctattctttttcttattctttgcacattatattataaaatatacgttttcattggtccaaggataatttttgctcacatcaggttacctgttccataaaaacattgtgaaagtcatttttgtttttgttttctaaagtacatattattagaaaattcacacctaatataagtcatggaaacaaatttaaattgatcatatcattagagttttgtggattttataacatattgatatattttaagattttttagtatgattttagaagtatcaaaacaatattaataaataagatataattgagatgtcatcctagtttatttaaatttattgctttaaaacttgataattacaaattgaagaaaatttgagtgaaacctataactaatttattgaatgatggtccatcatcttatcttcaccattaattatttttggtcttactcttaaatgtttataaagagagcattcactatttagttcatgttcatgtgtaacaacacccttttacacaaacaaaacagaagatcaaattaccaaccaaatttacaattaaggaaacacttttccaaagtacaggcgacaagttgatgatcaaagcctctatttttttaatagggaataacacaagtaatgccacatcatcatctgattcatgaacccgttcctactctctgttcatcccccactatatataactccttt

SEQ ID NO: 34494 - DNA, 2668 bp, Arabidopsis thaliana landsberg
aaaggtgctaaaggataatccgataatagattcatgacaactgggaaacaaaggttgtaatacacattgtcacatgcgaagagatgatagagcgggaacacgaccacgcagacaatccaggaagtggaagattggtcattatcaaaaaacatgatgacgttgaaaaagaatccacagcctcgagtcttgtcggcacaagacacgctacacaacatagtgttaaggcgattaaagagttcaagagatttctcggcatacaaaccgaaaaacaaacacatctatgttttttaattatcttttcttaattgctttatgttttttttacatgcatacaataagagacacgtcttctaattggagatttagtcatttaggtatactgataaaaggtgtaataacaatttaaacggtaataataatgcattagagatttattttcttactagtgtaggaaaatgccaattatgaattcaatagatttgaaacggatatacagagcaagttaaacaaacggctatataattatggacatgcaaacacacctaggacttctattaaatgatctttgcttttatcctattttgctttttttttttccacgcaccaacatgtactttttttatatattacaagaaaatatatttgaagcttcatagttcgattgtttccttattttcctttctttatggaagtgaaaaaacaacaaaaggaataaacatgatgaaactcaatttgattgtgctacttttcttatggaagtgattaaggaaataataaagtgtagaaatgcagagaattgatatgaatctaaaaagtattttcaacgcgaaagttgcagcagaccaaaagaatcgagattggtacatgggcctataatgagcgagcccagccccgtgtgactcagggttatatacgcttgtcgtttgtatatatcatagctcaacttcatgtcgtttgacaataagaacaagatacatctctttaatgttttcaaactcacacattttatcttatattgacccaaaataaaacccaaaaaaagaaagaaagaaatcatcttcagacttcaaatttgcagagagtacagagatgatgatggtacattaatttactgtgcaattgatatatctacatttcggtggatataatctccagctccgcccaccacgccggagaccgactaggcaacgctgcttccggcgttattccggtgatctctctcagcttaaccaccacttccttcatttccaccttctgacttaaacactctttaaccacttcccacactctctccatgacctcctcttgaaagcttttcagagtcgggtctgcaacgggtttggtttcttcctggagcagagaatctggatccgggatctttccggtgatgatctcttgtagaagggcgccaaagctgacaacgttggtcatggggtcaagtggtgtggagctgaggaacgtaaagtctgagactttggctgcgtaatctgttgccaagtagactgaataagagctgaggttggtgtcacagatgggtttagggtttagattgtgcatatgttccatacagtaagctattcccattacgattctcagtgtcattggccagtccaaatgctatgcgtcttggtctgcaacataatattgcagtttacaagtttaaaaaatagatgggagggactgagtctgttggaagaagcggcattactacaactcaccgtgcagatgctcgaatagggatccattaggagcgtattcgaaaactagcattcggttgaatggttcgtcttcatggcaatatccgatgacattgaggaagttcttgtggttcacttgagataacctctgtatctgcattgcatgatttgtatgtgttttaaagaagaggagaaagaatgcagaaagaggtttctgatgttaccttttcttggaactgtgtttcgtgatcctctgaccagtcttggagggatccagatgcaactgctagaacggcaatttcagagccggtggagagagttcctttgtaaatggtggcgtctgaggatgtggagcctatgatgttactgaaatcttcacaggcagtttctagttctgctagcttcagcttgggaacaccttcataagtcataataaatacactaaactcactttcaccaatctctgctatgttattgaactagagagtaaacataacagtgatgatacctgtagtaacaacatcttgaagctggccactgctcccagtttccccccatggctttatcaattttaccttttggttccagagaaaaaagaaggccaccaatgcggccatgacgcctaatacacctactagcactccgactattatgtacatcttactcttatgagatttctttttgttgacagcatgaggcacttcagaaagctgaggtggtggagtctgaggtggtggtggtggctgagctgatggagggggaactgggggaggctgaggcgggtttggggaactagcgggagggattttacctccaatcaacggaggaaaaggagagaggaaaggttctacgatgagatcctctgtagaaggaggagaactaacggaagaggcggcgtaggccagggggactttttatctgaagcagctacgcgcgttggagctgaagggaaatggttggcgaaagttgtt

SEQ ID NO: 34495 - DNA, 1602 bp, Arabidopsis thaliana landsberg
tgttagggacgttgtaggtctgagcgatgtagatcccgcacactgttcccgtgatgaaagagaagctgctccttattaaccccatcttcttctccgtagatcggatttttttttttgggtttattgaattggagatattttgatcggagagattgacggaattaaaagcgaaatccgccaagatcatgagaattctggaaattaaaagtcgaagaattgaagatccattactgggcctgtaaggcccaaatatattaaaaatttacatgggctttttgcgttaaatccatatgaatttagcttttgtttgtttttatatgggaaaattcaaactagtcaccaacttaagaaatctttaatgagttaaaggtgtttttggttaaaggggtcatattcaaatttgttggtgtgtcaaaatcaaactattgctcttaaagaaaaaaaaatgtttactgagatgtatataacattttgttgttgttaaaaatggttagaaaatattataactagagtttttggtttcaccaaaaccatatataacaaatgaattaaataaattttttgatgttatatagattttttcagtaagcatacatatgttgaaaataaactcaacaaaaaaaacatgtgttgaccgtatcagtttattttctaattaataagaaaagtattctattgttttccaggaaggaagaagatatcgaattttgctctttctacttttcgattctctctcgatcgagaggagaaaaagacagagaggcacggtgacacgctgctttcacagaatttccccaaccgacagacaagcttcgcggattcaggtttttctatgattcgatccatttcttaagaactctgcattttattccttgtaaaatcttcctcctagctcctttcttcaattttcgatttttgatttatattgtttcaattttggatcatatctttttatttcttgtgaatcgggtctttgtacttggtacctctatgtagcatttttggcttctgtacaaatctgatttcacctgtatgcatacgactcaatctaaaagaacccaagttttggattttcctctgctttggagctcaattttctttacattctgaaaaaaaaaatcatctttttatggaaatgttcaatttttgtagttgtttgtatcgtccgagtcttaatacttatgagagatcatgtctttgcagatggcgtcatgctaatatgactaaatgagattctggggattaagtttaagtgggaaggctgtaatagttcctaatggggataaagtacttgcccgtctccgtagcatcaacagctctcagctttgttggacttcaagtctggacagagttgtctctcgatagacttcgagcagatgggctgattgccaagaacatttctttaggagactctgagcatgcgcttgagctgcttctgggctcttatttcactattgcgctgcttacaaattttgtgctcaatgtgtatattcttttggtactttctctcaaggtaagagtaacatttttatattgggatgcaatataagcaatgtttttctaatatttagctttcgtagacatcgtaggctcccaacaaat

SEQ ID NO: 34496 - DNA, 4609 bp, Arabidopsis thaliana landsberg
cacttttcctgttcagctgaagattttttgtttcacgttgacgcgattcggttccgttacttgtgagattatttccattattccgaagtgacatcaacatttaatgcccccaaaaagtttagatgtgactattgtcacaattaatgcaaaatcatcattacatcaaataatattaaaaaaattattgataataattaattaaaaagttgttgagataaagaagatgaacccaggaacaaagaattattgagaacgtacattgctgttaaagaagtgttgatcttgtttttgtaccaagtttggagccaaaacaagcattgttcgtgtaagtaatgaagttcttttaagaagttttttgttatgtcatattaggatcttgattgtgttcgaactccatttttttatcagaaaatttgcaaaatctatatttgtttgtttaaaatagtcaaatgataattggtatttatgtttataaatgtgtagtatcgacattccatttgtttttgtagatataatcatgtttcagttgcatttaatgtgtgtctcctgaatttatgatgcagttgggtaatgaatattctcgtatttactatggtcggtgagtggagatgcaaataagataaatggaaatttgaaccaaaggaagacatgtttggtcgctgtgtacgtgttaaggaaaacatgacgtacacagaatttgtacgtacactaagcgaggctttcagtttgaaatccatagagatcaatcccataattagttactggatgccgggagagatgttagtgatgatagatactaaacgccctcctgtctacattgacagtcaagtggggttggatacgttctttttaattcgtggtcggtatccttctctcaacttgtttgtctctttcattacaaccgtcaagacactcgagaataatgtctctaggactcatggtgacgatgctgaaagtgaccgtgtatgtgatagtgtttcaaatgttgatgaaaataatgaggccgtagatgagcaagacgacgatgaagacgataaaacaaatgaggatgaagaggagggggacaacaaagatggtggtgggtatgatgattatcagggtgacgatggatctatagggggaagtaccctcgatcctactattgatggtagtgaaagtagtggcgaagattatgattacaacaagtggaacgatgtaattgtagaagaatatggaatagggaatgttgaggagaacgtcattctcacaccaggggaattcagtcgtctgttggcagtacgtacacaagtcagcgtgtacctggcggagataacatttcccactcgggtgaccgtaccccagctgtgactccaagaagtatgtaacaacatcgtttgtaccaatgtacgtacactatagattgggaagtgtttttaagaacagaaaatcatacaacaaacaatgtcttatctcagccactgccaatattggtttaatattgtatcaataaatttttcttagtaaatttaattcacaaacaaagatgtacgtatattattacacatgtacatacattaatttaccaacaaaaatgtacgtacattatttcaccatctatttttatttaatcattatgtatgtattgagattattgagatataagaatacgtaataaaatagtttgagttattagaaatcgtaccatatacgttcgactaaataattttgtgtacgtacactgtaaattgaatatacgtacacagaagaaatttaataaagtgtataattgtaattttccagtcatcttcaacctgtgtatccttttctgcaaacctaattttgcggccatctttagcagttttctcaaaatctcattttttatacgttttaattactatttatatataaatcttgtaaacttagaatatctttagtttaaaaagctaaattgtttgaatctctgagatttattttttcaatttttgttcatctctgaaaacaagaaatttcttcctcaattttggagttcaatggagaggtgtcgaaatatgaaggagtggataatgaattttgaacttctttctacttctctctcaaatctctccgtctctttctctttctcattttcttcttcttcggtttcttcgtttcattttttttttttttcaaaaactgaaccgcagaaactaaaccgaaaccaactcatgtgcggtttggttgcttccattaaggatattttgatccgaaaatgattgacaagacaaacggtgaaaatcatatctcactttgacaaatcatgggagtaattcttttttcatccacttatgtgaaaatttctttttaatatattgcaaattttattttttattttctcatgttaatatatgaagacaatagccatctagcggtttcacgcctccctcaagctcagacgcgaacaacgagcgattctgcttcctgaattctcataattgagataccataactcaaacggtgtgtgactaatttgtcagatcgtcaatgttttaaggctacacgttcgaattctgatggttagatcacccagaaaagcgtatctccatggataatgcttttccttgacgacggttgtgtgatgtacaacccgaaagaaggcaaaattgaaaggagtctgatagaattctcagtgatttggttcctgacaaactcagataaatggtgtctaatgttatattctggatgcaatttagctattatagatgtgtttagccaggataggaggatcaattttccgcctctagagtcgctccaatcagatacatatactctcaagcgtgtggtagataaggaatactgttttgaattacctagtggcgattattacaacgagaacgccgatgatctgagaggccgtttgtgggtagacaagaagacgggagagttcgttgtagtgtggttctttaacccttatacctatttattctattgaaagaagggggatactcataacactgtcattcccttgtctgaccaggtccccaaggttgtaaatggcttaactgatctagtactccggggttaccgtctttacatcgcaaccaaacgtcgtttcgctcgagttattgatttgtctggacatcaaaggtttcgaggatgtcaccgggagtaacccaaagccaatgttttcccctctcggagaacataattcttttagcattgcagatataatagcaggagaggttttgttggttgagggcataacctttgaaaactagaggatcttttgtctcttcaaaggatcctaacaacttagacgacccacatgtctacccccccccccaagcttcttgaggtagattctcttggtgatgaagcccttcttgttgacttggtattaccatgcctactaaccatacccttggtatcaagccaaactctatctattttactcgtcatgaccgtaaccgttttaaaatcccttttgatctggacatatatgtgttcaatcttgcaaccaagaccctcaaacgcttccctcaactcgccaacatgaatctcaaggatgctcaatggtttcaccccatgacttcagcgccacaatacatgctttctctttttaattggcattgtattttctctctttttatttctgtctttgtattaaattttatgacattgccacttgctggacaccttacttggcactttctttgttaaaccctaaccgtcatgtaaatttgtttgatataaatcttgattcaggaaaaagtctccacatctcaattcgtttcaacgctttgtttgatgtatgtatggtcagacttagtttgatgtatgttggaaagtttgtctagtcttcaagaccaaggacttaactatgttgaggtatcatttacatttcacaaacatatattccttcacaatcagtcctctcattctcagcgtcatccaagtcagcgtctatgtcaacatttggtgggaatgtgccaatggctgcaattgaatatacaaactctttctgacagaatcttcttgaagaacctctcaatgcaacattccaaggtgttgagtcatcttctcttaggtaaaaaacttgttttgcttgagaggctagtatgtacggatcccataaaaatgagacttgactatgattcaggtttacaagtgttaaaccatcctcttgcttcaatccattgctttttactgcctagttgcagcagaacaatagaacgtaaaagacattataatccaacaagataatatctgtaatgcagccatagtatgaaaccaaatcgaccacttgagaagtgtcttttgcactagacctacagatagcagatgcctcatagtacacaccactgttctgagttttcttatccactgttcttgtatgaaatcgctgcccattcactatataaccagaatatgtctttgcacaactacgtggaccataagctaactatttaagtgtttcttcatgtctgtttgaatcaagaggtatctaacaaatttaaaaaaaaaatgtgagacacctatatgcttactgataaagtatagtgtttaagtgtcaaaagtgagaaataaacatgcctgttttttaagccatgaagcaaaattctaagtgtacaagtttcataagtgtggtgcatcc

SEQ ID NO: 34497 - DNA, 1067 bp, Arabidopsis thaliana landsberg
ttttctcgcgcactattttagaggcaatgtttctctcaagcttttgattggctttatatttttagtcggagaaggtgaatcgtcgcattttaaaatcgctgtcgatacggggttttgaattcggttcggacatgagatatttgtccgagtcagataaaattgattagaggacgacatattgagcattccgtttgagagtacaaactcacataaaaatagtcagacatagatcaacgtttgaggaattaaactcgggctcagaccaattaacagccgtcgagagtttgatttaatgagcttcagatgagatttataattcaagaatgatttttgagtttgcattcgttccgagaataaaagttttaacaggctccgaattcggtcttctgtgagactgaataactccgaattcggtgatatgtgtacgaatagtctggataatcagagacatacgcgagcgagaaatagaaattttcactgagcatccgagttagggacaaatctcccgacataacgcgaaactgacacctggggtgtcaacagcatctctagtattcacaggaattgcttctttcaccgccgaagctgaaggtggcattttctcaatagcttgcattacgttcacaatccgccgtttcttttgccctccaaccttctcctccgcagccgaaggaccttcatcttctgtaaaaggttggtcagttccaatctcagaggacttatcagcttgaatggtggggattcagtcattaccttcagaatttctgccaccttgacaatagtgggcgatgatgggttcaaggactccttcggcgcttcatctaccttcggttcgacagaaggtatctcatcaagttttcttttcttaggggcttctcctgttagcgatatttagtcattcatttaggcatttgtttcaaatatgcgatacatacacacaaagatagatattttaaagataatttctaatgtatacaaatactttgtaggtaatcctttcaaatatgtatatttgaacaaggatcaactacaatcttacatgcatccttgaattagatctttattag

SEQ ID NO: 34498 - DNA, 1630 bp, Arabidopsis thaliana landsberg
gttgtacatctgaggcttctcttccatgaaactcatatcaccaaaagagttgtcaaaggagttgttgcagtactgctgactcagatgtgttggctgctgaaccaaagttacgcttttgtttggtttagccactgatttctgaagattattagtcttagcactaggacgtttctgggatacgacgctagggttcttctcctcgggaaaattcaccttagctttcgtgccacggattctgcgtgctgcagcatcataagctcttgctgcttcctcagcagtgtcgaatgttccaagccattctcgggagccttttctcggatcacggatctcagcagcccattttccccaaggacgctgcctaatccctcggtattgattcttcctcttcctatttgcagatttctcagcttccccatccaagccagtaactttcttaccaaaaactgaacctagtagtgaacaacaacaaaacaaaagagttcttctataaataactcatcaacaatctctaatcaaatctcatcacacaaatcaagtctcatcactcaacctcatatgcatataaatatcacacaaatcaaacctcatgctttatacaacaatcaaaatcgtaagcatataaaggtatctatgaacagagctaaatagaatcgaaacttaatttctaaccaattcaatcgctcaaactaaagtcaatccctaaatatttaccttccgcagcggcggagacggcgggttttggagtcgaagtgaaaacgaatggtttcacatcggcgaaaacatcaccgacgtcgaaatcatcatcgcaatcgatagacgaatcatctttgaaaccttggaaatcagcttcgaactcagcgtcaaaatcgaagaaattcgaacgattcttcgagcttttcttcgatcctttcaaattcttcttcagatccggccaaataaactcgctagtaacacggcgagacctcggcggtggaatgaaatcggatattatagctcctccacacatggcggcgattcttgagggtgtaaatgttcgaaaacagaatcttagcggcgaaaatggaaactaattgatacttttgggggttatatctttgcttcttcttctctcttcaacgctttgctttgttgttttcttcagaaagagattttagagtaaaataaaagatgaagcgagtacgatggttgtttactattatacccttatcttgatgtactatttacggtactaccagacttttatattcattgactgtagatctattttgtaaattaggattttattagtttattaatagttagttgcagtaaataagattaaaaatttagtcagagttgtctgctggtagacaaaatactgaaaatagtctaaacaaatttttacctaacgtcaattgattttttcataaagtctatttcccttagatctagtatctattaatgtgattaggcattaaaaacacaactaaatacttttgcaatgttgtttgcattcaggagtagccaacgcagaacagatatttaacatttaaatttaaataatattataaatgaattatgaaaatgttttaacataggtacaaaataaatgaattattgaaaatataatgaaaaactatacaacaacttt

SEQ ID NO: 34499 - DNA, 4175 bp, Arabidopsis thaliana landsberg
gtgaaattcccttcctctgacggtgatcacgtggtgcatctccagcaccaatgttggcatggccattttgttgattctgttcttcagccatttcgagtggttgctaaggtacaaggttgactgtggttctcctttttctgagttcgtgagctatgcggttgatgttctcgtcgaaaaggaggttctgattgcctgttgatcgtgttcgcatacagcagatgggtacctggatcaagaagacaacaagaaaaacacacacttagtaaccgaaaagaaaattgaaaaagaacttgatctaagcaagtctgaaatctcaaatgtaacagacaaacacccaattggcaacggcgccaaattgataataggcttttagtcaattatcctaaaacaccaatcatgtcgttgtactattttaggttgttaatccaaatgggtgtgatgataacaatcaagatgtgatcagaagtcactaagtcaagccaagcaataacaggttttggtgtgttctagcagtcctaagtgaacatgcagaaaacagaaaatcaaacagaaacagtaaaacattcgaccaacacaactctttgcagagcactgggtgaggtcgagtgacaggtcgagtaacagacagaaaataaaacacagatactcgactgcacagtctgttgccagacaactgggtggtcgagtatgaggtcgagtaacaagaaagaactgtagaaactaagcgacagataacaagatgcagtaaacaataatagagtaaacaaagagttcaatgagataaagaattcccgaggatggggtaattgagtagtttcgattccttagtttacaggtgattgacatgcttaataaattaaccctacacaacaagttcattaaccaaatctaagtaccaccgcaacagagaccctcaagttaacctagtcccagactcaatcaccattgacgagagctaacctaacaggcattacgaatcaacaagttaaagccaaaacgctcactacaaccaataccttggtacagggtcacgaatctctggaattagtggttcagacatttcatcgaacaccttttgggcgcagaaatgtctgggctcaaattccagttgatcagaaagcaataggcattaagaacaactaatgcagaagggatctaacaatcaatactcaatcacctagaatactgagaattctacactactctaacccatcctcagaaacctattcactactcaaacatcataacagaaagcataaacgttgaacaagttgaaaacatgatagcaacagtgtaatagaaggatgataacaaaatgaacaacggtaaacaaaatcaagaaaaaaagctgaatactgaatactgaatagataaagagaaatccggattacaaaaggtctagaagataaggtctgcggaataaaactagataaaaaacttgttttcgaaaatgtgaagtacatgctacttatagccaaatattctgaaaccctaatacttaaaacgacgcagtattgggacggattaagaactgtactcgacccgtgtggtcgagtggatggtcgagtgataagctggagtcttcttctcttccttgtgctcgagtgtctggttgagtgtagaataaagaagactctgaagctcgcaatcgagtctgtagtcgagtggtggtgatggtgatactcgacttcaatgtagagtggtgagatcgagtagtggtctggtaatgaaggtgaagacactcgacctcggggtcgagtgatgtgatcgagtgatggtcaggtgatgggatgaagacactcgacctcggggtcgagtgatgtggtgaagtagtgatgtcctcttctcgaccagggggtcgagtggtatgttgagatcttgaagctcctactcgacctcgggtcgagtggtttgacatgatcaggtccgcttcttccagatagctcgtcaacagctccaaatcacctgaaatcaacgcagatatgcaacatgcatgcaaatctatcctaaacatgcaaagtgatgacaaatgatgtgaaatggtataaaacagtggtgatatgatgttaaagtgatgttaaatggatgctcaaaacatgcaaattacagacttatcacctgtacgtacatgtttatgtgcattatgccaaggctagagtttaagaggtgggcttgaacgtgtgttgagacccaaaagaaagaaagaagggccaaggaagatgcccattcgttttagacaagaagagggaaacaagtttgtattcaagaggtcacatatgtgtataaacattaggacatgtcactttcactctcgtgtttcactctctctctcttcatgtcgctttctctcttaggtctttgtgtagagatcgaactctcctctttgcctatttaaagtaatagagcaaattgtacattaccagttttgttaattttaatttacttaattttatgtgtttctcattgtaaaaacaacaagaataatagacaagctcttatatcgttttgtgtagctctctcttctttacttgtgtttaactaatgagttacaatgtagagagatagtgttacacgaattagggctaccttaaggcagcttattgcttgtcatacacactcttaaatacactataaactcttctttatctagtacttaagctccagattatattaatgatcctaaatcctctttatcttaagtaaaaaaactacaagtgttgttgttgatataacccgatttgaaccgattttatctatgttttaagtataggattttgagtctttatgttatttctcgagtctttttagtatcttttcaggtactctatgcaatgggactacaatgtccataagaagacattttggagcaaaggcgtaaggaaaaggaagctaaggacgacttcacttccaaattcatagggagtgtctatcgacacactcctggtgtcgatcgacaccacttgtggtccagcaaagtccatgatgctttcatgtttacagaaaaggaaatttgccctagaagacttccctatttgctttattagtccctggatgttttatagggtttttatatagttgtttagacctaagtttcttttatgaagttctttgcaaatccctattttcagagacataagctattcatcccttgttctcgagagattcattcagttttcaatacagtgaagacatcccttcttactctaatcttatttgatgtgtttatgcttttttactcaattatgttgcttgtttcattcaatatgtctgagtagtttgcttgttaggaatagggtttctcattagggattcatatggtttagtagatcgcccccctgttaggttattctcgtagaattcttcatctttgattgatcttaatgctagatctagagtaattaactagatcttgaatccagacaatagatatgcccaccataggtatctgtagttggatctattatttgatgagtctggtttataggtgtgtaataagaataggcctatctactaaggtgaacaattgaactcatttagaatgcaagtttaggttaaagatctctcggcttctccggttattcttagctataggcatagggagttttgcggaacaccactggttatttcataattagagtttgagtttaagaatagttcgataacaacctagctttaattagatctactaaccaatagtttcctgagaacaccttgttcctagctctttatttcatcgtttataaccaatcaatcattctctgctagcttaatcttgatattgaattcattgtgtgaataaaagaactttgtggaaatcgatccttaaatactgcaattgatctcttgtttgagagagtagttcttaaggtaatttgaaccttatcaatagggtttagagattatttctctaattgtcgaatacaagatgtaagaattcaccttaatagatctataagaaacaaagagtagaaagtagggatttggtgtctttggagctttagatccaagagacaaatggttcttgtgcttctaagcttctcggtgaaggcacaagggagatgcatgaagagcacaactcttttcgtgtctaaaacaagtattaataggtctcggaaagttagtagtgggtttagggttttttggaaaaacattacgtagtttcattacaagtgcag

SEQ ID NO: 34500 - DNA, 401 bp, Arabidopsis thaliana landsberg
cgaagtcttctgtaacaacccatgtcatactgaaaacatacgatcaattatgtttttgaggatcttcggaggaagaaggcccccaatagttagtgtgtttctccctcaaatgggtgaagttatatgttggtcaccagttaagacttctgaggagaaccgaaacaagacaacacaattgaagtaataataccccttctcccttgatttaccttatgacaaagggacaaatcatagggagaaggatactaatgaatataaatgatttaatagagcaaggtgtaagctcagttcatctatacccctcttttttctttatatgtttattgttacaaaactaccttcggaatgttcaaaggggagactaaggggcacgtgctttacaagttcggatgcaaagcaat

SEQ ID NO: 34501 - DNA, 6731 bp, Arabidopsis thaliana landsberg
  unsure (1)..(6731): unsure at all n locations
ccgacaaactttctgctcatcttttggataaaaaccaggtggtggtttcatatacacctcttcttcaagatctccgtgaagaaaggcgttgtaaacgtgcatctgataaaccggccaatcattcccagctgcaacctttaaaaacaaacgaaccgtacccattttagctactggagcaaacgtttctccatagtcttcaccttcaatttgtttgttaccaagagcaaccaaccttgccttgtaacgttcaatcgtgccgtccgaattgtacttgatcttgtagacccatttgctcccaatggctcgtttcctaggtggaagattctctaatgtccatgtttcgttttcttctgaagcacccacctctgtgcccatagctttcttccatcgttcattctccatagctgacttgaatgatttgggctcaatattctcagtgatagccgctagataaacacgatgtgtctctgaaaaacgtgtacaagagacatagtttgcaatgggatattgggttttaccagacttgttgagcaattttccatgtgccgtattaaccacataattgttgagtctgacagatggaattttcggtctctttcctcgacccaacagatttgatgatggtggcacaggattcgtggagttagacgtagcttcgagggtagtcaatccttgatcggaattgtcagactgagttgtggaggtcggtggtgacgaagatgaatcagaggaagtggacggaggcgtcgagagactcgtagaggatgaagaagcaatgtttgtatctgggctggataatgaagatggacttgaatcagttagtgggcttttgcccttatcgggcctatcttcaatttcagctaatgggttcatactgaatgaagcccataactcttcttcttcttcgtgtacaggagaagccgatgatgaagatgacttatcaaacggaaactgatcttcgcagaacaccacatcgcgagagatgaaaaactcctctgtttcgcaatcatatagcctccaaccctttttgccatatggatagccaacaaacacacactttcaacttctcgattcaaacttgtctcccttatgaccttgattatgagcatagcacaagctcccaaatactttgagatgtgtataatcgggctctttcttatacaatttctcatatggtgttagaccattcagaactgatgaaggaatacgattaattaaataaccagctgtgaggatacactcaccccaaaattggattggtaagtgtccttgaaagcgcaatgctcttgccacattcagaatgtgtcggtgtttgcgttcggctcttcaattttgttgtggtgtacccacacaggaagtctcttaaagaatcccttgctgtcgaaaatagtttgccaaacttgtgaactcggttccattatcactgcgaaaactctttactcttgttgaaaactgcgtttctaccatggcaataaaattctttatccaagtaggagcctctgttttgtcgttaagaagatgaatccaaacacttcttgagaaatcatcaacaagtgttaaaaaatagcgagctccacaatgcgaaattgttcggtacggaccccacaaatcagaatgaatcaactcaaaagcttgtgtagttttattgatactaatcggaaaaggagatctagtttgcttggcgcggagacagacatcacacgctttattcaaaatatcagaacgaattgaaactgtaacattcttaagagagccaacaacttgtgcacacggatgtcccatgcgatgatgccacagctcatatgacttgtcatcttgtgtcctcaccgatgctgccaactccgttttgcaaaactagtagcactacaagaaaacagtcgttttgcgagggaagaattactagctaatccctcgcaaacagctaaaagcgagagatttgcgaagaaacccagttcctcgcaaatcgcttctcgcaaatggtaaaaagtcgcaattccctcgcaaactttgcgaagaactgttttcctcgcaaaacacacgcaactacagttctagtacttccctcgcaattgttgcgagggatttgcgattcttttttaccgcctagcaaatccatcgcaaatattgcgatggatttgcaagcgttctgcaacgttttcctgatatattaagacttgattagtgtctgattagactctaattacctagttaattagttgtaaattagttgttaactagtcctaattaataaattatggcttgcttagagatgatttttgcttcttaaatagaaacacaattgaaagctgaaatttcacaagttatataaaatgtatacaacaattataatgtgtgaaaccataatcaacttgttctaaaaagattacaaggaaaaaagagaaagacaatgttctcaaaatactgatgatggagaggatcctgttgcaaggttagctagggcagcagcagcaggtgtctcctcattggcttgctgttctggagttgtagctacaggtggttcatttgcgctaaccggtcttgtctgtgtcgaggaacctcatcgaagaannnnnnnnnnnnnnnnnnnnnnnnnnnnnnnatagtcaaagaggatatcaaagttgttgatcttctcagcctgattttgaatgcaagcttcagcggcagccagcttcgcagaaagtataaccggatcatcactaggaagtgttggaccactatgaactgaggatgcttcaaactgcagagatccaacaccataaatccttcctttctttctcggagcaacctgcaaaggtcacaaacactcacaaggacacaacagaaaacaagtgagaaaacaagttcaaaagaattcagacacaaagtataatgaataagctgccaagactaagagaactttatatcaaacactagcgacccaacacaaacatttcagacaagtacacaacacaaacacttcagacaagtacactaaagaattcagacaagtacagaagtacacaacagaacagaattcagctgccaagtacacaacagaattcagacaagtacacaacacaaagaattcagacacaaagtataatgaataagctgccaagattacgagaacttgatatcaaagactagagacacaacacaaacatttcagacaagtacacaacagaattcagacaagtttgcaagtacacaacataacagaattaagctgccaagtacacaacataattcagacaagtacacaacagaattgagacaagtacacaacacaacaagctgccaagtacacaacataattcagacaagtacacaacagaattcagacaagtacacaacacaacaagttgccaagtacacaacataattcagacaagtacacaacaaaattcagacaagtacacaacacaacaagctgcaaagaaaaagcacagaagatttacctcagtaaaaatcttgtttttggcatgaactgtcaacccacctgatccagtgctctccggattgtccagagagcacatatgagactcttcctcttctatcctagatgtcacttgcttgtaaatttcctctgacttcccatcgatgaaagttccatccgcttttctgtgtgtctcatctagcagctctaggaaatcaggagttgtttctccagtcttctcacactgaaacacaaagagataaacaagttagattcataacattgtagtttaagtaatggtaaggagagaagaatacttatctaacccgttttcttgcacgagctttgtaagaggtctggcctgaacggtgtttatagatgcctttgccatccggatcatgatatctagcatttctgctgttgttactttttttctctgactttggatcttgccaaaactgtactagacctttccacacatcaggatcaatccattttggcttggcttcatcacccttctccttccaatttcccttccaccttgacacttgatcagacatcctagactttagctttgcttcaaactcaacccttactcttttgttaattgaacggtcccagttatatacttgctacaaaacagacaaaacaagcatcaaacatcagactacaaaacagacaaagcaaagcaaacaaaacagacaaagcaaacaaaacaagcataaacatcaaaagagcacaaaacttaccgcanacgtttcataccatcgatcgattgtagcctttgatgtctgtgaccaattggcatgaggttctttgaaatctctttcaaatatgctgcggactgttgctgcaactgtagagtcatcgtcaaacctacaacaacagcaacaaaacacataaggatctctatgtctttaaacttctaagacactacaatgctaagtacaaccaacctaaatccagagacttctaaggcaggaccaaacttctaaggcagaaccaaccaaaatccagagacttctaaggcagaaccaaccaacttaccaaacttctaaggcagaactaaccaacttacaagacctaattccagagactataagcttaaccttaccatagagttcccggaggacgctttgggtctagccttgtcaagccagcacgaccaggactatcgaggagctcttccagtgtcagattgttgagacggtcagcttgaacatcagaatgattgacagaaggctgagtcattggcgttgaaggcgatggtggaacggttgaacctgaacctgaacctgaaccttgaacccctgagatattcccaccactaagcggagaattgacatgcaacgggtcacgctgttattgtctaaaccggacataagtattatctgacggcatcttgcacaaaaaacaaatcaagtgttagaactgggaaaaaagaagtaagatcggagaagaagaataggtcagatttgagagaagaacttagatcggagaaacagaggttacctttgaggcaaaatagatcgagtcagagaagaagagccgcggcggttctggagcacagatcgaagaagaagagaggcggcgaagagagtttgcgccgtaattagatcggagaagaagagaggcggcgatgagtataacagattagagaagaagaagaagagttagatctgggaaaaagagtaagatcggagaagaagaataagtcggatttgagagaagaacttagattggagaaacaaaggttacttttgaggcaaaacggatcgagtcgaagaagaggagactcggcggttctggagcacagatcgaagaagaaaagaggcggcgaagagactctgcgccgtaattagatcggagaagaagagaggcggcgatgagtataacagattagagaagaagaagaagagaggcggcgacggaatcagatcggagaagaagagctccggcgccgaggagatcagagaagaagaagaaaaaatttagggtttgatgcggctggtttgagcttcgctcagactaggtcttcgagtatatatagaaatttatttcctcgcaaaaccctcgcatagtttgctttgaaattgcgagaaagatttttaaaccaattaaaacgcaccacatattgcgagggaattgccagaactcctagcaagtccctcgcaatttatgatttttaataatttagggtttatggtaaaatttgcgaggaagtgcgattgcgtctagcaattccctcgcaattcttcaaccaattaactcaccattttgattcagtgtttgaatcagatctgatttagattctcctatttcgaataagactctcagcaaataaaaacatgactaaatattttaaataatttaaggtttatggtaaatatttgcgagggaactgctacgacagacttgcaaatctctcgcaaagacctcgcaatgttgagtcaatttgaaaaaatacaagaaaacactacttaaaattattcggattagttattctgaatcattaggaagttaaatatctacattagaatctaatttcatctcaaaaacttcaaatgtgcatttttcccaaatacatcaatgatgaacttatgtgttttcaataatatgaatcataagtgtttaacatcttcaatatgaaatgtcatattgaaacatatacaatatgtttttgtgcatcaccatataatcaacttgtatgattatacagtcatttagatttacatttataaatgaaaatcaaagatcccaaatcacttctatgtattttagggtttagggtaaagatttgcgagatttttgcgggtggtttgcgagggttgatattgttcattgcaaagtactcgtactttcctcgcaaatttgcgaggaagcagtctctcgcaatatttgcgagggattagcaacgtgcgtccgtggtcttgcaaaatacctgcaattccctcgcaaatttgctagggattccttccctcgcaatttttcctcgcaaaacgactgttttcttgtagtggaagcagcgtctactgcagcttatctaatcaaaagatctccctcaacagccatagatcataatgtacctgaagaattgtggcttaatagaaagccaggatataaacacttaagaaagtttggctgagttgcatatgctaacttggatcaagggaaactgaagcctagaacacttaaaggtgtgtttcttgaatatcctgaaggcacaaaaggataaaaagtttggttattggaagagaagaaatgtgtgataagcaggaatgttatctttaatgaggcagcagtgtataaggat

SEQ ID NO: 34502 - DNA, 1939 bp, Arabidopsis thaliana landsberg
  unsure (1)..(1939): unsure at all n locations
gtgtgtatgtatatatgaaatgcaacaaccattatacagcccattaaatatggttgttataggtagatgtccccattaagcaactttatccagcccattaaattactttacagagtaatagagagagagaagatttacagttacgtaaccaaatcttcgaaatgatttaattagtaataaataaataattgaatgtcagttactctctttagaaagctaaataagacagctgtttccaccaacaacgtgactggtcgtggggtcctccttcgttcaaagtgnnnnnnnnnnnnnnnnnnnnnnnnnnnnnnnnnncaatatttattacgggcctattccttccttttttaaacttcaattctccggctcacattctcttcttcattcgctccgtttctctctcaaaaactacacacccgtaccacaccaccaccctcctcgtttcctcagagatcccctctctaacttctaaggtaatcacatttccataacgttccatcgtcattgattcttcattagtatgcgtttatgaagctttttcaatttaattctctttggtagatcttaagattcctctgtttcttgcaaaataaagggttcaattatgctaatattttttatatcaattttgacaggatatagaaaatggcagatggtgaagacattcagcctctcgtctgtgacaatggaaccggaatggttaaggtacatctttacatgacctttgtggatataaatctgataactttttcttttattatttttggatacaatgctgttttgtctggttcattcatatgtgtttccaattccttaggctggatttgctggagatgatgcaccaagagctgtattccctagcatcgttggtcgtcctcgacacactggtgtcatggttggtatgggacaaaaagatgcttacgttggtgatgaggctcagtctaagagaggtattttgacattgaaatatcctattgagcatggtattgttagcaactgggatgatatggagaagatttggcatcacactttctacaatgagctccgtgttgcacctgaagaacaccctgttcttctcactgaggctcctctcaaccccaaggccaatcgtgagaaaatgactcagattatgtttgaaactttcaacactcctgccatgtatgtcgctatccaagctgttctttccctctacgctagtggtcgtactactggtaataagatcttcaacacctacaccatttttttaatcactactacccattgcattgaacaaacttcaagttcttcttagcttcagattaagaaagtaccctttcttggctttgttgatgtggtaccattgtccattgtcttgtgtgtttccaggtattgtgttggattctggagatggtgtgagtcacactgttccaatttatgaaggatatgctcttccacatgctattctgcgtttggaccttgcaggccgtgaccttactgattacctcatgaagatcttaaccgagcgtggttactcattcactacctcagcagagcgtgaaatcgtaagggatgtgaaagagaaacttgcttacatagcacttgactacgagcaagagatggaaacagcaaacacaagctcatccgttgagaagagctatgagttgcctgatggacaggtgatcaccattggaggagagagattccgctgcccggaggttctgttccaaccgtctttggtgggaatggaagctgctggtattcacgagaccacttacaattccatcatgaagtgtgatgtggatatcaggaaggatctgtacggtaacattgtgctcagtggtggaaccactatgttctcaggtatcgctgaccgtatgagcaaagaaatcacagcacttgcaccaagcagcatgaagattaaggtcgttgcaccacctgaaaggaagtacagtgtctggat

SEQ ID NO: 34503 - DNA, 1128 bp, Arabidopsis thaliana landsberg
  unsure (1)..(1128): unsure at all n locations
gttaaatataagagcatttccgtatggtatatcttatggcatatcataattcaatatcttagaattaaactttaaaaaataaatcaaaactgcttagaaaataaaattttattttttagctaagagcatgtccagtggtggtttctaaccaaagtttcttacttacaacaataataataaaactagattttaacccgcggtacaccgctanactaatttattttttaaattaatatatataaaaatctgtaaattgtatatagttataaaatgtttttattttatagtttacaattgttattaagtaacgtcctgccaaacccgtcccgccaacccgtcctctaaaaaaaactcatttattttattaatgttgatcttatttatgatatgtttatgaattattgtctaaatattttgtaattttgtagtaattaaatgctatcaaagatctctacggtttgatgattataatcatgtagaaaagcaatatcaaaaatgataattttgtagtaattaaataatattaaatattttggaagttttattttagtaattaatcgtgtagttaaggtagagagattttgggaagattgttaaatgtcaaatatttaattagaagattttctttctaattatcaaaaacaattattaaatgccagtggcagccgctgtaaataaatcccaactccaagatttatttcacaaagtggctgaaaaatgtatatatagataataaataatattatttaattaaaatagtttctaagaaaatgtgagagagtttctaatttaaaagattttgaagacttttccaactattttaagaaactatttaaattaaataatattatttcttattttattattatattagtagattagaaactttggttagaaactaccattagacatactttaaaaggtttttataagaaagaaaaactgtgatgggtcatgtttcaaaattttaatttaaatttttataaataaaaaattagtcaacaaagttttgttataattgagaattcaaatatttatgagttgacttaatgagtccacttaaagtcatatccacacctaactttgactacatgtcgtatacgagagccacgagtggagccccagctg

SEQ ID NO: 34504 - DNA, 754 bp, Arabidopsis thaliana landsberg
tggaattggagggactaaaatcccctccgtattcaattagttcctcaaacctttagagtccatcggtcacagagagcccacgagaagagtaccgctactaggggccacgagggagtaagaaaatcgtcccacccctagataaaccccaaggcaccgagcctggggtcggacgtggcgaacagcagagggaggccggacgaaccgaaagaaaaccactcgagtgggatcctcgtcttaaccgagactgacctgccataagagattggtcgcattaactacgcctgacacaacgtcgcactagagagtcgttccgccctccaatcatgacctgtgcagcccctcggcttacagcgcactaatgacatgcgcaaccctttggttagcgacgcactcatgacctacgaacccctcgatttgtgaagcactcatgacctatcgagcctaggcttaagagcgcaggccgtccgttgggcccgcaacgcgacgagccacgctgagacccaggctacggaggccaagggttggtatggcgcaaaggtagtaatgatggtgccaaggcctcacactgtccacatcgtctgtcataatgagcatggccagagacgaccaggctgcaagacgcatacggacaatgcggcctcaccagggtaaaacacccgattttaccatggtatagtggctccttctcaaggaagccaccgacgggcgacgactgaccccaccatggcctataaaagcaggaggtcgatcatga

SEQ ID NO: 34505 - DNA, 2978 bp, Arabidopsis thaliana landsberg
  unsure (1)..(2978): unsure at all n locations
agatatatgtgtccttagaggttcctcaatctttcattagtcttgtggtatttatcatgtcaactgtatggattatggtattcatttatctggctcaactttacgtcttataatatctagctctagtcatacttatattaattgaggctggtaagatttcgtaagagtgttcatgcacatcagaaagttagtcnnnnnnnnnnnnnnnnnnnnnnnnnnnnnnnnnnnnnnnnnnnnnnnnnnnnnnnnnnnnnnnnnnnngtgattagtggttttgtctaaatttggtttgtttgtcttgagagagagtaaaggataccctagaattcattcctaggtttctggtgtgttctttgtgtgaaataaagcaaaaatcagctctaagcttagcaaagcatgccatgaggaaaggaatacctgaattcattattggtcgtcatctccttgtaaaccccactgaaaacttttgccagtctttgagatttgtctgcataatttgttttttcacaaacttgagaaagtcgtgcacagtgagtctgtgattactaagacgtttgttgatgaaagctaactaacagttgaatactggtttttgattaaacagagaagaaggttgataaagcaccaaaggcagtaatctgcacatgcaccattttgtgaagggaggaagaccaatgtatctatcatacacatcgtttcaattcttccggtacagaagaaaaacaaaatcaaaaaaagaaagctaaaagtaaagtaaagcttccctttaagctgtggagttatatatcatctttgaatgtgtagaaaatgaactataaattctttttcaagtaactctttgtcccttatttgttttttcttcttactttcccaatgtatggaagctgtataggttactaggtccattacgttacgtgtgatgaagataattatatatctatctatttttaaaaaagattgtgcctttgtatttttcgttcttcctttcacaccgttttagtataggtgaatttgcgaaatggccaaattctggctggcccgtaaatgtaatgtaaatgtaattaatgaattcatgaactctgaacatcacttcgaacagaaaattcatctctttttgttttaggttgggaaaaggtaagaggatggagttgcggttccgatcagacagacaggaagagtagtgatggatgaaggcgacgtagtctcgaacagaggcatgatgtaataacacatgatatatgacacaagtcataacctagctacttataaataccaacataaactaaaaaaagtcataacaatggtatgtacttatctacattaaaaaaaaaaaagaattgcagaaagatggcaatatgaaactaaattgaatcaaacacatgtactacaaacaatagttaaaaatatcaaaacacaagtaaaacaacctagttttaacatttaaaacgaggagaaaaaaaaccaaaaaagggagccaagctttatgcgtggcgctaaaaagattgggctgttgatggataaattatgatagggcccaatggaaaaagagagctgtcggtaaaccctagacacgaaagccggtgacgaatcgtccggtcaatctgagtagtataagcgtatacgacatgtataagtagctaactacggtatttatactgtaatattaccaaaacaaggagcttggagataaacaagcgtaaaaaccacacactataatagcattaaagtaaaaacgagctggaagcattttctttagaatattttcttcctgcacctcctcctccattgacgaacaccactgagaccacacttttaaattttattttatttttaaagaagaagaagaaaaagacgaagaagaagtgcaaccaggaattgcaaccaacctcatccgatggatagataaatatattcgtaatcagatctggacaattcaatcaaccgaggacagacgctacgacagtcgacaaaggctggtttgcttcacgagactaagctgctttcagtactcagttcctcaggtaaaagctttgtgttctatttttattttcctaggcaatggtttttaagtaatttctactaaaaacttaagaaaaacggatctaaaacgttttttttttttttttgaatataatttaaccaaaaaaaaagacgtagaagaagaagaagccatgatcataaaaagcccaaaggtcacaatgtttctttacagaaatttactaagttggctggccttttaatctatatgatgtttcttgcaggccaaggtagtagtgtcatacccggcaaaactgtccctgacggctctcatctgcatcatcggggcgttggatcaacggtcacggcactaatatgggagagaaataaacttaaagccttgaaacttcatccaaatgtgacagtgttagcgtctctggggtaagttgaattgaatcaagaagtcatttggttgtcatacaatttgtattgaaactcattctccactgtacagggatgtttctcagcaacaacggtttacgttgttgggtggatggcacagaagaagggtgagtatcttcaatccaatcaatctgattgccacggcggtcattagctcggttgtactctctgagcagatgtttgtcgggaggtgagcattggtgctttcctaacatccttggtatctcttagtagtcctcttctcaactcatctttctttgctgaatcaggataattggagctttcgtgattatcattggcatctcttttgttctttggggaaaaatgggagaacaaaccacgccgccgccgccacctccaccttcagagcctgaggcaactgaggtatgatataggaaaagagtgacttggaagtttgtgagactatgattggtagaggtgtgaattgtgagttggcaattagtgattggctagaaagagatgaagattgttagagatggaagaccatttatagagggataaccagaaaagtatctaag

SEQ ID NO: 34506 - DNA, 1012 bp, Arabidopsis thaliana landsberg
ttttcacatttttctacttcctaagcataagcatttttaaccttaacatgcttcttgttttctttaataaggaagtcctcttggctatccaagagttcatccttctcatgaatagctcctatcaattcatttatacttttctttttgttgcatgttgaggttggcaaaaagggcaagcaaattatcctcatcaccactagagttctcctcatcactagatgttgcatatttagtggaggctctagatttaccttctttttgtcgtcctttgccatgaggcacttgtggccgatgttggggaaaaggagacccttgttgacggcgatgtttgcggcgtcctcgtcggaggaggagtcggtggagctctcatcggagtcccactcccgacaaacatgggcatcgtcgcccttcttcttgtagtacttcttcttctccttccttcttcccttcttgtcgtcgcccctgtcactatcacttgataatggacatttagcaatgaaatgaccgggcttacacacttctagcaaactttcttggagcgggacttgtaatcttttcccctcctttgtttgaggatttggcggaagctcttgatgatgagcgtcattgcctcgttgtcgagcttggaggcatcgactggaagcctacttggtgtagactcctccttcttttcttctgtcgctttgaatgcgacgggtgcacctcgggtgtagaggtggcaccttgctccaagttgacgatgtgtttggagtctttgatcataagttcaaagctcacaaacttgccaatcacttcctcgagagacattagtttgtatctaggatccccatgtattaattgtacttgagtgggattacgaaaaacaagggatcttagaataaccttgaccatttcacggtcatcccgtttggtgctcccgaggttgcacacttggttcactattgtcttgagccgattgtacatcgcttgtggctcttctcctttgttgatggaatgatcctgcatgcatgca

SEQ ID NO: 34507 - DNA, 426 bp, Arabidopsis thaliana landsberg
ggagtgaatacactctccaacatataatatctggcattgtagttgggctctcaagtgcatccgaacgaaccgtcagttgcgctgagtgacagtcctcgcctgcgagggtagatgacctaatagcaggctacaaattccgtttcggaaggacatgtatttcaagtacagtgatcttcgccagagttgtaattaatcgcggggttaccaatctctcatagtaacatacgttgtcacgtacgtgggcctattagaacgcaatttggcgaccagtcggggtctgcaaggggcgcggaaaacttaagatctcatgacgggagatggaaaagaggagcggcgaaggacccgcgcaaataggaagagctctggcgctacagcaacggattgcaccgcagcgtcttggctaggatcataactgcataggacttt

SEQ ID NO: 34508 - DNA, 620 bp, Arabidopsis thaliana landsberg
ccgcattaaaccgccgcgtcccgagcccgtctctccgtcgacgtcggagccccgcagtgccctctgccacggtgatgtcgcctcgacgtacgcaacccaggacacgccccaattccacctccccctctctaatttcctctgcccgcgctcacccgccgttccccgtgcagccgcggaggtccgccaccgtcgccccgggcccccgtcgcgccattgccgccaccgaggagtccccggagcccgccttgaggtaaagaacctctcatgccccctccaaacccgcgtattgccccctgtcgcgtttaattgctcgccggagttgttttatgccgccgccgagccgctccgccgtggaccgcccccctccggtgtccctgccccgacccagtccccaccgggcgattccccgtgccctccccaacctccccggccgctcaggtcgccccagagacccgcagagccccccgcgcccctcgtctccggcgagttctccgccgcgggaacgagcgccgtcgccccagctagccgtaggagaggacaaggccggccacccgatccccgccgtccatcccagatcgggcggccctgtttcaattagccgagcccaaccctagccgttc

SEQ ID NO: 34509 - DNA, 874 bp, Arabidopsis thaliana landsberg
atatattgttcttctttcggtcatttcaggaatcctttgcaaattatagaaaaacaaatgctcgaaaaagggggggaatggctagcgagttcaaacgctaggaagaaagaattggttcagatagctgtgcaagatatacgccaaggatcatcttcccaaacaggtgcattgcagcaagaaatgtctgcaatgcaagattctgcttcttccattaaagtccagtggaactctcacatagtccaagcggaatctcatcatctcgataacatatccgcagttgaggttgcaaaggaagatatgcagaaaatgcatctaaaatggtaatcacttctctcttctattaaaccacaacaatttcaactactttcttatcttttatgcgacattaaaacctttgtgtcatgattgatccttagtctggagaattcaaaaaccggaacccaacaatggaagactgctcaagaatcattagttgatctcgaaaaaaggaatgttgcaaccgcggattctattattcggtaaggcacctttctaatgtcattcattacaacattctccaaattcaaatcttctcagtctcaccatgttaattgtaataaacacaggggagccatagaaaacaatgagaaactacgaacgcagttttctttcgcggtctcaaccactttaagcgatgtcgattcttcaaacagagaaatcatctcatccattgacagtaagttatcataattcgtttttttttctttctcatatttctatcccaatttataaccaatccttttaactttggtttcgcagacttgttacaactcgataaagacccatcaacggatggtaatttcacaatcgttccctgctctgaaaacctggaaga

SEQ ID NO: 34510 - DNA, 2574 bp, Arabidopsis thaliana landsberg
ttttcctcttgagatcctggtccttaggaatcacaaatctgcttttgaaccataacacacccttttcatcttggcggaaacaattatacttctcatccttctgatggagattcttcttgataatctgcactcccttgtcactgagctgggccatgatgatttggtcttgcaaagctggctcaacagaaatgtgagacaaagaaccagaaggaatcacttcaatttgcatcttgctcaactcatcacacaaggtgttaatgcgagaatccatcagaatacaattgcattgcaacttccgactcaaggcatctgctactacattagctttccctgggtgataatgtacctccaggtcataatccttgatcagctctagccatcttctctgcctcatgttgagatcagcctgagtaaaaatgtacttaaggctcttatgatcagtgaagatgttgcagtgggttcccattagatagtgcctccacatcttcaatgcatgaaccactgctgctaactcaaggtcatgagtgggatagttttgctcatgaggcctgagtgctcttgaggcataagtgatgactcggttgtcttgcatcaagacacaacctagcccggtgccagaggcatcgcaatacacgtcaaaaggcttgctgctgtcgggttgcgccaatactggtgctgtggtcagatgctgcctcaacgcatggaaggcatcttcgcacttctgactccacacaaatttgacttctttcttcagcaactcagttataggcttcacaattcgagagaagtccggaataaatcttcggtaataaccagctaaccccagaaaactccgaatctgacagacagtcgttggtggcttccagttcatcacctcttgcaccttatcaggatcaacagctattcctgcctgagagatagtgtgacccaagaatttgatttcctttagccaaaaatcacacttggacaacttggcataaaggtggtgctctcgcagacgttgaagcactacatgcaaatgcccgacatgttattcttcgtttttcgagtacaccaagatatcatcgatgaaaaccactacgaatttgtccaattcaggcatgaaaacagaattcatcagatacatgaaatatgctggtgcatttgtcagcccgaatgacatcaccaaaaattcatatagcccatatctggttgagaataccgtcttctgaatatcactcgctcgtatcttgatctgatggtagccagagcgaaggtctatcttggaaaacaccttggccccgaccaactggtcaaaaagaacatcaatacgaggcaaaggatacttgttcttgatagttaccgcattaagagggcggtaatctatacacagcctcaagctttcatccttcttcttcacaaacagtgctggacatccccaaggcgaagtacttgggcgaataaatcccttatccagcaactcttgcaattgcttcctcaattctgccaactcagcgggtggcattcggtagggcctcttggaaattggtgtcgttcccagttgcaactcgatgtcgaattcaatatcccggtctggtggcattcctggcaattcatcaggaaagacatctgcatactcacagaccactgggatcttcttcaggggtaactccgtcatagagaaagcacatgactcagtagaaccttgactaggcagaattaagatgaagttctcacagaacggagaattaacttccacagtacggctgactacatcaagcacaacttggtgcaaggtcatccaattagctcccagaataatgtccacattttccaatcccaacacaagaagagtggttttgacaatgtggcttcccagttgaataggcacactttggtttaattgattagttgcaattttacccccaggtgtgactatcatgaatgacccttttgagtgagagaatggcagtttacatttagcactgaacttttggctaatgaaactatgagatgcaccagaatcaaacagaattaaagcaggttgattataaactgaaaaggtaccggtcatgataggagctccttctggcacttcctctagagcagtgaagttgagcttcccttgcctgacttgcaccttctgctttcttcccttgtcttgatttggtgctggcatctgcctctgctggttcctgggacaattcttggcatagtggcccacattgccacaagtgaaacacttgttcccattgccctggcggaactgctgctgctgcggaggctgattgttccttggggcgggagctggaaagcggttgggtgccggctgctgctgctgctgaggtggcctgatcacccatctgcctgcctgctgctaaaaacccctgctctgattgtgagaaacaatccgaaacctctaagcctgagcggatggtgctgccattggtgcctttctcttcttctctgcccggtgagcaacaatgcaatcctcctgggagatggccatgttgaccaactcattgaagctatcaacccggacagtgttgagtcgttcccgcagcttggtattgagacccctgcggaagcgatccc

SEQ ID NO: 34511 - DNA, 1203 bp, Arabidopsis thaliana landsberg
tgagcagacagagtcctgaatcccctgtcacctgcatccatcaccctgacgtggatgcgagtgatgtaatagcaagcccgggaaggctcgctcactcgccttgtttcgtatagggggcagacgtaggtgcctagcgcgtgcaacacttcttgtagcaggttggcgaagtgccccgtctcgaacattgatgtgtaatgttcgacaacaggaccaaaccccatgaagttgtcctgctgggcgtagtcagcttcctcgtggacgtgttcgtctccaccttcttcgtcgtcgtcatcatcttcatcatcgtctccggagtcgtcggggtcgtcgcctccgggtgcaggtgcttggaaggctggtgcaggcggtgctgacgtcgatgacccagctgcgaaggctagtgattctgccaatggggtgggcgtaggcagaaactcctccaagctatccaccagaatgactccgttctccacccgaatgggagggagatccacaggatttcctctactaccactgggtagacaggaacttgtcgtggcggaggaatgtagttggtgttgatccgagtggtttgaatggtacgaaccatctacaagagaaattgtcaacttagttgaattttaaagaggtaaggttaataaaataattttgtaagaaaaaaattagcatgttttgaacagactaggctacccatttctaactagtctaacaacctagagtcagcatagctttgataccacttctgtcacacccgattctgggggggggggcaaaaccgaatgcatagaatatgtgggccagtatccattttccacacatatgttgacatcacaagtgtaatatatcaaaagacaatgcaataaaggcataaagagagtataataactttattacatcatccaggggtaaaaccgaatgcataacatatgtgagccaggatccattttccacacatacgttgacgtcacaagtgtaatatattaaaagttaatgcaataaaggcgtaaagagagtataataactttattacatcatctagatataagtgtcttaaatagtatcatcatcaaagtataacgaatataacatggacggtcttccacaggaagatgactgacgcatcgttagactcggtactcgtcatcaccatcgtcacagtcttcctcatcacttatggtcgggactcagcaagtgggaggagta

SEQ ID NO: 34512 - DNA, 586 bp, Arabidopsis thaliana landsberg
tgcatataatacgcgtaaactatttagtagtctgttaccacatcaccaaaattccaaaaaaaaacaagatgtaaatcttaattgtataacctgtcccttgattttttttttttttaagtagtgatttttaaaatttaatgattatttattatatataaaagtttgaaaattatacaattctctaaagacattaatattttataatttacaatttttatatagtaacattataccatgagacattttggttttatatattttttttaaaatcagactgatttgatatgtataatattagtggtgttaaaaaaaaaatttaatatgtattgaaacggcagattaatgatattttaatttgttattaatgtagattcaaaaacccgttccgcaaaacccattccaataaaaaccccagttattttattattataaatattcattatatgatatgattctgaatcattgtttaaatattttagtcaatgtggaacattaagcatacacattattttgtcaattgggtaatacgtgtacagtgtttaaaattaaaagtcacaatatatgtataaaaaaaaaattgtttttt

SEQ ID NO: 34513 - DNA, 995 bp, Arabidopsis thaliana landsberg
  unsure (1)..(995): unsure at all n locations
acatcaaaaaaactatggtatttatctaatacatagatctataatatgaggcttacataaaaagaaaaatcttcgatatttttatgaatacatatggagaaattaagtacaatatcgtagaacatattataaaccacagcacatctcatatatatattatcagaagttctccatatgtagagataaaaatatgtacataaaagtctcacaacttgcatattcgaaaaatactaagatgaaatcatgtgaaaaaggcattttcccttgagcttgaagaatcggaaagaggatgcataattcaaaaatgtaaattctaagtaacgtgttttcacttttggaaagttcctctatacctcttaggaaaatacagaatttgctcgttttctataataactcaatccaatgtatcaataagggccataccataaatctgtaagtgtaaatatctatgcctttatgttttatatataatagtccgatcctctcaactttaaagacttgttgcttttatataggtgtcactggtgttgagacaatcaaccgctaattagaccactcggggattttcctatatgatttttttctctctgtaattttacaacaaaatattcaattcaaacaaagtaattattccatacttgtttcctttttgcaaaagatttttcatatttttgtaattagaattttctgagtttacatgatacataattacacataaaacggatataaaccctacaatgatgagttttctaaaaaaacgaaaataaaaataaaaagacaaatacccaattccacaaaagactttggtttgcaaaattaggtctaaacggcgacgaccctaccgacggctgagcgattttccgacacttaatatgtgtcttatacacacaaaattaggtcaataatcatatatgtttcgattattgatttatatcttagagctntagaacggttgccttcatggcttcatataagtgggcatttaagcacatatc

SEQ ID NO: 34514 - DNA, 464 bp, Arabidopsis thaliana landsberg
aaacaaatagttatatacttatcatccgaattttattattatttttattcaatagcatttttggagttgtttttttaaaggatattttgggtttatatattatttatctttcatacttacctaaataacaaatatttatgcatatcaattaatatagctcaagaaattacatatatatatatatatatatatatatatatatatatatatatatatatttgttagtatttgaaccgcaccgcacttaatctatagttgaaccacttgtctttattccaaaattaatttgtaggtgtattatatatactttttgtttggtattggtaagtgtacatatatattgcgtatttaatctcccaacaagcatcgtgtaacgcccgcgatcctcaataggatcgttggctaggacttggtccgggagaagaaggtggagtctcggacaagtgagaaagagctggctataa

SEQ ID NO: 34515 - DNA, 773 bp, Arabidopsis thaliana landsberg
tcctccggaacctttcacaactcgcattcgtggtaccaaagaactagctactgtcttaggaagctaacagataatgttgaacatttgcttgtttttaatgctcgaaccactgacaaataaatggttgcttgaataaaactccggagcattctgttctaggccttagtgacaaagtgtatgcatacctgagaagaagttctgtcagaaccatgccaggggatgcagtgtgaaggccaacgtttgttttttggctttctttcactatagacccatgaaactgcctaagtccacattttgttgaaccatatctgcgaaagctcacagactcagaaatgtgttctaattcattagagactagtaacgaatgatttgagttcttacacggcagtgagaggagtacttgaacctccagagccagcaccatccatgttaaagatgtgtccaccactgtgctgtctgctcatcacatccatagcccctcgtgtacatagaattgatccaatcaaatttgtggagacaatctacaaaataatagttacaattagactaatgaacttcaccataagctcaagctgaaattaagctttaggttcaaaaaggattttacctgtgtgatatcttcttccgtgaactcgagtagcggtctaaaacctttgttagtaccagcattgtttatccacccaaatccatatagacagtgagcaaacatatgactaaagatacaaaaaaagttacaaactgtacaaaaagacatatgttttttccccaattgt

SEQ ID NO: 34516 - DNA, 675 bp, Arabidopsis thaliana landsberg
attccttacacccatggtttaagatggtaacatggagattggtagaaaaaacattaactatcacactcaccttggcttggtccaattgggctctgagaccattatcaatctcgatactcgctcgctcttgctcctcacaaggcacatccctatcgtcttgctcctcacaaggcacatcattagtctctggctcaccagaaggaacatccttatgcaaaacaagaaaacaagatcattaattcattgcacattagtactaaaaaaattacatcatgttttgagatggtgactaggagtctaagagattgttgaaaaacagaacaaagacactcaccttagcttggtctatattctcattagaaacatactctgattcattcttgtcccatatgatcaatgacaatttgaagatttcatcatcatcagtattagtaaaagaaagttgttccccatggttagatctcccctgattgtatgtaaactttctcttcatgttcttgaccttattgatgagctgaatcttcgaaaactttggttatacacaatctttgatataacggtacaaggcatcccagtcagatctataggtcaatttcgtttcattctcatagtccacaatacccttttacacacacacacaaaatagagtagaaaaagttagaagaggataaagaa

SEQ ID NO: 34517 - DNA, 735 bp, Arabidopsis thaliana landsberg
atcttgaccaacgacatttttatattatctgtcgagaatcattcacattagtagcaagtaggcgtttaacgtgatcatatgcaaggcatacgagagtcatgcaagtcatgtcaaagaggggttgttttgtcatgagcaagttttcatttggaacatactgggcaaatccgagcgctgctgtgccacgaggaacaatagtcacctttagcaacggttccgcatgttccaggaaccacccagcaaccgcatggccagattcatgatatgcaactgtacggcgctccagcttgcttattacctgcggtcatgaaaccaccaaaagagattgtagaacattcaggtttccgttgtagaaagaaaagtgctgataatatacgtcaccaatttgttgggtttcaaatttgagatttatcctagattcctaaggagcaggttccaatataaacgaaaatgaacaaataataatataaaaaactggcaatacgccaaacagttgaattttgttgataaaggcgaaagcacatacccggtttttcttctccagaccaccaataacacgatcgattgcagagtcaaagtgcgccattgtaactgttgctccttcatgtctggcagcaataagagccgcctcgttacagacattcgcaatgtcagctccagcaaatccgggagtgagggctgcaagcctttgtgagtaatatgagggctcgtgatcaagtttgatcttcttcaggt

SEQ ID NO: 34518 - DNA, 1263 bp, Arabidopsis thaliana landsberg
tgccctaccagccagacgttcggcttaagtcggaaaacacctttaaaccagcattccgcacttgctttcgcattgttcagggtgaccactataccctaacagcgaaataattagccaagattaaaagctcttcagaaaaaagaacgttttacttgctggtgccaggggcgtgttctggcaccctgttcacaaaatatttgagttctaacacaactgtcacatgcacatagaattcatattacatcctctaaaaaagatgctaactcaataaaaaagagtgctttgcaggacatcactgcatcgaaacatctttgctggcaatgtctttcataggtgcaacggaagaaggatggcttgcagcatcgagcgcggccttaacattagcaacaatatcgtcaggcaccgcgacaccgggcctcctcatcaggatccgtccagcgcgaacgactttgtccatagctctgtcgcgctgggccctcaaagtagcggaagtgtcttcagcagccttgacagccagttgagcagcctctagctcctggacgactgatctcttggaagcatgcagatccttgatgatagaatccttgctcgacaccaattttcctaaggcgaatcatatcatccagggactcttgcagcttataatgatgattatccaagtcctccatggtgaaacaatggctcctctccaagatagtcaatgagttgctggcgtcgcgatataacttatcaaggttatcacgagaagtggcaagggcacatttttcctcctgtagacaagaatcagttctccaacatcaagcaagcattaagaacacagcagagaaagccaagtaaagcttaattcattggtcaccttttcagagtcaagctaagcattgagagtggagttcagcatgttggcatcatttagagaagcagaaacccggaccaagtccgcctgaccttgagaatatttctcttcaagatcagagtaccgccgggccatatctatcaagaaacggtcaaacaagggtgtttagccaaaaagcagaccagtcaagtagccaaagaagaaacagagggcactaaccagcattcgccatctccaaattagatacccgctgctgaagcagcacttgattccaatgtgttagagacagagctctttctgggaaacaggcaccctgcaatctcagctgactagccatctcgtcaaccaatgcctgacattaaaaacagatgagtataagaacagtatttcacccaggagtatagtcaggg

SEQ ID NO: 34519 - DNA, 603 bp, Arabidopsis thaliana landsberg
atagtaaagaatcatggaatctatgcaaaattatcagaccctacattaaaacacaactattttctttataaaccttataatgtttgtagatacagaacttgattcattgtatataattatgctatttccctcaattatccatatgcataatgcaatgcaaatgggtaagtagtcagttaaactaagggcttgattggttctccctctgcgtttgcgggtggtagcggttgttagcgattggcaccaatcatataaaccgctagatatcgctttggaccgctcgaaatcgccagatttcaaaagctccttcccgcaagcgtttgcggttgcgggcggtagcggttaggttaaaaaaaaaattatttttataattaattaaaataattatattttccacccaaaccctatatatcttattcttattagaaaaccctaataattaatatattgtaactctattctctcaattatggcatccacccaaacggataaaaattaaaatcaaaatcaataatcaaaagtaagtatgatatattcgtataatccattcacgaccagtttgaattttttttgagttggagatgtgtataaatcgtttgataa

SEQ ID NO: 34520 - DNA, 2583 bp, Arabidopsis thaliana landsberg
tgaatggagagatttataaccatgaagagctgaggaaacgtctgaagaatcacaagttccgtactggtagtgattgtgaagtcattgctcacttggtaagtgtggtatcatttttaattcttctgctaatgtggttatcaagttttgatttgagtttgatgtgttttatggacatagtacgaggagtatggtgtggattttgttgatatgttggatggaatattctcctttgtgttgctcgacacacgagataactctttcatggtggctcgtgatgcgattggtgtcacttcgctctacattggttggggactagacggatctgtgtggatatcttcagagatgaaaggcctaaacgatgactgtgagcatttcgaaacgtttcctccaggtcatttttattcaagcaaattaggagggtttaagcaatggtataatcctccttggttcaatgaatctgttccttcaacgccttatgagcctcttgcgataagacgcgcctttgaaaacgtaagaaaacatctcttctttttaattgtatgtggtgtgtgagagggtaatctgaaatatgtttgtttttctctctaggctgtgattaagcggttgatgactgatgttccatttggagttttgctctctggtggtcttgattcttcccttgttgcctccatcactgcacgtcacttggccggtactaaggcggctaagcaatggggtcctcagctccattccttttgcgttggtcttgaggtgagatatagaacagagttcctctgtttccaaagcagagttggatgattttttttgataggagagttggatgatttaaaagtgttttctctaattcgaaattcaaacttagcatcatttatggttgttctgttagggctcaccggacttgaaggcagggaaagaggtggcggaatatttggggacggtgcaccacgagttccacttctcggtgcaggacgggattgatgcgatagaggatgtgatttaccatgttgagacctatgatgtgacgactatcagagcgagcacaccgatgttcttgatgtcccggaaaatcaagtctctaggggtcaagatggttctctccggcgaaggtgcggacgagatctttggagggtacctctatttccacaaggcacctaacaagaaagagtttcaccaagaaacttgtcgcaaggtattcaattcaaccaccaaataagacatcatcaattttttttacttatcttgatatgattgttcggtgataacttgcagatcaaggctcttcacaagtatgactgtctaagagccaacaaatctacctctgcctttggactagaggcacgtgttcctttccttgacaaagacttcatcaacacagctatgtctctcgaccctgaatccaagatggtaactacaaaactcacatcacaaactcaataccttccttcacaagttaacgttgaacaaattttctatatgggtttttctagatcaagccagaggaaggaaggatcgagaaatgggttctaaggagagcctttgacgacgaagaacgtccttatctaccaaaacacattctctacagacagaaagaacagttcagtgatggtgttggctacagttggatcgatggcctgaaagatcacgctgctcaaaatgtacacataaaaaatttcatatctcccctaattagctaaaatataacatttggattcatgttcagatctaatgattctgttctgttttaaggtcaatgacaagatgatgtcgaacgcggggcatatcttccctcacaacactccaaacactaaagaagcttactactacagaatgatctttgaaaggttcttcccgcaggtgagagtcttataagtctccatgatgtaacagaatctcctattcgttttgcgttaactaattcacaaacttccgtgttacgttttttctaagaactctgcgagactaacggttcctggaggtgccaccgtggcttgttcgactgcaaaggcagtggagtgggatgcaagctggtccaacaatatggatccatcaggaagagccgctatcggagttcacctttcggcctacgatggcaagaacgtggcattgaccataccaccacttaaggcaattgacaacatgccgatgatgatgggtcaaggagttgtgattcagtcataacttcgaaggagaaatggatgaaatatgtgttatatcttcccaatgggtgaagtgttttgtatgattttaataataagaatgtgatcctttttttttcctatgaagatctgaatgtattatctatcttgtaaaaatttgtttctttgtaagatttgaatgtaccgcttttacgtagatcgatgtacatcaatcttataagtttcaattatgtattatattatgtcgatttgccaaaaataaatctaaaacctcaaaaataaatctggttttagatatttgtatatagtactaactcgatgaaaaaataattttttttttgttactaaatctgaaatataattataaaataaaaatactaattattaataaatcaatttaccaaaaattttaaattttgataacaaa

SEQ ID NO: 34521 - DNA, 1279 bp, Arabidopsis thaliana landsberg
tgaattcatgtgacttattttagaaacttgagatcacaaactttctcttatttggtctctgtatggtggaattatgtcattttataatctttattcgtccagtcagtcgttgtgaactctcttataatcgctcacttcatgggtcgtgtcgtatcatcacatattgcatggagtaaacaataacatcagttagctaaatcataaaaatattatacggagaacggagacaatcaataaaaatcatgaaatttttttggtggatagtttacgtgggtattgttgtaagccgtcgcaacgcacggacaaccaactagtactatcattaaagcatcagtttcaacggtcgttctgcgtcatctttttacaaataacccctcatagctatttcaaattaacatgttgcacgtatatagatggccaaacggcggccggcacgggacagaccgccacgggccacagctctggcccagacacctcatgccgactgtgtcgcgccgctcgttaccgtatcggcccatttgattaaatcagtgtaaaatgttaaagatcgatgtagaaggtggggttcgaacctatgccctgatagaagaagggcgggagacactgtgtgaaactttgtaagttgtataacatcatgtttagatatttttaatattgaatataaaattatatatatgtatatacgttttttgtaaaataacaaaaatataatcgtgtcaggccaacactacgggccgagcttacagcctaagcacagcactgtgttcttggctcttgcaaacattagatcgtttctgagaccatattgacgcaatggactccatggtgtttgaagttgctgaattggatggatcaacaatgatttgtcacactaacaataaaatgaaagattatatattggttttaaacgttagtaattgctacgaattagcataatttatatggagcacatccagtttttattgacatcttactgtaacaatcactctatattttgatctatattttgtataagtttgagttcatgtgacttattttagaaacttgagctcacaaactttctcttatttggtctctgtatggtggaattatgtcagtttataatctctgttcgttcagccagtcgttgtgaactatcttctaatcgctcacttcattggtcgtgttgtccaagacatatgggatggagtaacaatacatcagtgaccacatatatcaatattatcggagagcgggacatcactcaaaacttgaattatcggtgatagttcatggatat

SEQ ID NO: 34522 - DNA, 1123 bp, Arabidopsis thaliana landsberg
caatgcttcttttagaaccagagtctctccctgttttagcagcaaagaagcctcaaattagcttcccgctttgtatcaagagagcatcatcttctctcgttagtacagctatagattgtctctatcggtgtagaattcgatttctcatccgccactgtagcattagctggagactctagatctggttgtgtgatcttgaatctctcatcagggcataataggtgttttatcaccaccacatctacttcatggtcttcataattcagtttctcagatgtgggttttgcttcttcctccaaaggctcaatcactggttccatgggtttgattgccatatgagggtttaacactagagggaagagaaggggaaggtttcttgctgagacagcaacccattttgtgacaaagaattttgaagaacagagagattttgaagtagaagtgagtcaagaacaagagagtttttaggggaatgtcttttgtgtaagaagacaaaaagattcaaaacttcaaacttttttgtttggtaatgcgatttgtgacagacaaaagtccttttatttcagaaagtattcggataggacccattactttctaaaattaagaaaagtcggatgaaattgtaagctttgaagaataatggggtcaaagtggaattaatttcttttattaaagatagtaattttgaaattggagccgttatacacactgcagtcaatgtcgtattatctctgaccctttttgcctttttcaaagcaaaatggttctcttcaaaaattcttttaataagttttagaattccaacggttatttgcatgtttgatggttttgtttgtttaccaaaagaatatgaggttacaaattaggatatgaagaaataaacagcagtagtttctattgaaaataaaatttcgttttatgtataaataatttactgagtttgattaatgatatttgttgttaatcgaatgctttcattaatattaactcatgtgaccaaaactgaatggttgatgtgcaaagtttctttcattatgtatagtgggagggaccccaaaaaccaaatttttatttttattttttattcagaataaacttaaaaataccttgaaaaaaagaaaac

SEQ ID NO: 34523 - DNA, 1184 bp, Arabidopsis thaliana landsberg
  unsure (1)..(1184): unsure at all n locations
gaaccttctagtgcataactttctaatttaatttatcaaaaaaaaaaaagcaaattgaatttaagaaaatgttgaaaatttgagagagagtttttctccacaaatacaaatttcattctaacacttcacgtttcgtaagcgcaatatcgaattgctttatgataaaaactaaaaggcagacaagtgccaaaaataagaggccttcgttatggttatctttataactccccctttaaattcttcttttatttcttgatggatggcatataattttcacattttatatattaagtactatcttatactatcaaacgtgaaagaagaaagtaacatttcactaatgtcagtggtctctcaattcgaataacctaacatgttaaattcaaaagcactcctcaattctcatcttaccaacgtgacttactttttttaaatacttttctgatattaattaactaattagaataagatttaaccataacatataagtaacacatttttttatatggctttctattcaaaattttgacatataccaaagcttaagtatataatccgtgtgcgaataaaaccccaaatgcgaaaaaggaaattccactaagcaatgagactcctatcattttcactttacggattcatatacatatatagaaattgtagggcttgtaatcatgattgtaatatgaatttttctgcctgtaatcaatccagaggcattctacgtgactgtgatagttataataatgagcaaccaacttataatcatcataaatttccaagttagctgattaattttaaagttctagatggtaggaagaaaaatggaactatcaatcttttacttagttagtgcaaaattcgttgtcatttgtggtaaaaatttatgactcagtataactttgtaaaaaagatatttcaaaacttgcggtgtacgtggagagagatttcatacggttaaaagaactttttgcttcgtttattttcttgaaatatttgttgttgtttgacctanatcctaatgaataatcaatgtaatataaacaaagtaagtgatctttgggatatattccaacaatacatgcagtttcaacatgttacatatatacagataaactatacttaatagtagtatacaagaaagtatcgcatgattattctcctaatcttcgcatttcgtttctaca

SEQ ID NO: 34524 - DNA, 1079 bp, Arabidopsis thaliana landsberg
tttgtttaaagcgatagaagagaataagaactttccttttcatgtctctcgtcacgacagtaaaggttgagttagatttgtttttgactttgaagaagtctgttcgctgtagacgtagaacacgtactacatttactcatgccctctctattaacttgttgattacgcaaaacgacttttccgacacttatgacctagtccttattggtccactcgcatttctcggatgtttatgtcctctcaatgggatgtgacggaccaataaggtttatcgtatttggtgctagattattcgcaccataacaaatgtttacatcatatgagtaactaattaaagccttcaaagtatggtatataactatatatccgaacgtttcattaacttgtaacttgcatatatacatatttgttgtacacagcatgataggtggtccctctccaaagccaaatagatgtgtttagtgtgtaatacatgaacaagtaaccaaagagataaactatgtttttgtcattttctagtctaattcatcatcatcatcatgacattgaataattcaatatgcctcaattcctttgtagcttatttccttccatggagtagtatcatcattacggttggtaaaatatcaacactataaagataatttatttacaaagggagaactatgtaacgcaaaatgcatagtaaaaggctaattaagagactcgtattaaggaactactttagcacgacagataggacatgtggagctatgagaaagccagatgtctacacagtcagcatgaaacacatgtacacaaggtggtaccaaacgcagcgtttcatcgtctttgaattcattcaaacacacaacacattctagctcgcctattcctggctcaattcctctagcttccgtgtaaacgaatgaaggaaacgacttgatggcttcagcgtcaagtcctcgcggtggcctcctcggactcattcgagcttcctcaatgtccccggctgctgcggcacggtttctgcatcgccgaatgtagtaattaatgatataaaacgctatgaacccgatgctcgcaaacgcaaacacaat

SEQ ID NO: 34525 - DNA, 1353 bp, Arabidopsis thaliana landsberg
ccctttgataagcttcttatggtgaaatgtctcaaggagttaggtcatgtggtggcggttactggagatggtactaacgatgcaccagcgttgaaagaagctgatattggactttctatggggattcaaggtacggaagtagcgaaagagagctcagatatcgtgattcttgacgataattttgcttctgttgcaacggttttgaaatggggaagatgcgtgtacaacaatattcagaagtttattcagtttcagctcactgtcaatgtagctgctctagtgatcaacttcgtggctgcagtttcagctggagacgttcctttgacagcggttcagttactgtgggttaatctgatcatggacacactcggtgcattggctttagctacagagaagccaacaaacgatcttatgaagaagaaaccgatagggagagtggcgccattgatcacaaacatcatgtggaggaatctactagctcaagcgttttaccaaatctctgtgctcttggtgctttaatttagaggaagatcgattttcaacgtgactgagaaagtgaagaacactttgatcttcaatacatttgtgctttgtcaggtgttcaacgaggttaacgctaggagtttggatattaagattgtgtttaaagggttacacaagaacggactgggcattggaattatagttgtgactgtggttttgcaagttgtgatggttgagtttctcaagagatttgctgatacagagaggctaaacttgggtcaatggggagtatgcattgccatcgcagctgcatcgtggccgattggatggttagtgaagtctgttccggttccagagagacacttctttagctacctgaaatggaagaagagatcatgaaagaggctcttgaattgatcttacattagtatatacattatgaagcattgatttgttttttcttttagtatgtttaacagatttgaataaagattgatcattttcattgaacagcgtttttacataacatgtatatatagagtgaaaattaagattacaatctttttagaacggaccaagattgtctccatcgatgctagccaaagccatgaagtctttctctgcctctctccactcggtatctaacacgacgaaacgaactctggcaccgatttgaatccgggacatgtactgattcatgaaaaacgggttctcgcctggaatgaactcgtaaccaggcattttcatgtgtgataggtaaatgatttcataagggccagatttcaaaaagacaccagtcttgtgaaccttgtgcaccacaccatgaacaatctctcctttaaacattttgaagcaaattccggttaaaac

SEQ ID NO: 34526 - DNA, 1988 bp, Arabidopsis thaliana landsberg
atttaggtatttagctgtagattttttttcagaaataaggagtgagagagaaccagaaagtacagataacctttggttgctttgtaagaagttgctctgagtctgaccacctcttttactgcaaccacgacaccaataactgtgtttctttctctttaataaattttatcttttcaccaaatacatagtattattaatttattttgttggcatcgatattaacatgaatatattcgtttttgggtccatattgattatataccgtgcgggacaatatacgtagactagataaggagagagattgcacgttgttttagctccataatctacatttttatttattttttttctgttattctactaaatgccaatatttggcttagcgcatgcgtaatttttactactattatataaagttggttggaatggtagtaggatgaacaagtatttatcgagattctaaacaaattgtataaatcattttttttattaattgacaaatataatcaaacttggtgtctacaactacatgattttgtgaagtttggggttaaagaactaatcaaactcgtgatttttggaccaagacgaatgtacaagaaaaaatgaaaatatattggatcgcatatgatatgtttattgaagactataaatatgtcaaatgaagaattatgttactagtgcgaaaaggacatccatcaagtattgcttgaccaagctcgtgctgtcacatgcatgatggaccacggtggtcgttccctagaaaccaaccaacaatttctggtcaaagtcaaatctcttaatttgggctcttatcttttatttattcacggctattaggtttgaaggcccaatactgaaaacaaatatatgtaaaattaaaaaatgggcctagcgaatatttatgcggcccatcaaataattggataaaagctttataaactctgcatctcccgtctccgcatccaaaccctagaaattttgtctctctcgccgccatgcgaaaagcattttcgatcttactcttaggtagtctatgattctccatttgatccgtatatacttgttattggcatttcatcatcgactgggttgttcgacttactctaattttggtttaaaacggatttaaagtttgtttttttgtgaataagcaattaatctattgttactgtttttgaatcgtttcaggataaaaaaatgtcgacagttggagagcttgcttgcagctacgctgttatgatcctcgaggacgagggtatcgctatcacggtatctttcctttgactcctgcttgtctatttctaaatcttgattggtctctttgctttagtcagtagggttttggaaccgtttcttttgacttgatagttagaaacttagtgaaaatgattcttatggagtgataaggatttggtatagtattatttggtcaggaattgaacaagtattttatgtatctgtctaaatgtgttttgaattgggtaaagatctttacttgtgtttgtttatgtcgttgataggctgacaaaatcgcgaccttggtgaaagctgctggtgttagtattgagtcatactggccaatgctattcgccaagatggctgagaaacgtaacgtgactgatctcatcatgaacgttggtgctggtggtggaggtggtgctccggttacagctgctgctccagctgctggcggtggtgcggcagctgctcctgctgctgaggagaagaagaaggtaaatgaaatagcaacgatagacgaaatcattcttctaactaataagtgatataaaattgatctcattttggtattgcaggatgagccagcagaagagagtgacggagatttgggtttcggtttgtttgactaaacgcagtcacttgtctttcttctttgtagttggatattggagactatattttgtcgtatgagttattattacttgtttgatctggctaaaggactattagttggtttatgatgcgta

SEQ ID NO: 34527 - DNA, 1127 bp, Arabidopsis thaliana landsberg
tacaaagaaagtgaagcgctctacaactaatgggctttaaaatctctatgaaagcctttgcagagcacgatctataacagatggacgggcccggcctttatacaacattatgttttattccaattacaaagaggccctcaagttttgtgtgatatatttttccaaatgtgaaaaaacttaaaaacgcaggaaggaccgggtatgatacgaaacgacatcgtatgagatgggttcgatggagtgaaggaaacacacgtagcccgatcgccgtgtcagtcacttgttgtggtaaggaaagaacaaaacgctaccgtattcgtccccggtcgcctctctctctttctctctcttttctttttttatataatatttatatgtcttcttctattttattcatcagtcgacggactctctcgatttagggttttcttcttctaatctcttttttcatcgtctctgcccaaattggatccctccttccttccttcttcttccatctctcttctcaatccctttgttgatttccaattcgtttgattcgcatcatgctctctcaatagctctctgggtttgatttgagaggttcttcttctctggcgttttcgactaattccggtggctaattagggtttcgtgcgagtttcaattggatccctggagtgaattgatctgagtgagatgcgagcgagtgtccgatcagaatctttctgatcgagcgaatcggaaactcggggtttcttcctttgtatggaaactcggagccgcaagcgggcggaggcgacctcagctgccccatcttcttcttcttcttctcctcctcctcctccctctgcctctggtcccaccacccgcagcaaacgcgctcgtctttcttcttcttcttcttcctcacttgcccccactcctccttcttcctccaccaccaaccgctctcgttcttctcgctctgccgccgccgctgctcccatggacacctccaccgactcttctggatttcgccgaggcggacgtggtaacaggggaaacaacaacgataattctgacaaaggtaaggagaaggaacatgacgttaggattagggagcgtgaaagagaaagagactgagccagagaacaactcacatggat

SEQ ID NO: 34528 - DNA, 823 bp, Arabidopsis thaliana landsberg
tggagtgcccagcatcctgagttaaggacgcatgtgcccttagcgcctaggttatcccctggaatattcccataaagcagggttacagactgtaattacaggaaaacctttacaaattaggcccgtaatgcgcacggccacgcagggcctgttacaatgggccggaccacgcgtgggcctccatgttggacgaggccgcggggtaggacgacctcatcatgggccttcgtccaacgacgcgtggggcgaagggtaagtccgctagtcgtcttgtcttcgttggtgtcgcgtggctggcgaaggcatcgagcgaagggtggcgtcttcgccttcgccccaacactactcttcgaagcacaaaatgccttggcttgatattctttagtctgacttttctgtctcaccactttgttgtttcggcttggtatttattaacatgatcaattgcctgaagcctgatggaacacccctgttgttacttagggtttccactctagagccacaccctaatctgtcaccacatgtggaatagagaaatctttgatgaacaccatttggccacaagaggattagctagtgtctaagttcatatggtgcttaccttgaacgtatgatgctcatgactatagatagatttcagaaaccactcgggtgttgtgagctaaaactgaaaacatgtaaaccaaaggcaaaccattccttatcatcttatgggctaattaaatagattagagtccacaaaagtctctagcaatgatagtaagaagtttctccagacagaccttaatcggcacaaatccatctcaaccgaagaaccctaggg

SEQ ID NO: 34529 - DNA, 486 bp, Arabidopsis thaliana landsberg
tagacagttcgaagatgcagcattaactcaactattcttaatgaataatgtgtattacattgtaagaaatttcagaaggtttggctctgcttcttcgcctcgaatatctctaaaacagaaccaaaacctaacaacatgttatctcagagagactaactatttgttcacagggaagaagcaaagaattttttgggtgatgatttggttcaaacacatagaagaatcgtacaacaacacgcaaaacagtaccagacaatttcctggaataaggtttgaaaaatttgctctctaagatggtaaagagtcttttttctgattaaccatttctttatgtagattttacagtgtatcacggttcagtcgagtaagagcggtctgataaagaatgaaagtataaaaaaaactttagtaaaagaaaaattcaagactttcaattctcaattcgaagagcttcaccagaggcaatgccaatgaccgtttcggacg

SEQ ID NO: 34530 - DNA, 4025 bp, Arabidopsis thaliana landsberg
ggatcacccctacaatctaagctgcgcacaactcctcatccaaaaattcagcagctttatataaccaacaatcgcatcattcctttgattgtgcttgctttcaccttcagccattggtatcaattctccatgatgataccaatcagaccgcatcttataagcctcgtccattccccttgtcaccagatgagcaactacaacactgcctgagtgacgatttatatttcggcaatcaatacaaggacaattaatcatatcaacgtctcccattgccgcagccacagtccggaaaaattttgtagctcctctctcataagcaggatcaactctttattaaagagttaaaaagggaattcaaaaaacatgcaaatctcataattttctaatgaaactaacctatataaaaacaactaacctgcagaggtgcacccactccttgtcgagcattatacattgtaactgtgttttaaaacctttatatagtagtaccataaaaactatttgagatttaataaaatactctttacacatcaaaaaagccatttatatttatacctattagcaaatatataaaacaaactcatatatgaactcaaacaacatatataaattgatctgcgaatagatcaatgaactccgccaaacacaagtcaacataattctaacacatctcacagaaataaataattataagtagacaaaacccacagtaatgttcaatattgtggaataaagatggtacaaacctgtcgtgtgataagagactaagatcagctccaaattcccgttatttcaagtagcaaaacttgcaaaacacaattacagaatcagtatatcaagtgtcatgtgtttgattaagaccttcttaaaccacccaattgtgtcagaccataacataagcaatacttgtctcagtttacaaaatttcagacaatgaccaacaaatgccaatcttggaagcaaccaaatacttcatatctatctagcggcgcctaaagcaaacaacacaaacaaatagattgcagcatcacaaagaacaaggacatgcaaaatgacattgtgaacttactaaaccaaccaattgtgtccgacaataacagaagcaaaacttgtctcaatctcgcaaatttcagacatcaaaccaacaaatctcaatcttgaaagcaacctattacttcctatctatctagctatgcctaaagcaaaccaaaccaacatatagattgcagcaaaactttaatccatcgcaaagaacaagggcatgcaaaaggaaaaaaagtgacgaatcgaatgagtgaaatcctttaatccagactttaagaaaccaaaatcaaacaacaagcagattcgagattcacaaaatctaaaagaaaacaagacagattaaagaaagaaagagatctatagattcagccacacataccttcgattggagctcaacacgggaagagaacggcggaaatagggccggcggcaggtttggtctcgcggctaccttcaaggacggcggagaagagattaatcacggcgacttgtcggattgagagagatcgacgagagatagctagttctagggttttcgagaaattgggggaaaataagtctattcagaaattgactaagtgttttgataaatattaggggactaaatgattttactttcccgcttaatgaaaacattttcatagagtaagaaaattgctataatgttaattactatttcttagcgtcaataaaatgctgtcataggaatacaaaaattacagctaaacttcaatagcagttcagtaaaccgtgctatgccgtaatgctatcaatgaagactttttttgtagtagtgggttgactcccattaagtaccttgttttctactttattggctcgacgttggtaaccgatgaggcttagaaaaaagtggctttgggaccttgattgcatggtagttagtgccaacttctattacaaaatgtccttccgtggaagatttgaaaacacgtgaagaagaactgctttcatatgccttatcatttcttgaatttattccttgctttccttactaagctcgggaggaatgattatcttgaccttagaaatttgaggttgctcgggctgcctagatggcaaattttggtttcttttgggaatgcctttttatccggtcttggctttctcgatatcgggattcatcaattcttcatccgaagagcttgctttctgtggttttattgtcgagagcattagataggatatcttcttgttgacattagcaaagatcatcctcatgttgttgtggtcgatgacagcaccaaccatggagagaaattgtcttttcaaatggctcggcttcccttctagtgatgaaaggtatggttgagatcgcattaagattttcctcgggttttttcggaagaacaccaacttgtcttgtgacagcattcgcggtttgagagacttgagtttctagcttattgacatgagtagaaagactttcaaattttcagtttaattcactctaaacgttgtcgactttcattttgatctctcactctattgcttttgatgaaaagcgagtatttattgcatcatcatttcgagcttaatattttaagaggtgggcgcttgggcttgtccggcttggaaaggcacattattgtagtcaaacattacaagtaaaaaaaattcgttttgatacaaaatgtgtgtttacaaaatgaagtgatatagccatgtatataccttggaaatttatctctgaccatcaacatcaaacaatctaccgaatgacgaacagcaaaagattccggttaaaacaatggagggtgtgtagtatgcaaataactcatcatcatcttaacgttttggtacaaaaaagaaatgggttggagaatatgtttctgtgacacttcttaaaccttggacatttttctagtattcccgggaagacacaagatttcttaaaacagatcacgacgatataaatcatctaagagaatggacaggtagagaggtactaaagatcaaagcgatagaggtcttcatcttccacgtctagttcaggtactcctctagaggctcattcggtcttcttcaatccaccctttcaaatccttcaatgttgtagcatcaacaaaagtaaataaatcaaaatcatgctttctattgaacatttggagcctagtagaactcgaattgcattttttttttctgatgaaactctgattgtaactaagaagacatgttcaccgtaattctacagaaaaaaacaacttgagtgattaaaacttgcctttctttgcttgttaatgtatttagagacagtaaagatcggcttcaccagcttcctcttgggtggaggccctgacaccatgtccaactcctgcttgaaaaaacagataacaaacgtaagtaagaagtgagaaagggaaacttgtgctcaaatgacaggagcaaaagtgtaactgatgacaaatgtaactgatacaatatttagaggaggcaaggacgatggcttacgcgcactatatgatctttacccttgagatgcgtgatgaaatcttcaaagctttggccagcgaatttgcatagtgcgcaaaaaaacctgcatggagattcaccagtttcacagaacttctcgtcgagctcctgtcttcttgtctcccctgaatctattgcgtctagtggaaaaaaaaaacaagttcagaaacaacaactttgccggttatgtcaacactatgaaagagagagagagagaggacaaacaccttgcagtaacttctcccaaatacactttttagataacatcagagacagggtggtagacttttcagaattgaccaggtaagaagctgactgatgatatgcctgaagaagggtgtacccggtcctttctacgttggaaagagcattagataagcgtttcacttccttaacatcgccggttatgagcattatattagccggaggtagatttttcctcttccacagcaaaagttcctcaaaaatctctctgaaacctgtttcagtaa

SEQ ID NO: 34531 - DNA, 6153 bp, Arabidopsis thaliana landsberg
agtcattctttaggaagggctatggctttcaagatgaagaggatggaatactactggcctactatgatcacggactgcgttaagtatgcccatcgatgcaaacgttgccaactccatgtgcctctcatccatcaaccttcggagttattctcttcgatctcttcccccatacccgttcatgcggtggtcgatggatattattggaccattgcacaggttaacccgaggtgtacaatatctcttggtcctaattgattacttttcaaagtggattgaagccgaagcatatgtaaacatcaaagattcggcggtaaaaaccttcatttggaagaatatcatatgtaggcacccatacgagatagttacggacaacggaccacaattcatctcacacgagttcgaagctttctactctgattgggggatcaaagttagttattctactccgcgatatccacaagggaacggtcaagctgaaggtgcgaacaagacaattctaagcaatcttaataaacgtttaagtcatttgaaaggaggatggtatgatgaacttcaaccggttttatgggcatatcgcacgactcttaggcgctcgaccggagaacccccgttctcattggtatacggaatggaggcggttgttccagccgagctcaatgtgccaggacttcgtcgaatagaagcttctttaaacgaagaagagaattctgcgatgctagacgattcgctagataccatcaacgagaggcaagatcaggccctgatctgaattcaaattatcaacaagcggcagctcgatattacaatttaaaaataaaaagcagccctttctttgtgggtgattatgttttgaaacgcgtgttcgatagcaagaaggaggaaggagcaggcaagcttggcattaattgggaaggtccctacattgttaccaaggtggtccggaatggtgtttatagattaaaagatttagaagagagacccgtccaatgtccttggaacatggtgaacttaaaagaaattttatgtttaaaaaggtaacgcattttttttacatgaattacggtgtggcttgatcccgaaatgggtacgtaggcagcttgcaaacgagttcagctattaataaaatttattttattcatttgaagaagagttcgactatacgaacaaacggaggaaaagagttcgacggtgcgaacatacaaaacaggaagcaaggttacatttattaaaggcgaaaacaataaaaatagtcgaagtcttaaacacacttcgaactaggaaatctttctcgtcttgtaaaatactttgactcctcggttggcaagatcaaggatgggcatcatacaatccgggatgcgagcaaattcggtgattccaagctcgatccagtccccgggatgcgagttggggtgtgtagctcccttgatatcacggtgactctccgcagcatctggttgattttctttcgaagtttcttcttttttgatgaacgcttttggtgctgagccgcaaaagctttgatgaaggccattgcaatttcttgatctctgcttgaaagatccttgattaatgcacatggagctctgatctgagatctgaaattgcgaagtggggagcgtcctctgtccgacacattcgggatatcctcatcaatcatcccaaccctggaaaagtctggcatggactccgagcatcgatggttaaaagccataactacacaaaaggaaaaacgaagggtaggtgaagaataaagaaaacacagagaatcaatttatagaaggattcataactttcaaagacgcgattccattcaaagccagggtgattcgcggaagcattcacgtccctcccatcctcatgcattaaaagaataactccaaaacgaatatttatggaatcaaggaaaatagggaagcttccttaattaaaatgggccgaagcccaaacatatgtccatacgaaaataaaataaaaaaagaaaaattcaagtttcgggggacatttagggaagaggctagggaacaggctccttcactgccggttcagggatcgaggtgaacgtctcgttcttgacgtcaaccttgggttcattcttcacacgcttccaggggttgctctcctcctcctcgtcgtcgtcctcttcgctgtcatacgggatcacttcgaccagagcatttaagggaccagaaacttgacctcgagcacggaggtacatccggagcatgtgcgggatgttcgccatacagtcaaagttcctccactcccactggaaggggtcattgtccatggccctcaccttcctttccatgcgggcaattcgggccttgagcgtttgcctcttgaggcccaaacgctgcctctcatcgcataggcggtgttgcttgtcgtctacctagaacaagaactggttaaaaaacgagtaaaactcgttccgaaaaagagaacgagagaggatttaccttgtccataaagtcgtacgcctcctttttatctttcgaagggaagtggaaacaagcgtttggaaagaggacaccggcgggctcgaagccatcgccggacagaaacaagggactcccggggtcgagggggcagacggtgcaggctctttcgcgtttcattctataggtgttgttcaagtaaatttctgcgatcatgtttttcgagagttgagaaagtttatgctcttatttatagtgatttagggtttcactcaaaaccacaaagttaataattgtggtgtgtccgaatgagtttatccatttttgggaatcgaggaaaagtcaattattgccttagaagcgtgacacttttccagatttccaaggacaaaaagaacaactgttgaatttaagataagtgggccattaaatgcagagtaaatagtaaagctcgacgcccacaaaaataatcgaactaactaaacccgagttggggagttcgcggattcaagtctgcatttttagggaaagtctgatcaacctacaaatcctgtaacttgaccacatggttaaacaaaaactctatttaaagagatggaatttgcaaattcatactcaaaattagcacaaggaaagcctctcggaatcataatcttaaagaaaaggtttaaaagcctcctcaggcaaagtatttgtttaaagcctacttaggcagataaagtaattcaaaaagaaaaacaacgataaagaatttcgagtttaagggaaaatccccattaaatggacacagccactgcgggttctcaggtatcttgggttcggttcgaactgactcaggatctgcagcagctgtctaaatctcactcggctcgtcagtagcgggctgctcaccaagaatcatggagtctgaaccatcatcatcctcaataaccaccgtctcccgagttcgtggatggagaatttcaggcgggcgattatcgcctctggaactgatgccgagacaataggcacttcgggttccacgggaccgctgacacctgaggcaattatctcggattaatataagagtagttcactgtggatcgatttttaaaagaaaaagggagaagagttgggatttaccagcccagtctaaaccggattcactcaaaggaggcgattcggtgaagaactcctcgaattgctgggggttgaacgaagaggaaggaagggcagctaaacgatttcgcttttcttccaggacgactttcaactcgtccctctctcgttcttcggaaaaatcatcttcatgagttggtccaaaaggaggagattactctcgtactccttgacatcagattccagctcctctctaaccttcttagtctggatgaagacaattgccccttggatcaattctatcccgcggcctttcacctctttcctggcctttaacgccgacttcgccaactcagcatcccgatagttgtccaccgctttgtacttaagctgcaattcagatagttggttggacaactcgtcgggactggattcggattccgaaagtctgtcccgggaagttgagagttcttcttggatcttgtcgtacctttggcactgctcctgcagctcgccgttggacttcatgagttcagtggagaggttgtccaactgatcctccaatttcagcctggcatcctttgaagtgtggagatcggattcaagggatgaagacttgtccttccaagccataacatctttttccctgtcaagcagtagcctttcatagtactcaatcatgtcgttgagtttgctgttcgcctggatcagatactaacgagaaggggttagcgacaaagtaaagaagcaaagattaaaaggttcattgtgggatgaaggaactaacccgagatgaatgatgggcatggagtaggaatcgctcgcggattgcaggacgccacctatcgaaagttggaaggatggtgtcttttcgggttttgaaacatcgaaagacgttcccctacgtttccatcggtgtttaaaaaaaaaagggatcataccggtcgaaggacgctgaatcaataagcagaaatggcaaaaaatgtgataacaaaaaaaaatgggaagaaatttctaacccgtgagcgacttggactgaggaaccaaaacagctttagctccggcatctcggacctcagtttcatcccgccgagggatagtacttcgctccgccttttcccctcctaatccggacaagggagatacagcgacgggagacggaggacccatagatcggggtgacgacgacggtcgaggagagcggtcagttcgggccctcgtcttgtctcttttgggggaggagctgctgcaggatggtctgtctctcttcttccgaatcaggtcagcaattggctcgctgcagagtccagatcgggaagtgggccgaggtgagtcacggcgaggtgatcgctccttgtgggatgaccggccgctgtgacctttacgttgaggagtgggtctgtaagcaccggcagatcttgcccttcggcattgccatcgtcgactagcaaggttctgctatattcctttttgtcgactgtggattggaagaatgatttgttcacttcgcaagcctccacaatcgacttggacattgtcttgcgtcgagctgtgttggcccgagcagaagtccctttggataaagaagggggcagtggcagctggaggagatgtccaggggggatcatcctaagcttgtggttggcttctatgaaccggtcgagagtgaaggagttccaaagaatttttccttcgatgataatcttgaagaattcgccgaattcagcagtaggaagggtaggtgcgatgaaagctgcgaagtgaaaaatagaagttggtcagataagacaagaaataaaatgaatttcatatgaatgacctaataactaccgggcttagtggtccatttccaggggagcaagtccgggaggttcccgatcgaggcagggctctttttaactaggaaccacgggtgatgccagttctagtctttattcggaaggtgcgagatgagatttctattggcgttcagataagtcgagaagtacccgactttcttcgaagcactcctcacactgagaagttcgttcagtttgggaaccccgatgacgtatccggcctcagccgcaataatgataattcctagaatagtccggaggaggttgggggttagctggggtaaggcgatttcgagggccgataggtaacgcacgagggcttcggggagaggaaaagtcaagccacaccctttgaagtaaatctcgtacacgcaaaagaacccaggtcggtgctcctccggtgattcggtaggctccgacatctggaaatccctcattacttcggctggaatccgttagagctctcccaatcgattaagagattggagagtgcatgtggattgatagtggggaccggcgatgtcattcggccggatgcagaggtcattactagagccggcgtcgtcaaaagagggggattcaggtctttcaattttggaattcattgtgtagagagtaggaagattgaaggttcagggaagaaaagaactttgctttgagagagaagcataaaaaataaaatgacaagcgagccagtgatgatgacagaaccgccttgggagtcgtgggggaagtggaagagttttcccgctttaatagtaaataaacaatatacggtc

SEQ ID NO: 34532 - DNA, 1390 bp, Arabidopsis thaliana landsberg
  unsure (1)..(1390): unsure at all n locations
gacagtagccgaagttattgtggctaaaggcttcgcctcaatccatttagaaaaatactccacagctactacaacatacctcaggttcccttgggccggtggtaacggacctaacaagtcaaggccccacctttgcaatggccaagtgggttgtatgagctgtgttaaggacgaaggttgtttttgatctcttgcacatttctgacaaccttcgcacttttgaaccaattctgctgcatccgaagctgccttcggccagtaaaacccttgacggaaaacttttccaagtaacggcctagatccgatgtgagatcacacaggcctgcatgtatttctttcattaactctataccttcggttctagataaacacttgagaagtggagagcagactccatgtttgtataactccccttctattatgacatatggtcttgtccttgcttccattcttttattataaacttcgtcatccgaaagacagttaccttagaggaaagatatgatttcagtcctccaatcttcactatgtacatgtgatattgcaagcactgctctctccagaagttcaaccgaaggtgatattattgtctcaaagaatacttccgaaggtagagggagcccttgtgctgctgacttagctagcagatctgcatgctcattttcccctcttgggatattttttacagaaaaaccttcgaaagaagcctccaaccttcggactgtatccaaatatttttcaagcttcggatcccttgccttgctgcttttgtctacatggccagcaataacctgagaatcagttttaaggactgctcttcttattcccattgcttttaatttccgaaggcccaacagaagggcttcatactcagcaatattatttgtgcaactaaaatcaagttttgcggcataacaaggtttaactttggaagtgaaaccaacacagcangcgtcccgctccgaaggtccccaagacccatcgcaaaacactgtccatgcttcggcgtctttatttgtttcttcctcctgagcccctggcgtccagtcagcaatgaagtctgtaacgcctgggactgcatcgaagatctatgaacatattcaatacaaaattcattgagtctgcagcccattttccaatccttccagtagcttctcggttcctcataatatccttcagaggttgtgaagaaggaacaattatgttgtaagcttgaaaatagtgccgaagcttcctggaggccatcaagacagcatacagtaccttctccaactctgtgtaatttttctttgataaactgagaacctcagatacaaaatatattggggcctgtctcttaacttggccttcaagcttctcttgaacaagtgctgcacttaccgctgagtgc

SEQ ID NO: 34533 - DNA, 218 bp, Arabidopsis thaliana landsberg
cgaaaaatcatagatcgaactgcgcgaactcggaaaaattgggtgctatcatatagctttgtatcggctaagctcacgagttggagagacgcttcatcgggccgctgacaccttacgccgggctggtcgacgaatattatggcccggactgatggattcatattcgggggggatcattttgagcacagtgttggacaaaaaccgctattcccgggaac

SEQ ID NO: 34534 - DNA, 3474 bp, Arabidopsis thaliana landsberg
acgagataataatatctaatgaagtcttaccagctcaaactttctaagcttaagacacgtcttaaaacagacattgtttggatcatccaaatacagatgtggattctcaatggtcttcctcttgtctgcaaaattcccatttgagatcaaattctaaacagcttcggttataaagcatcagttaaaagaacaatgtttacttacaacttctctgcctgcttgttgttggattcaccacctcaacggattcaacagatatagaggctgagggtaggttctcgggagaatactcactgtcgctctctatctcagcatcaccatgaagagaatcgttgctaaggcttcgaagagaaacgttgctagtgctatgatgagaatcgttgctaaggctatcaagtgaaacattgctagggctaccaagagaatcgttgtcactttctgactcatcagagatctcttcaacatgaacgactgctcgcgtctctttgcagctaccgcgaccatagatacttacttcataacttttgtacccatcaaaaacaaacgtcaagaactctccatcttttagctcgttatcggccacgaaattttcccagcctcgtgccaaatacacttgctctcgcttgctcatcattgctactttccaaactcttccaccagttcccgtgagaatcgctgttttgggtaaacgacgcggtaaatgttcgtagtaagaccttggtatcagcttctcaacacaagaaaatgtaacacaagttaaaactgtagaaatgaatgagaagcaaaacaacataaacgagagactctttctgcaacagaggctttttacacatgagacaataaggagagtgatggttatatgtctcactagacaaacaaaactatgttccaaatagcatactcataaataagttcaaaatccaacaaagatgggttatgtttaccaattttttcatctagggatttgtaaacactactaaccatacgaatttttgtttaaagaaaacctctgtttttgaatctttaaacatttgagaaaaacttgagagatccaactctatactcttgacagattctagcaatatcaaccgaagttggtaaaaaagttaaaatctttaaagaattactgacgtaaattactcacaacaagacttaacatatagagcaaatagatttttcctacaatctttccaaagagttggaactgcgaaaaagagaaggatttggatcacttagaaaaagtacttgatacccaatcaacacacaatggcagctccaattaaagattttcaatcacctgcatttatcacattcaagattactgataataggtttttagtcaattatcctaaaacaccaatcacgtcgttgtagtattttaggttgtcaatccaaatggatgtgatgctaacaatcaagatgtgatcagaagtcactaagtcaagccaagcaataacaggttttggtgtgttctagcaatcctaagtgaacatgcagaaaacagaaattcaagcagaaacaataaaatactcgaccaacatagctctttgcagagcactgggtgaggtcgagtgacaggtcgagttacagacaggaattacaacacagatactcgactgcacagtctgttgccagacaactgggtggtcgagtatgaggtcgagtaacaagaaagaattgcagaaattaagcaacagatgacaagatgcagtaaacaacagtagagtaaacaaagaattcaattagataaagaattcccgaggatggggtaattgagtagtttcgtttcctcagtttacaagtgattgacatgctcaataaattatccctagacaacaagttcattaaccaaatctaagtgccaccgcaacaaagaccctcaagttaacctagtcccagactcaatcaccattgacgagagctaacctaacaggcattacgaatcaacaagttaaagccaaaacgctccctgcaaccaataccttggtacagggccaccaatctctggaattagtggttcagacatttcatcgaacaccttttgggcgcgaaaatgtctaggctcaaattccagttgattagaaagcaataggcattaagaacaactaatccagaagggatctatcaatcaatactcaaccacctagcatactgagaattctacaccactctaacccatcctcagaaacctattcactactcagacatcatagcagaaagcataaaacgttgaacaagttgaaaacatgataacaacagtgtaacagcaggatgataacagaatgaacaacagtaaaagaaatcaagaacaaaagctgaatactgaatagataaagagaaatccggattacaaaaagtctagaacacaaggtctgcggaaataaaactaggtaaaaacttcttgtctgcgaaaaatgagaagtacatgctacttatagccaaatatcccgaaaccctaatactcaaaacgacgaagtatttggacgggttaagaactgtactcgacccagggggttgagtgagaggtcgagtgaatagctggagtcttcttttcttccttgtgctcgagtgtctggttgtgtgcggaatgaaaaaggctctgaagctagtcatcgagtatgcagtcaagtgttgtgatggcgatactcgacctctaggttgagtgacgaggtcgagtagtggtctggcagtgaaggtgaaggcactcgacctgggggtcgagtgatgtgattgagtggtgtcagaagatactcgacttccaggttgagtgaagagatcgagtgatggtctggtgatggagatgagggcactcgacctcgtggtggagtggtgaagtgaagtggtgatgtcctctgctcgacctgggggtcgagtggtctcttgagatcctgaagctcctactcgacctcttggtcgagtggtttgtcgtgatcaggtccgcttcttccagatagctcgtcaacagctccaaatcacctgaaatcaacgcaaatatgcaacatgcatgcaaaactatccttaacatgcaaagtgatgacaaatgatgtgaaatggtataaaacagtgatgatatgatgctaaagtgatgacaaatggatgctcaaaacatgcaaaatacacacttatcagtcttgaaagctgtcctgtaagcccatagtgcgttatcaagctttgatgaccaatccttccttgtgatccccacagtcttctgtagaattgtttttatctctctgttggagatttccagcatgcccgcttgtttgtggatgataaggagtggctaccttgtgctttactccatgtttcttcaaaagattctcaaaaaccttgttgatgaaatgtttccctccgtcactgattacgactctcgagactccaaatctcgggaatataatggtcataaacagctttagtacaactctagcatcattggtgggactagccatcgcttccacccactttacacatagtcca

SEQ ID NO: 34535 - DNA, 532 bp, Arabidopsis thaliana landsberg
caggtcttgggagaagacgtccgggggaactgttgttcgccccgaggctattttagctagctcgtccgcagttaggactgggcgttcgggttactcgattagttcgggtcgggtagttcgggttttggtaaattcgggtaatagaaactgatacccgatcacagcttttaaaacccacgacccgtaattttgggtacccgcaatttcaggttcgggtttgggtatacccaatttacccgaaatatatagaagcacatgcgagggcgcgtctggccggtggcgcggcggcttgacagcgaggcatgcgtccgcgtgtggccgcctggccagtaggtagcgcacgaccatgccggcagagtgagggcgttgtccgctgtctgcgcttggccgcctggccggtgtcgcgacacttgccgttgaagcgcctgcccgctgtctgctcgtgtccgcctggccggtggcgctctgtcctctgtagactctacggctgtacgcgcttcggcgttggctgcctgggcctggtgtgtggttg

SEQ ID NO: 34536 - DNA, 1057 bp, Arabidopsis thaliana landsberg
aaggaagaagactgcgccgtgtatgaatgcagccaagaaaatcggggcggtgttgaatcgccgaaaagatgccctaccggctttcagacgcttgcggtgtctcaagcttgatcagttgaacgagtttcttttttctacgaagctcaatcccccgatcggtgaccaggtgaatctcttttagttttgaccggaattgacttaaaaagtccttaggttcttctagttgattctgctatatctcgagtcttggcttttcatttcaaccctatagcaaattcaattttggcttctctacgtgatgtggtttcctgcttgtaattgttagaaactgaagcctcttgttacaaagaacacaacaagcgtttcacttgttgttgtgtttaaacagaggaatttgattattagaatcagaatcgagaagaacaaagaagagtaacaggaaactgatttttattgaatggggaacttgttcattacatccggatacaaaaagtttaaatagagatcccagcgacagaacaagtgaagagtcgtgtctctttctctgtaagataagcgacacaagctttatttaaaagtcgctactctagcaaacaccttttaatgcaacataattataacatataggccaaactcaattataaactaacagtaataattataacagaagtcgtgtttctttaggttcatcatgacatgcatgctccgctgtcgcattacttcattcacaccagcctcaattcctacttcaccgggaatgtctttggaaaatacagcattttgcccatcattgaagcacttgaacagggtgtgagggtggttgaactagatctgtggccggatggtagaggcagcatctgcgttaggcctagctggtatgaagccctgtttgtgtccgattcttgttttgcttttcctctgaaaactattaattgtttcattatgaatttcataggaacttcgagaagcctctgaaattgcaagagtgtttggattctattaaagaacatgcctttaccaaatgtacatatcccttaataattacgtgcaaggtcgg

SEQ ID NO: 34537 - DNA, 406 bp, Arabidopsis thaliana landsberg
gaacctgtgacttgcttctgctacattagatttgatgctctgttgatttagttttgttttctctttcctctttctccactgtataaaatcctgctaaactagtttacttcagttgttccttgtcaaagtagcaaaaccaggttctgaaattggaaaactttttttgtcttgagggttcttggttgttgcatgaagcagaggaatgggcggtgagagtaatgaaggaggagagatgggttttaagcatggggatgatgagagtggtgggatctttagagttggaattacatcaatgcccttgtatgcaaaggcagatcctttcttctcttttccagattgggaaccagttaacaatgctgctgcttgtggcttctttagctttcattaccatccttccatggcgatg

SEQ ID NO: 34538 - DNA, 4704 bp, Arabidopsis thaliana landsberg
gtttccacaccggccacatgcacctatggccttccagcaagttccgctgtggctcttaccacaggtcacgcattccccggtcttagcatcggacgtggtgttatcaaccttgtcaaatttccttttcttatctgcgggtttggtggattgattgttccggatcggtactttctcccggttcaagtacctctcctcctcgatcccttcctcaatcattgttgccctttcaaccaattcggaaaccgagttgaatgtccggaccaaacaatggttgcaccgtgcagttcccttgaactaggtcgaggtacgcacattcaagcctatcccaagcctccggtggaaagtacttcttgttaaactcgtcttcaaaatccgcaaaggaccggacctcgtcccctctgcgtttctcgacggttaaccaccagttatgggcgtctccttcaaggaagtggaccgcaatgtccctttggtaatcctcagggcagcggatagacttgaagtcctcttgagtctactcctcactcatcggccacaatcgggtccgtactgcccatgaagtgtctcgtgcccagccttgagacatgttcgagaagactcagatagtctccccttttccgcccataattcggttgtggattcacttccacaacttccgagtcatcgtccttttggttatccccttttaggaccaccggatctgctacaacggccttggtcaatgtggctagttgcgccatcattcccttcatcaaatcccactgttcttgggccgttggagtattgttccggttatccatgttgtcccttgcaccactactctccggtgcttccccatttatggacttcttcccggcctcaggtccggccgagtctgtcccatcgaacatcgtcccgactctggttttctcgttgatcatcgtttcctcctcaaccaaagtctcctcgacaatgcccttgtccttcttactctttcccgttttgctgctcttacccatctgcgaaacctctaaagttaatccacataactcctagtaaaatcgcaaaagagtaaagaacaactaccgcgagattctcaagccgacgagtggtgataccccttaacccaacacctagtcctagaaccaagcatgctttgataccaacttgaaaggccccgatccggactgcctaaagtccgggcgagttctctcgacccaagccactaagtgactcggccctaaccgtttatgaggttctttcctagtctaatccgtttcatatgattccgagattcaatatatgagacgaatagagtaaacaaacaatcggatactttattaattaagcaaaggattcgatacaacctatgagtttgcatataagctattacaagtcatataatcgatccctaaactatccgaactatcaccacccatcatcccggccttgagtctctcgcgcctaagccaagtccttcccacgatcaccattcgttcctgaaagtcatagagccataagtaatcttatttacttaatcatatgcaagtccatgcaatgctctatatgccatacactactcggatccgtggagagaattcagagaggggaagatcgcgcatcagtccggccgattctcggtaggtcagttaagacccgccggtcctccgtcgagccgcgtccccgcctcagccgatccctacccggaccgagtcttgtgtaggatgcacatgacccggatactactcagccctcaagtcggtcctttcaaggatccgactactaactcacatcctagaacctttagactcaaagtctaggatcccttaccttccttctcgaggttaggtcgatccgaccctccttctttattgccagccacagcccggctaccgaatcgtaagacaatttattctcccaagagggagagagttttaatggtgagtttcttgtgttttcggtgtgttgtggtgagtgaaatggtcttgggcgcccttccttatatagggggcgaatggatgcttccggaatcaacacatccgttccttgcacctttctgaaaagttgcacatttcagaagagctgcgcccttccgaagagttgcacctttccgaagagttgtatctcttcgcccataactgcccaggtagtccgtcactcgtccaactacctcgagctcaaccgtcactcgtccagctacctcgagctcaaccgtcactcgtccagctggccgagctggactgtcactcgacctgagtaaccgtcactcctcccagctgagcttgagctttgggcgagctgacccagctgatttctttatgatcctagcttagccagcatgatttcccctttgtccgagcttatggccagctccttctcacttgtccgagactccaccttcttctctcggaccaagtcctagccaacgatcctattgaggatcgcgggcgttacaacttgtaacgcccgtgtcccgagttaggaagtaagcaagatcttacacacgcggaattcgaggacgaattcagtttaaggggggtagacttgtaacgaccgcgtcccgcgttcataaagaggctaggttgttttaggagaaaactagaccatggtcaagaaacggactaaaatacttagtcggataaacgagaaacttcaagctgaaccagctaggtgagctagacaagctaggatgaactagctagctaagctaggtgagctaaaccagctggaagactagctagctcagctagatgagctgaccgacagctcgactgaactcggtgagctgatcgtgtactgacccagctgggtggtccggtcagctgacactcgagccaaaaggtgtaaggtcgagcgggtaccaatgaacggttgcatcgcctattagatgcaaggaacggatgtgaccttttggaaggatgcaaggaacggatgtgatctttcggaagggtgcaaggaacggatgtgatgcttcgggaagcatccattcgccccctatataagggaggacgcccaaggcctttggaataatctcacatcatctcacaacatccaaaacaccataaaacattcttaaaggagtcccaacacatcctagagttgttggtcggaaagggggtgcggctcggcgagtataactcgaccgaactgatgcgcatgctacctcccggtccaacggttcgatggagtgtagaggatggagagggtagaccgttcgtcttagagacgaatcggatctggtagaccgatcgttggatcggatcggccagaccgatcgtcagacggatcggatcggccagacggatcggactgaccgatcgtcagacgggtaggatgggacagaccgatcgtctaacggaatgggtcggacagaccgatcgtcggatgggatggatcgagaaaagtgttcgaggaagcacaaggataagtgcatccggacacacccaagggtcgcccatggatgcaatcttaccggtaaagggagaaagcaccaagaatgggtaaggaacgtaattcaccatatgggatcaatatcgcggctgccttcatgtatctatctcctcagccatggtgaaaccgatcggagatcggtaagaccaaagggtgactcaacggataaccaacgggaaagtccacggtgggaaccgatggacaaaacggatgttggacccgtgagcaaacctaacgccgacggaggaaggatttcatgggctagcctacgatgatccggtggatgaatccacggacccttgggtgtgataaggatatcgttcggaccgcatggatggatcattaagccgaaagctttatcgaccaccatggaccggacgagtaaacggttagtaaaccgtgggcggtcgtagtgttaaacgaccggatcggaaacatggatagttcgataagccgagggctcaatcgtttaccatgtagccggagggacgtacgtctggagaacggatggaccaatgagccaatagcttaattcggccatcgtgaaactagggaatcgtacgatccccaatctctatcgttgtagttagaccagtggggttggttggttgtatggctaagtaacgatacaaattggtccatcaatacacgatcggatcagaatcgttgaacaaatggaataaggcgacaaatgggctaaggagtcaaatccgcatattggccaaggtatgtaacgatctaacttattagttaaggtagacgttagggaattgaccgtgaaaataggataaaggaatatgcgattgttagcgaacaatatgcatgtcttgaccgagtaaaggatcgatctaagtctgagggacaaagacgatgaaaccggtacaagagttggttagaattaaaccaaggttagaaagacttccgctgtgtaataagagagcgattatagaatttagcctcgtaaaggcaattctatgttgaatcgcgaaaaattaagaggttcggccgggaagagacgcaaacttgagtacaacgttgccggacgccgagacgtccgggaaggggtctcacagaagtcctgctcaaagcggtggcccttgcgatgccaatatattccatgaatgtgtacaagttgacgaaagagttttgcaaagaaataagtagtgtcttagcacagttctggtggagcagagggaacccggtgatcccgactgcattggttcgcttggaatcggcttgcactaccaaaacgtgaaggagggctgggcttcagagatt

SEQ ID NO: 34539 - DNA, 7388 bp, Arabidopsis thaliana landsberg
  unsure (1)..(7388): unsure at all n locations
gctaacgttatgaaagctgattctaaaggggattcgatgatagttgagttgctgcttaggattgtggataatgtcagagcttgtgagacattcccgtggggacgtttttcctatgagcagtgtatggaaggggtgcagagagtaatgaagaacatgaaaggtgtggtgaaacccaaggcacagactgctttttatggatttattactccacttgaggtaagtagtcgagtaaattatatgagtggctagattttgttattgtgaacttgcatttacttttatgtttttgtgtctagattctggcatttgagtgcattccgcagcttgggaagagatttagagaagttgtacctgcagacaaggaatgtccaagaatgtgcaagcacaagttcagtgaaagttgcatgaagagatttactttggaagaaataaatgaagcgcttggagatataacggttagctttgttctcttgaaatctatgtttataatctttgtggtgtttgaaatatatgtttacttgacaggatattttaagcatcgtggaacctgatatggatgagagaaaaatgttgtcacgcgttgtagagaagcatgttgatgatggtattggatatatcgatccaattgttgatagctggagagagaggcttatcgtagagaaaaagaagattttttggcgtagtctctaccaagcagacattgatggtagacgtattgaaactgttgatgatgttccagctgtacctgaaatccctgggacatctattctctcgttcaaggaagctatggagaaaggatttgacaagctcacggacaagcttgctgtgatggatagcgaaatcaagcagatttgtgtgagagtacaaggaatagaggaatatgtggcagatcagcttgagaaagaggcagaaaaagcccgttatgaagatatgcgtcctggttcagctgctgattttgtgccaccgtcttatcagccaagggatactcagagcaaggccttggttattcacagtggaagccgtgacccagtacctcnnnnnnnnnnnnnnnnnnnnnnnnnnntggtgaacttttgtgtagtgatgctttcacaatagttcttacatgtttggttacatatttttgtaggtgatgtcagcgatgagtccgatgaagaggataagaagaagaagaagaagaagaagaagcagatatcgaagaagaagagaaagcatgttggtcctactctggaatctgggaaaaaacgtggaaggaaaccttccaagtataagggggaagagtttacagctgaggggaagcaaacgaggaagagacagaagaattaggactttgacttttctttcttgcttatgtgtgtgtgtggactcgtaggtgtttggagaaataggactttgactttctttttgtgtatttgggaatgttatgcgtagtttatgtgtagaggacaaacttattttctgaaatggtttatgtgttttaggattttattaaaatcaaaacgtttggctaagttgtcccggttggccggtcaataatacaagagtggctaagttgtcccagttggccggtctatacacataacttaaaatacaagagtagctaagttgtcccagttggccggtcaatacacaacttaaaatacaagagtagctaagttgacccagttggccgggacacccagagacagagtagctcgtcagctcttcaagctccttagctcgtcctcaagctcctcagatcgtcctcaaagctcctcagctcgtcttcaagctcttcccatcacggcgaccatctcctcgcctagctgtcagctagtcagctcgtccgactcctcgtctagctatcagctcatccctcaactgcaaaactcatctacctcctcgcctagcggcagttcgtctattgactgcatagtccacctatctcgtcgcccagctcgtctataccttcagcagacaactcggtttgtccaattcgcctctctaccacggttcatccagctcgtcgcacatctgccggctcgttacctacctgccgacctacctccaatgacggcctagctcacttattctaatatgaactacgtgtggcttgatcccatttttcgtacttgtgtgattcgtgcatcaacattttcgtacacataacttaaaacacaagagtagctaagttgtcccagttggccggtcaatacacaacttaaaatacaagagtaacatatttcggttcaaatgccatacaccatcctcaataacataaatcacatcataatcaccatgtagaaagtaatgccctaagcctatcaatctcgacttctttggcgagtaacctttctttaagggtttcaatttcgccttgcatgagatgaatagtttcccggatggactccaaagcatgattgcatgctagttgtccatgtcttagtgcggaatcaagtttgtgatttaccttctcaagctcctcagttaccgcctgatcccaccactgaataaggtggtttcgggactcgtactcttcagcctgcgaaagagagaagacttcataaatataattcacttgtactttgttgttccaatgaaatgaaaacacaataacttactttaagcattgggcatttgtagactctgtcgccttgcctgtaaccagttttgcacacttcaagttttacaggcttaccacaaaaacatttttctggaaccccccaatttgcatcggcattcgcctctccattattccaactagcttcggacgtggatggttgagagtaactatagggcatctacagaacagagaaagaaagagatatgaatcatgaacgctataaaccctagatctactaattacggcggctagaaacccgtaagaaaccctagatctactaattacggcggctaaaaacccgtaagaaaccctagatctactaattacggcggctagaaaccctttagaaaccctatgtcataccttggttgttgttgttgtagtcggcggcggcggataatgggaacactaatttcagttgtcgtcggcgatgttgggaaaggaagaagagagaagaacgagagagagaaagaacgagagagagaaagaggagagtgaaatagaagagagagagagagaaagagagatgaacgagaataataggtagaaactttgtagtgtgaacgcaataatcgtagtgtgaacgcaagtcgtggggtctatttttttaaaaaaatatttattagaatattcagaatacacatagttgtatgtatatgtacagttggccggaatcataaacagttgaactattctaaattttgtgcttttgaagttgaatctgaaaaaccaactcatttttttagttggtcccataagttttaacatattaatggattttaataagttttgatagaatcatatttagtaaatatctgtttttatacataacgtatgtacattggacaatcatgaactatatgttccttgttatacataggtgatttattaggaaaccagtttatgatcaagtttagtaataacaatgttgtaatatcatattttggatttattcaatgtttagatattgataatagctgaaaatattgagaattattttatcattttgttaaccctaaaatacagatacatatatcagttgtctcagttgaacttaaaaaaatacattaaacttgcaaataattcaataaacttgcaaagaattcaatacaaatacgaaaacataaaacatagtacatcacacttacaaataatataatacaaatacaaatgaacttaattgtattggttgaaccctttctgcagttggccaggttgttccggttgaaccctttatgcatcagacttaatcttcctcaggctgcagccaagcccccaagtttattccaggttgtgattttctcctctttcgcgcttcaccagctgatggaaaccgcttctcttgatttcatcctggttcttttggtgtgtattccggcggaaaggcaactaactctttaatatgggcaggaagaacccaaaccgactcatgtgggactacatacaacgtccggtaataggccaatgcccaactctctatcaagtaatacacagagcagagtccgtagatggttgtattcgcatttctcccttccttgcgggcgaggtgcctggctgcggccatagcatggacacacgggatcttgtctatatcaaaacatttgcatgaacaacttttcattttcaaatccaccagaaaacttaccgagttgagatcaatcacgttgtattcttggttgtaactgttaagctcaaacacagttaatttggctgcaactggacatgtaatgtgcaatatgttctccacagtaggcacaacttgtgctgtgattggacaagaacctgaatcttgcctatgctcgttgaaccattcagaaaacttagaaatcatcacatcaatcattggtaacaagtggtattttctcgcttttttaaacacaccattaatggactccgcagaattactagtgtcaatgttatacttgtctcctttaaaatggcacctcgaccatttctcaaaccctactttcacaagaaagtcagcagctttaggccataaacttgtaaaatgaccaaactctttctcgaactcactctcagtatatgcatgagcacaatccctgaacttgacagcagctccatccttgtcaattttcacacgatctctcatgttttgacacaaatgccatatacaagctgcatgaagcgcattcgggtacaccgtcttgacagccttctttatgctttgatgcctatcactaataaagaccaatccgggaacatccgaatatacagttttcagcttttctaagaaccaaatccaacttacatccttctcgctatcaatgattccaaacgcaagtggataatgatgatgattaggatcttgtgctgttgcaataaccaacatcccaccatacacagttttaagatgagttgcatccacaactatcactttccgcattgccctaaaaccttcaatgcaagcgcctaatgcaatgaagaggtacttgaactttttctctccttccaactccacataagttactgtccctggatttaccttctctaacatgtaaagataagaaaataacatcgtgtagcttctttccggagtccctcgcacatcactaacatgtagcattttgcctcttaaggcagtggagtatgaacaatgcaccccaagtcttcctcttacaatcgacataatgttttttggagttggggtctctaaatttccgggatagtcacaatgcaaaaccgatgctattaatcttggtgtgcctcgctgtatactgttgcttgtagtctcaacactccgagagcatgtatgcatctttctatgcactctaacactccaaaaatgagatttcttagttctcgcaactcttagataccaagtacaccctttagaagcttggcggcatcgtagcataagtctcaacgggtctgacttaatagtatagactccaaaaacttcttgctttgcagctctgttaaccaattcccacacagcctcccttgaacaaaattcttgaccaatttcaatacccttaccatcatctcattctataacctgcggagtaacttctacacttcgtggaatatcgtgaatatcatcataatcaatcctaacatcctcatcttcttcctcaacagaattcaccggcctttctatcggcctttcgacagccacgatctccgtacctactacattctcacaatcattcacatcattatcatatccatcatgcaccatctcacatacttcatttaaaacatcatcctctcttacatttacaccaactgaacttcgacgctccggtacagaaatttccactctcctctcaactcctataccatttaattcctccacatgcaaaacaggaatccgactctcttcaccagattctgttaaaaatatgaagacatcctcatcatctacaatatatgtctctctcctaactttagacagattgtaactcagtttcaacttgacagaagcttcatcaatcgcaaccttcttcatgatcttgtcaactaacatcgaatagctaatcttctccaaactactcgtcttaaacgatatagcatatagtgaatttttaccaatccactcattcacttcagaatagtatcctccaaagtcaaaatgtaccttagtgtggatcttcttcttcatcgctcctgaaaatacaaccagttcaactccaatcaaacattttaatagttataccacatggactcttatcatacgttgaaatcaatctctcgtcgcactcgattatactgaacctaattcgttacctttcaattgatttccaatgttaatacatacctattcgttaaactaattggttaatctaaactttgcaaacacaaaccccccaaatctttaatatgaaatctcggaattcaaattcaactcacattcaacctacattcctttgctcatcacctcaaataacgtttcggcaacctctaatcgattactctttactttgcaaaccaatcatcaaactatcaaattgaatctgggaattatatataattcaaaatcccaatctaaaatcacaatgcaccaatgtcaaaggaaatatgagaagaaactgacctaattcgttgcctttaacgacagatttcaagtcggcggcggccggaatcgatggtggccgacgaaaaagatgaacggcgacgaaagaagaagaacacgacgacgaaggagagagaacggagaggatctcgattttctttatttagcttttgaatttctttttcattttttaatcaactcattaagggtacaactggtatatcacattttcggtggcattcagattaactgatggcagtccagatcagttttttcaaaaaagtggcataagtgataaaagttcaagggagcttcatccaaagtttatttacggtcccataatgggtaatgaaggatttatgctttcatgtaaggaattgaccagttgatgatctcatgaacctttgattcaatcattaggcgtttcattcttcttgtttggaagaaatttaacatcactccaaaaggagaagaaaaaacaaaacaaaagaaataaccaaaaacactaaaagaaaactctcactaaggcatgaagaaactaaccggacttagccagaaacattcgtgttcttctttctcttgtagtcttggagtatattttacaaatgtgatcttctaaggctatgaatgattgtgtagtatgccctagaccggactaaagttggatcaatccatccaactccaaaaaagaatcatttgcatcacataattattgtcaataattaaatgatattaatttgaatcacttagtta

SEQ ID NO: 34540 - DNA, 3477 bp, Arabidopsis thaliana landsberg
cctcacacgatagttctgacaaattcatcttagcgatgtctctcgtctcgttttatatcgatttgtttgacttgtaatggaatagggttttaaaaatctttttggtggtctttcttaacaatcggtgaattttatcataacctatagtttagagaagtcatttgggtatttgatatgacaatagacaaatcttttcgaggaattgatctccatgataacttcctcttcctaaagacatggtctgatgatggtgatgttatcgatgccccttgattggattatccatcttccatagaaaaagaaagcatagttacaaattggtaatgattgatagggtattataaaagacatgttccaaaaccattttaaataaactatttgtatgtttgtataataagagtgttgcaaaactcctttgagaatttcatctataaaatgttagccaagtatataaaaaaaagacttaacagatttcatatgttgtctctaaaacttccatttaggaagaagtgttactaccttttttttttatcgaaattatggtcttttattttggtaataattatatttaaatggtttatgtatcatgtaacacatttctgatataatataattgaaattgaacacaaaataaaatagaataaaagttcaaattttgatgcataaaagtttttctttaatattaaaaaaattgaagggcttcgcttgtgattgcctgcctgattgggaagtctttttaactaatgggctcgctttgttagcccataatctgctttcatctgaacaggcaaaaagtatatacgtaagacggtaagagtcacagagagatcaaaatggaggtgcggggaatcgaaccccgtgcctctcgcatgcgaagcgagcgctctaccatatgagctacacccccaattggtaacaatactaattttatttattatatcgaaatacttaaaacagaaatttatattatctgaaaattatctgactaagcaaaacatgatccagtttttgatcatgtttactctatattaattactttacaaatttttgatccagttttctcaattttttctagactcgtatcgatatggcgaatcatgaaacgatatttgatcagctaaagaagcagattccagtagatgaggaagaacctctgattttgaatcgagactcaagcgttggtctcgtcatcgttgacgttgttaatggcttctgcacaattggctccggcaatatggtttggttcaatttctcgaaaaaaacaattgtgactttgcttgtttttgtttcttaatgccttccaagtatttgtgatattgcttaagtcaaacgtttttgtaaacgaagtgaaaagaattgtgactttgtttgtttgtttttttgtttcttaatgtcttccaagtgtttgtgatattgcctaagtgaagctgtttgacttggcaggctccaacaaagcataatgaacagatatcgaagatggtggaggaaagtgcaaagcttgctagagagttctgtgatcggaaatggccggttttggcgtttattgactctcatcatccagatattccggagagaccttatcctcctcattgtattataggaactgaagaatcagaacttgttcctggtattggtgtagctctcttagtgtctttgtttgattctattactagagacagtgtcttgatttcttcttcttcttttgataataatgaatcagctctgaaatggcttgaaagtgaggattgtgccactcttagacgaaaggattgtattaatgggtttgtgggttcgatggagagtgatggttctaatgtttttgtggattgggttaaggaaaaacagatcaaagttgtaagtttttcttttgataaaatgctcagttttgatgttgaacaagtttactgcttttaaacaaatcttgaacatccctatgttttgggaatcttaagattgtcgttgtaggtatctgtacagacatatgtgtgtttgattttgtggctactgcactttctgcccgaaaccacggtgttctttctcctgtagaagatgtggtagtgtactcccgtggctgtgctacttttgaccttcctcttcatgttgcgaaagacatcaaaggcgctcaggctcatcctcaggtgaaaagtttgatgcttctgaaattagcatgtttagtttttgtcggtgtggtcaattaacacttgaaatcggttcatcttcttattcttctgttgtgtttctttgtatcaggagttgatgcaccatgtaggtctatatatggctaaaggaagaggagctcaggtagtctctaaaatttcttttgagacttgaaagactatatctcgtttataaacataacactcttgatatcaaatatttcagtaaattgttgagtttgcctctcttttctttcgtgtaaattgttcatgaagcttgttctctgaatttcaactcttgtgtaactgtttcagaatgacaaataatatgatgggtttctcatctgtctaaatgaaattttcaatctgattttacacagtttttaagaaataatggctcttagatccatagcatagttttataggattgttgcagaactagtgtgtctattttcatgaaagcttgttcactgataatcaagcataactgttgcagaatgacataatttatttctcatctgataatggctcttagtacagtcctgtagtatatatagtctcataaggttagtggagaattattgcttatttttgtaccattatgaaaatacaataaatcacaaactctatttcttgtaatggttctgaacatacaattttgatgaagaaaaagaaaatgtaaaaagcctgaagacattcctcttgtttcaccagttacaaactgtgaacaatctacaaaactcataaagcatataaccaacacacaaaaactattgtttcaatctcgcaaaccgaaagaaaagagaggttaacctcccagggaaaatacaggtaaaagaaagacacgaatgaatcaaatcctccatgaatctgataaattacagtatatgaaccaattaactctctggatagtatgtagtatataatatgcaaatgttacctatgtagaagtcttcatctttctatatagtgagggatgcatgcaggagaatatggatggctttgctctcttttgtttggagccaaagatgaatgaccttaagggcactcttgagcggctatcggaatgctggagatcaagatcagatttgttctttgaacccgaaagagcaaactcgtcgatcagctttcctagagtcttatcaacctcgagttgaagcgtggtaatgtgatctaacccggcctgtaactcgtctgccactttgttgttctcctgcttcatgttcaacacctcaccttggaatttagcagcttgatagctcgtgaatctgaaatcatagtcttcagcacttgacttgagggcttttgttatctcatcctg

SEQ ID NO: 34541 - DNA, 833 bp, Arabidopsis thaliana landsberg
  unsure (1)..(833): unsure at all n locations
tacaaaccaacttcaaactcatttttaacattttttaaaccaaaacaaaaacaaacagggcaatatggaatcaatattaaaacaagcttatgctaaaactcatggctccaagccatcattattaaatactatggtctatggctaatatatagctagctacaaaagctacaaacatatattaatttaggtatactaaagttcgtattctgtgacatatatgtacatcactatatatagcctctctccggattctagggtttcggaaaactctttctaccgactcggtcgttttaacttgatcaattgccggttcgaatcctaagttcgttttatataaatcctaatttggtaatgctagcgcttattcaaaatgttcgttttttttcctaattgcttgagtacttattttaaactcatgagctgtttatttacattattgggctacactcgctagaccttgtaatctagttccacatatcatatcatgcttccaatagaaaataattatataataaaatacatatatacatgtacatatttgtataggtgtgcatatatataattatatatacataaaagtaatgcttaattgtatatacatttagtgtaagaaatattatttacttacttgtgcatttcaacatgtattccagtgtatgtttatacatcatgatgcatgcaacgtacagaaatgttgtcatttaaatacattcacagttgggacacactctaattattatagctaattaataacaaaaaagctacatttgaaagatatattattctctcttaatcatatccaattntgagtacaaaattagtttagaaatata

SEQ ID NO: 34542 - DNA, 774 bp, Arabidopsis thaliana landsberg
ggctacatattctttctttgttttggcgtgttccatctctctgtctttaatgccgttctcgactctcgaaccgatcaagcgttgcactaacatgtgccttcgctgaccgatagagctacaagagttaggcaccacaatctcatcttttaacactaaactaacaatacaagataaagtaacatatatctgaataaagacaatttatatgtataataaactagtgtactggaaagaaacgtttaacataagtacataacatatgattatatttaatgatgctgagaacaaaagatacttaggaataaatctaatgttcatcgttataagttataacacaaagcattaaaaaaaaacgttatacttaagtcccaaattttggatctaaccattaaggttgctcttagaacacataatattctctgttgttaccttgttctctatctgctttgatcaagcttcgtcatcacgttgcgcactaatgtgcaatcgtagaccaacgggctacaaaagccaggtgcctcaattgctaaattagatgaatctgaacatttttgtcaaggaatttaggaaaagtgacaagaaaagcaatattaaatcctatccatatccattgaattgaatgcatttaaaaatttagaagttttaagatttcaattctccaatgacgaatctataaactatctcctttctttatatgtaatgtttataaactatcttctttattttattactttgtttttgttaaagatatattaccacattttagttattatt

SEQ ID NO: 34543 - DNA, 749 bp, Arabidopsis thaliana landsberg
cccttataaagagtatataagtctatggttaatcatgaatggcaatatataagagtagatgagatttatgtttatatttaaacaagggaaagatatgtgtaattgaaacaatggcaaaatatatagtcaaatcaaactggattctgataatatatgtgttgaatcaatgtatatcttggtattcaaaaccaaaacaactacaaccaatttctttaaaaaaccagttgatctaataactacattttaatactagtagctattagctgtatttcataatcaatttcttgcattaaaatttaaagtgggttttgcatttaaacttactcggtttgtattaatagactttcaaagattaaaagaaaactactgcattcagagaataaagctatcttactaaacactacttttaaagtttcttttttcacttattaatcttcttatacaaatggatctgtctctctgcatggcaaaatatcttacactaattttattttctttgtttgataacaaatttatcggctaagcatcacttaaatttaatacacgttatgaagacttaaaccacgtcacactataagaaccttacaggctgtcaaacacccttccctacccactcacatctctccacgtggcaatctttgatattgacaccttaaccactacagctgtcacactcctctttcggtttaaaacacatctctggtataaaaacctctgtataactttataaacccccaataaaacctctc

SEQ ID NO: 34544 - DNA, 5364 bp, Arabidopsis thaliana landsberg
agtctttatttaccatcattcttaaacagtattaactcctctttaacactctcttccacgcctgaatgaataagccatatgtatatattattattagatattttattaggtatgattctgtatatgctgcgatgtatattttgcaaaacctctctaaacatatgtttataaaattaaagatatggaaataaacgtgtggatgcaattgcaaaatttatatcttcatgcaccacttcggttgcaaccaatggtggattttggagaaactactgtaattgctcttgagttttaatataatatggtatgtttagagaaaatatttatttgtctcctcagataacatatacatttgagaataattaagatctctacataggtacatatgggtgtgttccctggttaataaagttgttgtcaatgtttgtacgtgacacattttgagtggtcgtattagcactatcacatttaatatgggatgccttacgtgttaaagcttaataaattaagaggagtactcagtcttattgtattaaacactttatcacccttttctctcccgtgaattattcaaattgttaccttttaaaaccttataaaacgttttttgggatgctattacctacgtaattttctcttctctttttttgttctttataatttaacgtgtctccgagaggtaaatgaacgtggtagttacaaaagtaaagctatttatttgtttttgtctgaaaattctgaggttaaagcgatgaactgattttccggtccgttcgacccgtaattaattggcgggagttgagaacacatgcttaggctttgccacgtatcattgtattactctgagtggcacctgacctaccaccccattaggagagttttaccaaaactaggagaaaaatggtaatctaacaaagaaattgactttgttttgtaaatatggtgattgataatttgatatgatgcagtttcaattgaaaagatatactgaaatgacaaatgtaataatcagttaaaacttgttgaaagatgcttctacaagaaaacatatgattatggtctctactcattacgatttaatctaccatatttttttaattaattttatgctttgcatcaaaagcgttccgttggatttgtatttatgtttttttccttaatgtgtaaacgtcgatgggaaagtaacagactcgtttgaaaatgatgtgtggactactctagttgatttgcaactgacaaaacgagccgtgttttcggttaattacgacctttgttctaattcaaaaccgtcattaattaatgatcccaaatgacgatgtgccatgcatgtgcgtttaacgtggggtttcatttgaattgtgctatttaaaaaaattggatattaatttatcaaagatggttagattaattaaccatatatactatatttggataagatacttccaattgtcgacactcgacactaattatatataatgtgaagttttttgtagagttagcactaggtatcctgatcctgatcaacgagtgttggcataatcccggaggacttctacatagctgaacaatagcaaaccaggtaaataacccaaacggaaacctggtcaagtcctgaagaaaccctgccctaactctccatccaagcgctattttgtaaggcgagaatggaaaaaccagacgtcctaagttatgtgcgagtttacatcatagcctaggactgaccctttaccacgcttgtgcacaatgagacatttactttatgtctttatcacatcctttttcagactacattgtctattttgaacttgaagcaaattttcttcccgtttttgtggcccaaaaaccggttaaaaccaacattacaatggcataacgtataaactaaaaggctcttcgtcttaatattttagttgataactcgaatagattatacagattgtattgggtgggctgggttccattttggtggcccgtatgagcaataattatattacaatgtattttttcttttatacttgtctgttgttatcaactaaaatactttgcatttgatccatcgtgttactttcaaatatgggtccatatcaaaagctggttctccatgacacagtgcagtgaacaatcttgtacactcttattctacaaccaaactcatgaatttttttttctatttttcagggtaaggtcctcgatttttaaagaatggccacggaattgatcctattacgatcatctttgattataatctgattgtcaccaagaatccgatcgtcaccactatagttgtgcatacgatattaacacttgatgaaagtgaatttctcattaattataaaagaaacatacaagatgtatttatagttacatgagagtagtgaataacataagctaaaagagacttatatcaattctacatctctatatattaatatacgagacgagtgttgcgcaagaaaggtctcctcataagttgcgtgttctactgcttgcatacacatctgaatcttgctagagatttatctggatattaggggttttagagaaattttatacaaatcaaatgtccattgggcctaagatcccggcccattttaaactctggatctaactctaacatttttttttttttttttttggtcaactaactctaacattattatcacattattttcttatctgaatacaaattgccacatgtctcatcgaattatttcagataaatgattatgaacaatgaactaattctaaaccgagaattaagaataaggatcacagttttcgaaccagagggagttacagaaatactatcgtagtagacagaattcatgacaaatacaaaaagatactaaaatttttgatccccacagtcacgtgcattgtagggctcgaaggcttaatgggtcccatagctccggtccggctcgaggtttctgtgtcgcacgtgtgtggcacacacaccagggcacacaaatctctggtacgtaacatatacatgattcccatgttgacctgactggagcagaaggtgctgtgtagtgtggaccattgaatctgagccgttcaaacttttaacctcatcgtcacattttatgaaccacaattaccagagaaacccaaatggcatctttttttttttaaccaatcattcatcaaccattttcttcttcgacttgttttgtccgttggattaaaccacacagattgtgatcttacggcgaagaaaccaaactcaaagacattattatcccttttccaccgaacattgtcagatgaacaaagtagttttttttttttttaataataaaacttcccaacttcaaaatcagtacgtgaggtcatagattctcacctccttttcaccttttgttttccttattatgccaaattagttacaaacatacaatcacatcaaaatttattttgactaatatggttagtccataatatacgtaacaaatcatataaatacgaaactttctctattaaaattatttaacttttgcctctcttttctcctcgtgaaggaaaattctttagtcattttttctctcctcgagaattacgcaaacacaacaaaaacccagacattgaaaagtaaaaaacaaaaacagagaaagtgggagatagaagatgacggcatcaggaggaggatcaacggcggcgacggggaggatgccgacgtggaaggaaagagagaacaacaagaagagagaaagaagaagaagagcaatagcagctaaaatcttcaccggacttagatctcaaggcaattataaacttcctaaacactgtgacaacaatgaagtcctcaaagctctttgtcttgaagctggttggatcgttcatgaagatggcaccacttatcgaaaggtttcaactttaacttcagattcatccaaattttgattctttttaaacaattttcagacatttaattgacttttttttccgtcagggttctcgaccaacagaaacaacagtgccgtgttcgtcaatccaacttagtccacaatcatcggcctttcaaagcccaattccttcgtatcaagctagcccttcatcgtcatcttacccaagtccgacccggtttgacccgaatcaatcctcgacttatctcattccctatctccaaaacctagcttcgtctggaaacctcgctcctctacgaatttccaatagtgcccctgttacaccgccgatttcttcacctagaagatcaaatccgagacttccgagatggcaaagcagtaatttcccagtctcagctccgtcaagcccaacacggcgtctccatcactacacatcgattccagaatgcgatgaatcggatgtttcgacggttgattcttgtcgatggggaaatttccaatcggttaacgtttctcagacatgtcctccgtcgccgacatttaacctggtcggaaaaagcgttagctccgtcggagtagatgtgtcggtgaagccgtgggaaggtgagaagattcacgatgttggtatcgatgacttggagctgacgctaggtcacaacaccaaaggacgcggctaggttaatatcgtggtttaactatttagtcgggtccggtacgagattggttccggttaaatcgtagctaatagattggtatttgtcttcatgactattttgtacagtcattatcatttatcaatgcttcatttcacaaaatctagtatttttttttatatgtaatggtggataatgaaaaatgcaagtgtgtgaaagtgagagtaaccactccccatgtgatgatggggtcatgtgaatgtgatctctaaccacgcatgatttttcaatgtgcctatctatataaacacaccatttttagtggacctgtaattttgatattatcttttgagaaattgaatgagaaacacacaaaaaaactatatgaatctatcgttgcgtgacttgatcttattgttggacaattctgttttgctataaacatgacaagttggttggttcatgtggtttgagacttctgtccttatacacgtttaaaaggaaatttataaaagtttgaatgagactgatatatttgtaaaaggcagtatcattaacctttttgttttttcgtagattgtttgtgtatgatgcatcgtcctttttagttgttgattcgggcttaaatctaattttcacattttatttatttttcagtcataaatactgattttattttagctttttcataggtttacgaagatttaatttttagttttggtttgttacgttttggttgactggttttagttcacttggtttatatatatttgtcaacaattgtgttttatatttgtacgaattctcaataatcgtgacatcttcattaaacgtaatgtgacaca

SEQ ID NO: 34545 - DNA, 5125 bp, Arabidopsis thaliana landsberg
gcatgcaccatatgaggattaggtctcggcaacagcaaccataataaattatcccacaagccaaatcttctgtttttcacaagtaaaatcagggaacaggtaattcttctgtttcaacaaattacatagtgcattatgttcttgatgatattaatgtgatgcctttggtaagtgtagtgtgaaaaattcaaggaaacagattatctttggtggaaaggtcttgcccgtatcatggaagccgaaggatacatcaaagagatggataacaaggtacactagtatccaaaaaaccaacctttcttatgatccatttatcggtaaaggcgtaaagctacgatcacatattcggttaaaaccatgttactgatctgtgttgcaggatcgtcgagttgagattaaattcatacaaccaacagaaaaagggaagaaacaactagatttccaagatgacaaaccactctatgtttatccagaagccgacatgctactttcgttgaaacaagatagaacatacagtggattctctgaatgaagaaaaggatgggcagatccagagatccggcgccagcggttagagagaagagaaagaaagcctcgaagagaaaggaaaccccgaaaaaaacgaacacgaggacgttcttcgaagaagttacatccatggagaagcaaagaataagaatctcaaccctctttaagtaatgaatccactttatattcttttaccaaacccattattccattcatggatctttatggaagcataatacttctttctacaattgctatatcaggctccttctttgctctgagtcccatcttgaggcatagataccgcgccatcgagaagctgaggcttgtaaacgaggctttggtaacggcggaagagaacgtaacaaggcttcaagaacgtcatgatgtgattctcaaagagatatgttcttattatctcgttaacaccgagctccatgaagctttggtttcatctcgtgcagccattaatgatgcttcttcatttgtcatggagcttagaagattacagttgaatatcttaaactctctttcttaatcacattttttgtacttattacactaattaaaaccagagtttgggtaataatttttgtttccttaattttccgaattatccgctaattttctactctaattctctggatattttaaataatagtaataatctgctgtcaaaataagataagaaaaagacataaagctgattatcttgtagaacgtgtggggaatgaatctaacggctgatatcactcaagtgttcttttccaccttccttttacaacacccacgtgtaatgtcatacaaagaagtcattacaaccgttagatcaaagccaacaagatccaatcttaacggctaagataaattactacacggatcgccaacgtggcaatacgtggtatatacatacacgtcgttccttcctcattttacgcaaatcgtaaaccgccacaaaaccgaaaaaaacactaattgtgctttccctttagattcatttgtatttacttttggagcttttgaacaatggagtcatcacaagcaacgacgaagccaacgagaggagcaggaggaaggaaaggtggagataggaagaagagtgttagtaaatctgttaaagctggtcttcaatttcccgttggtcgtatcgctcgttacttgaagaaaggtcgttacgctctccgatacggttccggtgctccggtttacctcgccgccgttctcgaatacctagccgccgaggtaaattcaacttcagatctcgttgcattttgaatcggtttagtgttttgtgtaaatccaatctattagatctgtttaattttggagatctaacgaattgaaccgggttggtttaggtacttgagctagctgggaacgcagcgagagataataagaagaacaggataaaccctaggcatctatgtttagcgataaggaacgatgaagaattggggagattgcttcatggagttactattgcaagtggtggtgttcttcctaacattaatccagttcttcttcctaagaaatcaacagcttcttcttctcaagctgagaaagcttctgctaccaaatctcctaagaaggcttgataaagaatagtatcgatgttgctttttggttatattcggatcttagatgaagaagaagaagaagaagaagaagaaacaacttttttttttttttttttttagtttttagaggatttgtgtaggtatctgaaatcttcttctctttgttttggtttgtcttatgtaaaaaccatgggaagatgattatgtttcttacgcaatttgtaatggaaaataagtaatttctgggattagtaacatcatcatctgtctaattaatttctgggtttcactccgtacttgttagtcacttgatttaaacaatttaggtggcttaagtgatattaattgaaatggttttggtatacatagaaagagtcagcaccattaattaaagtagataataatcacgaagaaacatgacattaattaagaaaatgattgttgggcttagatgataggcccattaaaatttatgtgcttggttcatctacgagattctggaaaaggggttttggttttccggtggggctaagaattcaaacaagacgcgatttcgaatttcgttcttgtagaatcaaattgtttggtttcaatcttggatttgcgatgatgaattttctggttcgattcttctctgcgattgttcaatttcttgtttaatttggttaaaatttcactgactcatttgtttttttctgggtttagagaagagctgtatcatcttctaaaagaagcgagcttattcgcatcatttctgttgctactgctacttctggaattttatatgctagtactaatccagatgcaagtaagttactattaccaagaaccatcttcttcattatgcgttgtatttgtctctcttggtgttgtggtttaatgtgatatgtattctaggaactcgagtatcgcttgctatacctgaatctgttcgagaatctttgtcggtactgccttggcagatttcaccgggtttgattcatcgtcctgagcaaagcttattcggttcgtagcaaaattttctgatatctgaatgtgattactgctatttttactcttagagtttcaactttgaaatgtctgtttctgtgtatatgatataggaaatttcgtgttttcttcgagagttagtccgaaatcagaagcacctataaatgatgagaagggagtttctgttgaagcttcggatagtagttcgaaaccaagtaacggctacttagggagagatactatagccaatgcggctgctagaattggaccagcggttgtcaatctttcggttcctcagggttagcttctttcttgtttttatctttcttttgatttcactttagaattcacagtggtggtttggtgatcttgtgaatgttgtaggtttccatgggatatctatggggaaaagtatcggttctggaacgatcattgatgctgatggcacgatactgacttgcgctcatgttgtagtcgattttcagaacattcgtcattcttctaaagggagggtatgactaaaacatcaaatatgtttactcatacaatcttgcaaaggatcttggaataacttttgtctttggaatacatatggttaattataagattggtttcttctacggatttatctttgatggaatctgtttagaacatatctgaagtttagagttgttgaattataggtagatgtgacgttgcaagatggtaggacgtttgagggtgtggtggtgaacgctgatttacaatccgacattgcattagtgaagataaagtcaaagacgccattgccaactgctaaacttggtttttcgagtaagcttcgtcctggagactgggtaatagcggtaggttgtcctctgtctctccagaacacagtaactgctggtattgtcaggtaaaataaacacatgtacttgcaaaagatttattctatatatttgataagttcttatagtcagaattgttgatttttttctttccggttttgctttttcttggtgctagttgtgttgatcgcaaaagcagtgatttgggtttaggaggcaaacatagagagtatctccaaacagactgctcgatcaatgcggtaacttacatctttctgtctctatgaatgggaaagtcattacatattgacttgcagattttgtgtgttttgagatccttgtgctatatgtgtgtcagggaaactctggtgggcctcttgtaaatttggatggggaagtgattggtgttaatatcatgaaagttttagctgcagatggtcttggattttccgtgccaattgactcggtatctaaaatcatcgagcatttcaagaagagtgggtatgctagtaatctcagtatagttgatcatgtatcacatcttaaaggttgggaggagttaaacaaaaggttattgttgcagtagagttattcggccatggattgggctcaaaatggtcgaactcaataacttgatcgttgctcagctaaaagaacgagacccaatgtttcctgatgtcgaaagaggcgttcttgttcctacggtgagtacccatcgatcaagaagatccaaagaaaaaatgtataatccaagttttgtcaaacttttgcatattcacttatatagttgcatgatcattgtttggcaggtgattccgggatcaccggctgatcgagctggcttcaaaccaggagatgttgttgtgagatttgatgggaagccggtcgagaccatcaaagaggcatgtgtcgtctctctccctctctctttttctcacactctctttttctcacactctctttgtcttcttagtgttcgtgtgtgaatgaattttaattgcaggtgatagagataatggacgacagagttgggaagaggatgcaagtagttgtggaaagatcaaataaagaaagggtcacactagaagtcattcctgaggaggctaatccagacatgtgagacgagacgacgactgagacagttttgtaatggaaacttcacgatattcaaccaaatgtgttgaaataggattttagctccat

SEQ ID NO: 34546 - DNA, 833 bp, Arabidopsis thaliana landsberg
tgttgatgtttgaaaattataacattaaaacgccaaaaatcatcgccccgtcaattttggcaaaatattccattgaattccatggtctataatagtactcttaagtctataaactcaatacctacaccaatcaaagccattgtatctcttgtcccatgcaattgtatagtagtcacactcagacaataaacaaacgtaattaagaaactctaatggtgcaaaacaaaattgaataaactcaaggaataaagatacaaaagttgaccagatcatagtcgtttcacatctctaaggcttaatggcttactatataaagccgcaaagacattttagtgagaacacaaattcaattccaattctcaaagtgctctctttttaaaccaatctgctctcttccacttactctctctatctctctcccatctcgtttcttttttggtcattaaaagagaaacctttgctctgaatcttgaaaatggattctttgatcaaactcttcttctgcctctttatcttcttatgtacttcgctcttatttggtaattaattttacatttatcttatagctttcatcataacaatttctttgaacacaattttttaaccatttttttttaattatgtaggagaaatcaatggagtggagggttcaaatcaaaatcatcacttgtatccatttaggccaacgaagctctttgtgttcggagattcttatgccgataccggaaacattaaaaaggctttctctagctcttggaaattcccttacggtatcacttccccggaaaaccgctggccgttttccgatggccgtgtggaacagatttctaggt

SEQ ID NO: 34547 - DNA, 7729 bp, Arabidopsis thaliana landsberg
tttgacaaagtataagtaattgtgcaatttatctattttacaaattagccttgaaaataattatataatataaacaagaaattttattaaaatgaaatgtaaaaatgaccaatttaatctacaaagaagctaaacgttcacgtatatttagtcacaaactatttacatattttgttatataatatcaaacctttagcttctgaaactgattcaaactaatttttataaagattctaagtattgaaacgaagaagagtggtgggtgaattcgtggttattcaaggttctcttgatattttgcaaaagatcatacttatttgtacaagcttcattggtggcattggcatatctcagatcagtgatatagtgttgatgcgttctgaagaaggtatgtgaggttgggaagaagatatatgggattcttattctagaacacaaagttgtacttcaaagtaattatccgaacagcgaatatgcaacaaacttgattgtaaacttaaatctccatggtgatgaaagaaaaaaaaaaaaaaaacttaaatctccatggttagaccatttcggtttctttgatatagctgctgcactcgtcttcctagatgaaaccttaaatggaacagtgaatatgcaacaaacatggccctaacacatgaaagtctattcaaattatctactagattacgcatgcgcacttcttgattgctaagtctaatatttgaatgaataaactctctcttctgttagtaggcactcttttgacggcagaatttgagggataggtaagagaaaacaatctttaccttcatggtactagatcattcggatggtatagctcacaaaagaaacaatcataactgataagcatagagttcggtggtcaaatcaagtaaaattagcaagtgaacatggaggtaattataaacttagcgagagctatgagtaaaaaaccatcaatctggttgacaacattattacataaaagtctggaagtttccagccctgataatggtgcaaactaaattagtctccatcaagttgtcaagaaaaggaaaaagaaactacaaacaaataaaccaggtcaaattatttgatacaaatgaattgttttccaaaacaaaaaatcttgactagtaaatagcacttcaggatgagcaagttttaagtagctcagctgctcaggtatggtgaattatttttaccttctaccatacatatccgatccgtagcctaccaccccaattataatgatattgttactatttgcttttgagctaaaatgaacagaaaacaaagaacgatgtctcataaatgaaatgacttgctaaggttaggaagaaaatgccacagataagaacatatgtccgtcttctttgatggggaaaaaacttagcaaaagaagaaaaacatgaaagtttgaccaaaaaaaaaaaaagaagaaaaacatgaaaagagtcctgtctcaaaagaatggccacaaaataaaataagggtttagagtcctgtttcatatcggcataatagcggagccattctggtcaattgtcacagattactaatgcagaagattagagtagagcagaaaggaatataaaacttcaacatacgaactcagacctgatcttgcagtggtaacaatagtgataggtcggttcgaagacagcaaacctaccagaaaaatagagatcagacgaagtaaatttaagtcattcctaagtctttcttaatcggctctatcaaataacgtttctgcgtctctttctctcgtccttagctgctatgtctaacattcgatctggttgtggcaatttgtggaagtctatcttactttcacagcggcatatgtttaaaagtgcatgtatgatgatttgatctgaatagatggtttgaaatttgaaacctaagtccaaaatatttaaacactggcaatgtcacagattatacatcaaaagaaaaagaggataatagtctggaaatgtgagaacaacaccagaaagcaacagaaagaaacagagcaaggccgagggagaaaccatggagaaggctagaatcaagaaggaagaaaccactgagcatcgttgaagttgaagttggagagaccgtggaagcgtttgacggtctttgttgcaagattgaagacaccgatgtcgaggcatgacaatttattgtgacagatacgatcatcacgagtgaaataaatggagttaggctcaattccaagggtatggtcagcaggcacggtaatacccaaatcatagaagagggcctcatcacctagagaatgtacctcaagaagccgggtgtcgagggttttcgggtcaagatctttaggatccctcttgtacagatggaacatcctgtgactttcagaggtacctaaatcgtacgtaaagacaaccaaaacttgacctgctcttgtaacagcaatgcctttgttagatgggatagacctcttttgcttcatacgttcacgttccttcattgtcatacttggcatccacattggaagcctatgtttctcggatacatccttgaaaccatcttcatcttgtccagacaaatctaagtgtcgaatgaactcacgggtggcatagacgtaaagattgtaacctttcagtaccatatcgtttaaacctcgtaactccctctgaacctcgagctctgttggaatctcgcggtaatgatcatcccctgtcctgcaaaaccctagaaatgggtacatttcaaactgccacacaacaacgtagtttccattcttgtcgtcaacccacaaacgacctctcagatcttcggcagcatgaggaatttcatcacaaaatggatcctcatcatccattagcatatgcttgacattctcctctccttcacgccaaatcttaaaatggctacccttaaatgattctagtggtggaagatcgatcctcttctcgctaaatacatctataatatagagtttcattcgagaatctaccaccagaaaccacttacctgagcttcccaggaatcgataccctgaaaagtcactcttcggctcgtaaaccctaccatctcctgggttgtaaatacgacaaccatactcttctgcaatcagcatcagcaatggagatccggcttttggctgcagaatcaaagtcgaacgcagagacttaacaggctcaaaatcaggaatactcgatgttcgtttgagcgtagatctagatccggcttttggcagcaaattcaaagtcgaacacccctgaacagcctcaatatctggaaaactcgatgttcgtttgagcgtagatctctccattatctcgtctgttttttttcttttttcttttaatgtcgtctttcgataagattgaggaggcgttaagttgcgcatattgaaatggaagacattatagttaggaaccaccaggcccagtaacagcaagaaattatattttaacgggtctatggcccaatatacgacgtccatcacggatcgtttcgttacaaaattgaactgaataattatcacttatatgatttgtattttgtattcctcgcttcaccgggatcattccttgtaactcgtctatcccacttccgcttcccttaagtattaaatgagattctccttacttctctagagatctctatttatgcaaaaacatatattaaacataccatccccataacccaaacagaaaacaatttcttaaatacttctaataatttaaaaattgaatataaattttatacaacacacattttaaaatatgaaatacgtacgtgccgctcaggttctagttatcttttatatgattagtattccgttcatttcaaaatgccacacaacaacgtagtcttccttcttgtcgcctacccacaaacggcctctcagatcctcggcagtatgaggagccccacgcgataaatcgctgattaatatatatccctgactttatcctctcctactcgctcaatctttaaaaggctacctttcaatgattctagtggtggaagatcgatcctctcctcgctaaagacatctataatatagagtttcattcgagaatctaccaccagaaactacttacctgagcttccaaggaatcgatacctcatacctccaaagtcgaaaggtcactattcgtctcgtaaaccctatcatcgtttgggttggacacactactgcgataaccatccttttctgcatacatcatcagcaatggagatccggcttcttgtcgctgaatcaaagtcgaacgcatggcctttgcagactcaggattctgacaactccatcgttgtttgaacgtactagatctctgcattttcaggtcgtcttttgattaattgagaaagcgttaagttgcacatactgttatatatacaaccaagcccaataacagccagagaaaaatattctataacggatctatgacccaatataacatcatcgtggatcatttcatttggttgttatttaacttatattcgtggaaacctttagcgtgtgaaactgatttcaaacttttttagattttgataaacgtttatgtgtgaaactatctttataaagattaaaatactgaagtaaagaagagggattagtgaattcgtggttattcaagattctcttgatattcttaagttgagatttggaaaagatactcatttgtacaattcattaaacctactgcctacaaatccataaatccaagcaatgacaacgagggaaaagatagagaacagtacgtcagtatcatttcgcctgactgatcatttcagtctcaaatgtgagcctcttgttttcagtacggctatgaagatgaatgacacatctacatagattcatctaaatatggtggctttgcgagaagattaaggcaagaagtaaatacaaaaaaagtataaatccagagacatgaacggcttaactatcggggccattagctactgcgaccgcccgtatctttttgggtaaaattaattaatcatatgaatcttattactgtccttttattcaaatgtacgaccatttgcacaccagattctccatttcggtacttttatataaatttaaatacggcatgtgaattatgttacgatcaactattcactattgttgacgacttgacggtctagttgtctttgatcaaaatacattaggataatcaaatgaaaacaaccaacaacaacaaaaatatatgacaaaagttacatctcggataatgtacttcagaatcaacaagaatgagttgtgaaatctcttcttgaactatatgaatagtaagtggaagtttggaggcacacatgcgtggcgaactctgtgatatgttgttgtctatagactttcacaaactctacatacaaaataaaaaacgcaattgtagtaaaatgcttaatcttgtaattatcttctaaccagcataattcatatttgcacacacatgtgatttgggtatgcatgcaaccactatttcagtggattgatttttttatatgtcagacatattctcatgtttttttttcttctgtacgataggatacctttacatgggcactaaagcataatcaaagtcataacgttagttaacaaagctaaactagcaataacaaatatataagtcggtttaccaaaactaaactggcatcccaacaacatgatcgtttttttttttttttttgctaacttgtaaatatcataataatgaaagagttggtttacagagcaaacctaaaggttggtttcttggcaaaaaagcttaaaaacaagaaagcaaaagagaggttatgagaggcaacggattagtgcaaccaaagactcattagcctggagaagcgcttgttgagtcgccgggcagtgatgcagttcttcacttcgcggtccacttcgcgaaagaccaccgagggaaggacatagacaagattgtgtagcagattgttccgttgcttccagattgcatagatgaccgattgggcaatgagctttctgagagtaggaggcgaccttctgttacccgacttcagccaggaaagaagctcagcccacaaagtgaagtggataccctgcatatttaacttcaaactaaccgcattccacaagtagagggcgaaatcacaagacagaaataagtgatctctactctccggggagagagagcagaggccacaagtatcctgaatctgaagcccccaagaagagagcctggttttggttgggagacggtccaaagtagctatccacatgttgaaagcatgcttaggaatgtggtctttgaaccaaactgagtcccaccaatcaactatggcagctctaggccgagtgactgcccaagttttagcagaggagaagcctttgcagatcttgttttcgaccacccaatcgaactcatccggcccactgtcatccgaaggtaaggcaatggtggataagtgaatttgcagagacaccccctggtcagatctcgggtttgcaataatccagccctgatggttgcacacatctgaaaccgtcgcatttaatggaacacgcaaggagctaggaccagaggagccaaagcagttgtagagcggtcccaaaggagtccagctatcgaaccagaagctggcgcgcctcccattcccaagactgcacttaatgaaaactgaagcaggttctctcaacctcagaatagatttccaactccatgagtcacctgtactttcaacttggttccaaaagttggtagaagtgctgatattatgatgcttatgccaagcaacccacagagagccactgtttgagaagagtagccaaaccagacgcaaacacatggtcctattccaatccgcaaaccgcctcagacccaaaccaccttctttcttaggtaaacagacatgagcccaagccactttaaccaaacctcttttttcagttccccccgaccacaggaaacgggaacagagagattcaatccgtctaatgcatcccttaggcaacacaaaagtagatatccagaagttgacagtgcctgaaataactgagccaatcagctgagctctccccgcgaaggacagagacttcacagcccaagcgttaaaccttgcagtaattttccctatgagaggctcatactctgaaactttcagctttctactcatcaacgggagccccaagtatctaataggtaacgacccaacagtgaatccatagcttgccaaagcattggattcagtttggctcagacctgcgtagaagagctgcgtcttgtctctgttcatatggagccctgaccagccagcgaagtcatccaatgtttcataaatgccttgaagagaggagcccccaccatcaaagaatatcatgacatcatcggcgaacataagatgggagatttctaattcagaagttctagggtggtaagagatataccccgaagaatacctggactgcagcagaccagaaaagacctccatggctaagacaaaaagatatggggacatagggtcaccttgccttaggccctgggtgcttctgaaatagcctcctgactgccaattaaccacaatagagaagctcgctgtagagatacactgctcaatccaacaaatgagtaatctagggaagttcaatgctctgaggcaggcaataataaagtcccatctaatagaatcaaacgcttttcgcaggtcaactttaagcattgcactaggagcagtggacttcttagagtagccctaaataatctctgtagccaggagaacattctctaacagg

SEQ ID NO: 34548 - DNA, 2239 bp, Arabidopsis thaliana landsberg
attttggattatatgaccattttcctaccaagtagctctcttttcttgttaatttgctgtttctttttttttgtcggtgggcaagattgatactttagtttcaccaaaaacatcagaagctggttaaaccaatggttcagtgttctgagctaatcaactgatgtttgttcttgtaggttttgttgtctgcgtttgatgagcttcaaggacaagaagatggatactatgttgttgttggagggattactcctactcctcttggagaaggcaagagtactaccactgttggactttgccaagccttaggcgcttacctcgataagaaggttctctcttgctttcatttattagcttatgccttatgcttgcttttggacaaacttctctctttgtattgatttgtgaagtgttgttgctcacgttggtacttgtcttcgccaaccgtcacaaggacccacctttggaatcaaaggaggtgcagctggtggtgggtatagtcaggtgatccctatggatgagttcaatcttcatctcactggagatattcacgcgattaccgcttccaacaacctcttagctgctgcaatcgacactcggattttccatgagacgtctcaatccgacaaggctctttttaataggctgtgccctccgaataaagaagggaagcgtagtttcagtgacattatgttcaggagattgacaaagcttgggatatccaagaccagtcctgaggagcttactcccgaggagataaagaagtttgcgaggcttgatattgatcctgcttctatcacttggagaagagtgatggatgttaatgatcggttcttgaggaagattactattggtcagggacctgaggaaaaggggatgactagagaaactggttttgacatttctgttgctagtgagattatggctgttttggctttgacaacctcactaggtgatatgagagagaggcttggtaaaatggtgattggtaacagcaaggcaggggatccgataacagcagatgatctcggtgttggaggagccttgactgttctgatgaaagacgctattaacccgacactcatgcagacactggaagggacccctgttctagtgcatgctggtccttttgcaaatatagctcatggaaattcatcgattgttgctgataaaatcgctttgaagctggtgggacctggtggatttgtggtaactgaagcgggttttggttctgatattggaacagagaagttcatgaatattaagtgccgttacagtgggctaacgcctcagtgtgcaattgttgtggcgactgttagggctttgaaaatgcatggaggtgggcctgatgttgttgccgggagacctcttgatcgtgcttatgtaagcgagaatgtttccttagttgaagctggctgtgtgaatctggcaaagcacatctcaaacacaaaggcctacggtgtgaatgtagttgttgctgtgaatatgttcgcaacagataccgaagcagaactaaatgcagttaggaaattttcaatggatgccggtgcttttgatgctgtggtctgctcccaccatgctcatggtggtaaaggagcggtaatcttctctattcgagaccaacactatgtgattatatgcaattttgtttgcaatctcatcttattgataaatgaattgttcttgtaaatgttataggtggatcttggtatcgcggttgaaaaagcttgtcaaaacattacacagcccctcaggtttctctacccattggacattggtatcaaagacaaaattgaggcaatagctaagtcatatggagccagtggtgttgaatattcagaccaggtgattgattcctagaccgacttcttcaatttctttgcattgttgtcaaaaaaaacctgtttatgtaacttatctattatcctgtgatatgtaaaatacaggcagagaaccagattgagatgtacacacaacaaggcttctcgaatcttcccatatgcatgtcgaaaacacagtactcattctcacatgatgcatcaaagaaaggagcaccttcagggtttgtattgccaattagggatgtaagaggaagcattggagctggtttcatatatccactggttggtacaatgagtacaatgcctggacttcctacaagaccttgtttctacgagattgatattgacactgaaactggaaaagttcgtggcctttcttaagtttggtagatctgtcaaag

SEQ ID NO: 34549 - DNA, 647 bp, Arabidopsis thaliana landsberg
cgcagagagatgggagctggccgaacgcggtaggcgacggctaggcgaacggctccgaatccttcggcaaaaccttccagcgctgatgctcatccgtttgcctcctccccttctcatctccataaaaggcatgggcggtaaatcccctagggcttcaccctagaaacgtgaggttctatgttctctctttcttccaccatttcagtcacaattttggatcgattcgatcgttcctggtgtccttgtgttgatcgagccattggtgattggaagtggaagaaagtggagctacgctcgtgtatttcttgcgccctgttactgtatttcagcacatgtgcggtgttgttttgatctgattgttgtccaccgtggcctggtgcttgggctcactgctgcccggtgttcctcttctcgggctggtgctgtggatgtctccctcggctccggcaacgactctagtatctctgtcaacctcccaccgtgcaggtgagagcacctagagggggggtaaataggtgatcctgtgaaaacttgaaacttaatccacaaagcttgattaggagttagcacaataatgccaagtggctagagaggagtcttagcaaaacacaatagccacaaagagatcaacatagagatggcataat

SEQ ID NO: 34550 - DNA, 3396 bp, Arabidopsis thaliana landsberg
  unsure (1)..(3396): unsure at all n locations
aaagatcgtctccggaaaggctggagctggaagctcgctgacccgggagactccactgtctacctctccgacaacagaatggacacggattgcgaggaagaagaagactggggagaagcaagccgttctttctgttcctccgacctcaaaggagaacggaaagaaagtcgccacgacagcagcaccattctaccccgacgtcctcttcatcgggagagcggagtcgcctgccatctctgatgatgaaccgaccgcgcctggagaagaaccacctcaacgagagtcccgccgacggaggaaccgatgcaggaacatccgacgacatcacgcagctggagaacgggatccggagcagcctgtctcgcgagacgaggtctcagagatgggagaaactccggaagaacgcgtcttcagggaacgaaggaactcccgacgacgagatcgccatcggactcaggagcaagccgagcaagatgcaaggcaacgacgcgagaatccgctcttcgggcgcaacctgaaccccgacttcgcccgagctatgaatacgccgagcgaagtcagaggcgttctagcccggatagctgacggacttcctcggacccccgacgccgagggataccggcgcctgttcactcaggcagccaaccatcttctaccgctcgctcacccgccgaacgatctacgacacgccatcaacagtcgccgagacgcgcgaagctctatcaatcgttcgcgtgaacggcggcacgagaacgaaattcgtcgccgggaggagtacgacagggatcacggcatcccagctcggagtcaggcaaccagaaccgagtcagcaacggcttcgactagcggtactacccggggtcggtcgaggaaccacaacgactactcccctccccgggacagacatcatccccgacgacgggaggacacgtgtggagtgacagcccttactccgcgccttagggccattcagtggccccctaacttcaaggtatccaatgtcgacaaatatgaacctaagcaggatccaggaggctggttggccgtctacaccactgccgcccgagccgccggggcgtccgaggatgtgatgaccgcgtacttacccattgtcctcgggcaagacgcgctacaatcgctgtgacatctaccccgacactgcatcgacgactggggagacttcagtcggcgcttcaccgccaattttcagtccctctccgacaaaccggcgcaaccgtgggacctcaaatccatcaagcgccggggagacgaaactctccggtcatacctcaaaaggttccagaccatgagaaatcgtatccctgaggtcacggaggcggccgtgatcgaggacttctacagaggatccaatgactcggccttcgtccgagccatattgcaaaaggcgccgactacctccgaggagctgttccgagaagccgacctctacatcaccgccgacgagcgggcccaggacctcatcggaggagcgacgccgcaccggcagcaccacgacgcgacgtgaaccagcaacccgacaaacgctgggagaagaggcccgcgaagaagtcacgccgccgggcaccaacctctcgtgccgaggaggcctcgcggaggcgaacgcacactggacgacatcctcgacgcccagtgcccgtaccacaaggacatgcgccacacccttcggaactgcagagacttcaagcactccgtcggacacggtcggcccttccaacctctacctcctcctccgccgcggggaggaccaggagaaccgcgacaaccccagcagcaggaggaaggaggaggtggagccttcccgcgcgttgacagagaggtcaacgtcatcttcggcggacacggatcgcaggagaacagaagacaacaaaaggtcaacgnnnnnnnnnnnnnnnnnnnnnnnnncggtcctcccgccccataccggtggtcagaacatccgatcaccttcactcgggaagatcaatggctcaacttcgaccaccccggcaaatacccgctcctcgtcgatccggtgatccgagagagccgggtgaagaaggtgctagtggacggggggagtagcatcaacgtcaccttcccccggacacttcaaggcttgggggttcacctcaaagagctccacgagtcggacactcctttctttggcatcgtgccgactgaaggggaatacccgctgggccacatctacatgcctgtcaccttcggaactccggataattacagaaccgagttcctgaggttcgaagtggcgaacttcgactgcgggtacaacgccatcatcggaaggccagggctggccaagttcatggccattccacactacacgtacatgatactgaagatgccaggaccacgaggaatcataactgtacgcgccgacttccaaggcgccgcagagtgtttccgagtggccatccaagcggccctcaccaccaagccatcagcgatttcttctacaccggcgaactctaagcctgacgaagacctcgcagtaccggcaaacgaagctcaggccgcgacctctatgcggccgactgaagaaactaaaaggatcaacctggggttcgctgatgaacgcaagactgccattatcagctccagcctagacgacaaataggaaagcgcgctcgtccagtttctgcaagataaccgagacgtattcgcatggcaacctgcggatatgccgggagtcccaagagaactggccgagcacaaactgaaagtctacccccaggcgaggccgattcgacaaaagctacgtcgcttcacgcccgataagagagaggccattcgcgccgaattagctcgcctggtcgcggctggatttattagagaagtgttacaccctgagtggttagccaatcctgttcttgtactaaaaaagaataaagtggattggtgcatgtgcgtcgactataccgacctcaacaaacactgtctgaaggatcccttcgggctcccgaggatagatcaggtggtggattccaccgctggatgttctgtgctgtctttcttagattgttattccgggtatcatcagattagtttggcaaaagaagacgaggaaaaaacggcgttcatcaccccgtttggtgctttctgttatacctccatgtcgttcggcctcaaaaacgttggagcgacttatcagagagccattcaaacatgcttagccgatcactggggcaagcgtgtggaggcttacgtagatgacgtggtgatcaaaacagagaatccggaaaacttcatcgaagatttacagctggttttcaatagcctgagaagatatagatggaagctcaatcctgaaaaatgtgttttcggggtaccagtaggaaagttgctcggatttatcgtcagccaccggggaattga

SEQ ID NO: 34551 - DNA, 1501 bp, Arabidopsis thaliana landsberg
  unsure (1)..(1501): unsure at all n locations
ttgtacgaagaaatccggagaccaaaaattgcgtaggatgcgatcgatactaatacctaacggcaattcagagacgtaacttatttaagttctgaagatccgtcgcttcggccaagaattttcccttattttcaaagaagttcctacatgttttacgacactatatatatatatattagattttaaggtcattgtttatacctaaggttggagaggctattatccttttctcttttgtacttgggagcaaaaccctatggagactacctttagagaagatccttctaaaccttaatctcttgtttttttcttcattgatttctattctaatcatgttgtttgcttcatagatgatttggtagattgcccacttgctaggttatttgtaggattcttcatctttggttgttcttaatgctagttttagattggccacctagaacttgatctcagataatcggtatacccaccataggtatctattacaagaactactatttgatgagcctggtttaaagtcgtgtattaagaatcggcctatctaccaaggtaaacttattgaactcgtttagcatgcatgtcttagtataggatttcatggcacatcattagaaatctctagctctaggcatagtgagtttcacgtcacatcacggttattctataattagggtttgagtttcacggcccatcctagctattactagatctactatcatctatttcctgagaataccctaagcctaccgcttttattatcttattttacaacttccaatatgctattgcttgattttatttctttattttataatctatttgtttagcttaattcgataaccttattatattgtgtggtccgaaagctttgtgaaattcgaccctaaagtcctagaatcgatctcttatttgagagagtggtcttaggattaatttgacttacatcaattgcccctactaaaaagaacaacattacgatgaacaannnnnnnnnnnnnnnnnnnnnnnnnnnnntatgtgtttgtgttcgaggatccaagacagtaggggatcgacatatggtgccccctatagatgttgctagacctagtcgtacttcagacgtttctccatatgggtccctagtcgctcgcctcagcaggagtaggaggcagccaatagagcacagcttaagcgagagcccttcacaagatcgttgagtaccaatatcaattctttttcccttgttcataccatttttctttgcctttattttgattttatttgagtctatgagacacctttcctttgaactgttttcccactaggtctggagtgaagcatgtcaagggggaggttgtttctagcgatctaacgacagatagcgctctggtgccaatacttaattgccagacttaaacagcttgtgacgacaattgagttgtccacctactgtaaatccatgaaagagatctgcctttctgataaggatacaaacactctgtcaaacccttcgctgggg

SEQ ID NO: 34552 - DNA, 1379 bp, Arabidopsis thaliana landsberg
tctctgcgctgcctcgtgctcgacgccttgcccaggcgccagagcacgcactggtgctctcccgcacacaccccgagcgcgtgtcagagccacccctcggccgtgctcacctacacctttaagaccacacccagacgcgccttaccacactccgcactcaatttcgctggccagacaccatccttagctccagcgagctctgcgccacccacccgaaccacccgagcgccggccaccgtggccagccatttctagagaccctcaacctcaaccatgcccttggacagctttcccgaggagtcgtgaagcttctccaagaaaaatcaaagccttgcctgaccagaacagcaagatcatcgtcgccggacttctgtcgcccaccgccgcgcgtagaccgagctatccggtgagccattcttcaatttctcgcgcctatgtcttccctgacctcaagtgaagctcactgaccagtttaattgaactctactaccctggataggccggaccctcgccaccgacgagctctccgcctgcgcacgtggactggctactccgaccatccctgacgcgacccgcacatcaccgtgaccctcggacctcccctacatccttgaccacctcaccggagcagtctcgccgccggtaagcccctccgcccctttcttcctctgcggccactgttccattagggaaggaccgtgggttcaattttgcaaaaccctagggggttttctgcagagccgtagactcaagtgaatagtgcatcgaggacctctctgtaattcttttaaaatctttcgccagggaccccagcgcaaaattgtttttcctttaaccatttctaattaatctttttatattcagcagagaacttgaaaaatttatatcttgagttatattcaaccaaatttagtcaaacaattttactagattcaaaatattatgaactatcacataaaatactgaaccatgtgctttctgttttaaattttagagtttggaattaattaaagaaactgaccaaaccttattaaaatgaataaattagttatgcttatgtgctgaacttaagaaaatttgtagaagttcaaaccccacttagacagtgtttaaaaatagtaagcaccccagtattgaagatttaaacagggttatctattaaaagccataattgcccaaaacttaggaaaatgataaaggtactagaaaataatgaacagtggatgcaaatatttttcctactccacttaagtaatgaagaacctaggaaaaataaaaggaaccctagtccagaacaaattcaaggtgaaatgttttattaggcactaatcaaactagaaaaaccattattaaaaatataaggacaatttcaaaattgg

SEQ ID NO: 34553 - DNA, 4811 bp, Arabidopsis thaliana landsberg
tgtagcgccatgccatccattgctctcttcatctttctcaccttcttcttcaacccactgaacaacttcctctgaaacttgcccagacctttgagcattcccaacttcttgtgaacttgaccgggatctctctctggatcggactcagcataatcctcaaagaaaaactgctccgctgcagcttcgcacgaatcttcttgttcatcaaactgttcagcttgactaaactcagcttgctcaaactcgtcctggccatactcggcctgctgaaagttactcggccgagtataagcttcctgctcagcttcttcttcattccactctgctccttcttcttgagactcacttcctatgctcggctctgcttgtagaggcgcaaggacattgactaagatcgattgaggaggatcaaagtcaatgttgttcccaatcctaatggtggtgaacttcttgcaagggagtgctagcctagagagacctagcgtggagtgcttgaacttgaagtagagttgatccgctggagcagacctatccaagtagcacttcctcttcaaatactccatatcgatgtaggttgctgtgtgagtgggggtatgaagaggaactccagcggctattaggatgggcgtgatcactcctctagcacataagcttcctccatagccggattggtggattccggctgcatactccctaaaaccaatcaagtgatcaatcaacaccaccgaaagggatgtatcagccctatccccttccatctctatcccattcctcgtgtgccccaaaatgaagcataaggtgagatcaagcaacttcagctctccctcattaacatggccggttgtcttcttcgggaagaaggcacttgcaatgcaaaggtggagatacctaagcaccgggctccttatcaacgaactcttggccctagatgacttgtaggggagtggaccggcgattgtcaaccatagatcaaggagctcgtccttgctgaagttttggcggattccatacttggtggggaacttgaaaatagcatccaactgcctaatgggaaccgagtattgaattccaaacaccatgaaagtgatgtaaccaactcccttatgcagctctctctccctttcttcagcatagaaatggagcttcaaagtggctaggaattggcagctctcagttttgtatccttcatactggtaggagaagaaggtctccagcttggccatctccatgaggtagtcaacatctctacatatccccaaagcttgcatggtaggtctatggggatatcttgtcccctcaaaactcagctccatgagatattggtagtgctcttctatggtaggttctttctttctcctcatggtgttccttcttctacttgtaggaactatcgggacctcttcatcaacttgcacatcttcctcagatgcttccttctctatctcaggcacttcttcttctgcaactggctcggactcccagaccctcttgcctcttgctatttcctcttgagcagccgcagaacgaccctcagaggactccggggccatactcggccattgtactcggcctgtcatccgagtaaaaccaggactcgcagctttctgattccttgactgattcttctcattaatcatctcaaaccctcttgccactgctcgagcagaggctctccttcttgattcttcgggattcatgatcttgaggtgatttactgcagatagtcaccacaaaataaccaaaggtaggtcaaagtagaagagaaattgatgtttaaaaatgaacaaagagtgtaagagaggctttgaaaaggtttgtaacaagagattttggcaaagtttctgagaaatctagagaagtgagagtaagaacttaaaatgtttggagagaaggagtaaaattcgaaatttttgagcaaaaagagagtgtgagtgacttagcttgttgagtgtggttttatagacaagaagatttgatcctagccctccaaacaccttagatcctcacccttcatttggtcaaggggacatgtctcactatttgcagcagaatctttgaagggctttggggagcagaatttgattggtggggcccagcaaattcgaattcaaattcgaatttgaattgtgttgacctcgcacgtgtgaactcggccgacatactcgacgcgcgtgtcgagtacagtgttgggcctgatgggcttctttttctgactcggcttcgggccgagtggtgtgggccgagtactattcaatcttgggcctttggtcaattgaagcccacactcggcctgtagccgagtagcacggtcgagtgtggcctgaaattctctagaagtctttttccctgaaacacttaaacaaaaacatcaaaaataacaagaaagcaatatatacaaggatagacatgggacttcctcccaatgtcactaagcttgactctcacaatgtttaggtagagaagagattgaagagaggaactgagaagtcctcatcttcacttgctgaatcctcaaagtctgaatcatactctgcattttctctagatagctggagagaaaaatattcattggatctttcctcaaagtaagcctcatctcatcagtagcgtagtctccttctcccaaatcaggttcctcaaaccattcctcaacttcaggacttggataacccttaatcatttctttaagctctaagatagtatagtttaattctttcatcttgaggtccaacttttctatgggttcctcttgaacttcatactccttcctgagctccttaagttctctagcaatagaatcaacatccaatgggttccccttaatccctacccctgagctaggtcctcttttcatcatagaaggcttcttcggttgcttaggctctcttaggtggtaagttagaatggagttttccaacccactcaacaactcatcatctaaatttcctttttcaatgaagaaaagctgtccttctatggtgggcttcttcattttctttgaaatgtcaaagcttatatagtgattcttaccaaggttcaaatctatcttacccatttgcacatcgattagagcgcctgcagttgctaaaaatggtctcccaagaatgagagggtctttcggttcctcatccatctctagaaccacaaagtcggttggaatttcaaccgatccgatctttaccggtaagtcttctagcatcccatgaggcactctcactgatctatcagctagaataagatgaatgctgctaggcttgaacttatcaaatcccaatctctttgcaacagacaaaggcatcaaactaaccgaagctcccaaatcacaaagactattgttgaacactaagggtcctagtgaacaaggtagagtaaaggaacctggatcacttagcttctttggtatcaccttcctttgaatgatggcactgcactcaaaactcaattcaactatatgctgaacttcttggggtctttccatgattacttccttgggagtatcaaccaaaggtatcttctcttctaactctttgatacactttatgaacatcatcttgtgtttctggaagatccttgcattaacttgtgcaatcctttctggaaagtatggtttaggttcatatgcaggtggaatagggattgggttgctcgggtcatatgctcgttcgacaagtcgagcaaagaagtcgagttcaatctcctgtcttgattttggtctcaaaacctccccttcttgaatcccactgtcctcagtggcagaagtactcactgtggtgatagcatgggcatactcctttggattttgaacagattttccaggaagttgtccggggtgtttaggagctgaagtagaagcaatgtgtccctccatggtcttgactctagtgttaagtgcatctatctttatattcaggttgttataagagcaatcaatcctggtggtgagctcagctagcttcttatccattgtcatggagcatgaggcctgtccttgcaaaagctgatgaagtagagtcttcatttctgagtcttgtgcagaagtttgctgtggctgctgggtgaagcctggaggtccaaagttctgcttttggttgtagccttggttatagggtataaagggcttagcttgaggcggttggttctgtggggggtagacttgatcttgtgggtttgccacattgttgcttctataagagagattaggatcagggggctcgtagttgttaaaacctttgttgtagccaccttgattctgtaggtatttgacctcctcaatagtcagattctccccatcgcggatttgggtatgctgttcctctgaaatgaagtgaacaattctcttctgagcaagcaccaacttgtcaatcttatcattcagagctttgatctccctcttgtgcttttcttcagaatcgctgcctcccctattagagcaatcatagtcttcattgtaattcccatcaaattgagctaggttttcaacaatttcccaacgttcagctacatccttgttaagaaagttgtcattagaagcagtatccaaaagcatccttatcttgggcaatgctcctctgtatagagtactaagaagtgaagctttcttgaaaccattgtgagggcattgagtagtatagcccttaaagtgttcccatgcttcagagaatgactcggaattcttctatgtgaattgatgcgtgttttattttgcctcaggcttttacctgaaagaccacacgactactgcaagtgcacagtatattggagtagtatttgaggatcgaatccacagggagtatagctacaaggaagaattc

SEQ ID NO: 34554 - DNA, 887 bp, Arabidopsis thaliana landsberg
ttcatgatccattgttttgtttcttcattcaccttagccccaaaagtgatagctgatttctccgaattgatcatctgcccatgaaatatgtccatattgtgacagacaatgcatgatctctgcacattctaactgacaagccttgcaaattaatagtgtatcatcagcaaacagtaaatgattgacagatggtccggttccattaaactgaattccagaaattttcccaattttttctgcctgatttaggatgtgaatcaaagcctctgtgcataacacaaacagaaatggtgataacgggtcaccttgtcgtaaacctctatgaggagtaatatgaccaaatggctgaccattaatcagaactgaataagacactgaagatacacaagccatcatccaatttatccaagtactgttaaaccccaaagccaaaaggattcctttaagaaatggccattctactctgtcataagcttttgacatgtccgttttaaagaccatgaaatcctttgagatcttctcattagttctgaggttatgaacaatttcatgtgcaagaatgatattatcagaaactaacctctctgccacaaaagccgattgagttggtgagactatgactggaagatatttcttgagtctagcagataaaatttttgagataatcttataaaggacagagcaaagactgatgggtcgaatatccgtcattctagcaggatttgttatctttggaatcagacataagtgagtatggttccaatcttcagggagtattcttgtctgaaagaaatactctatatctgacataatctgattcttgaccaaagaccaatgtgtaaggaaaaaaagagcagtgaaaccatcaggacctgtgcactctcagc

SEQ ID NO: 34555 - DNA, 1148 bp, Arabidopsis thaliana landsberg
tatatacatatataatacatcccttccaacatatacatatttcttaatttttttcaaaaacttgcttcgatattttcaaacgctttcgtttctcacatactcgtttccgcataccggttttcgattccatacagtttaggtggtaatccggtgagtcatagccacgttattttgagttattgtgatatgttattccattattccggttttttcacatctattttaaaatatttcaaaataatgatgtctaatgttttatactttgtaataattattaagttgtatgaaataaaaaaatttgtattaatatttaacttttgtgagagagtctatcactggaatatgaaaaactgaaaaaaaaaagaagctatctttttttttttggtaggaaacgggaggtaagccctcccgtgatttattacggaaaaattaaagattacaaccgaacttgtcttggacactctgttccagactcatcctctctaaacaccgagactaaagagctcggtaaaacatcaaaaacatgaaaacctaacggtaaagaaaacgcatagttagccaacccatctgcaagacgattagcttccctatacacatgagaaatacggacaatccagtcccttacgagaaagccatggcacatgcgtaccaggaaagacaacggatgggccgccccaatccctgtctttagaaaccccaccacaacttctgaatctacttcaagctctatacatgtaagcttccgctcccatgccatttacagcccgtagtaaactccccacaactccgctaacggtgctgaacaacgccctatgttcaacgcaaagccaccacaccaaataccattctcatccctcaagacacctcccgctgttgccggacccgggttccccctcgaagcgccatcagtatttagtttgaaccaacccacacttggttctttccaccttatcattctctccactctggcccctgcgatagtctccctccaaaagccacattcgccttagtaacctctgccgtaatgtccttaacaaacttgacacgatctcggcaaactctgttctccgcaaacacgttacaacaacgccatttcaaccccaccataaagccatagcgaaggttgtggcccaagagatccattaatg

SEQ ID NO: 34556 - DNA, 1482 bp, Arabidopsis thaliana landsberg
taccatgttcattggggaatttgcttacagcgattgtctgtgcgatctcggagcctctgttagcttgatgccactctctgtagcaagaaggttagagttcattcaatataaaccttgtgacctgactttgatccttgcggataggtcttctagaaaaccgttcggcatgctgaaagacctaccagtcatgattaatggcgtagaagtgcctacagacttcgtggtgctggatatggaagtagagcataaggaccccttaatactgggaagaccctttttagcgtcagtgggagctgtgatagatgtcagggaagggaaaataagtctcaaccttggaaagcatatcaagttgcagtttggcatcaacaaaactccacaagggtcaaccgaagatggaaaaacctctggaaacgatagaccgatctcaggagaaggatatgagactgaaagagtgaaagaacttagaaagagatctgataagcaagatgaaactatagagaagctagcccacaccattgaggaacttaggagtaagctgaatcagatgcagaaggaagttcaacctaaaggcgggattaacactatcgcgagaaaagaattcacttcaagatggtctcaagatgcagattaccctctagaagagaaagaagcttattttgaagaaaagggaattgagtattctacctctccagggaggacgctgagtatgatgatgatatcagagatgattatgcagaccgtctctatcattcattttcttcttgatgagtgtgaggagtcaagttagagactttaaacaagctcacttggcaggaagtcccatgactatttttttaaataaattttccttttcttgttatctttgatttgtcttagttgtgtttgtgtttctcaggaataacggaacagcgtggagatagagtaaaaattcaaaaaatttactctacagaagacctggagatcgagtatatggcctggtggagtgcaaaattttgaaagttttctgttgcatctggagaccctgaattcaagtacatcagtcgagtatatgtgatgtttaaaacccaaaaattttgaatcatcactgtactcgaccaacaggtgctacagagacttgcagggatttcctgcagtttacagtagattttcagcagattttctcagtcaacagagtgtggaccacgcgctgaggataagatagagagagaatctcaaactcaacctccaccactctttttgaaatttcactcaacttcaccgaatccactcgacctacctctcttcatctcaccaccgacactccaatttctctacaccacgaatcgccgtccaaagagctactcgatccagaccacttcactcgatttcgtcgcatactcgaccaattcatccacaataaccgccgtctctttcaaaagaagttactcgacttcgattcccagtctcgtagctcactcgacctccgcgtgacagaataactca

SEQ ID NO: 34557 - DNA, 1293 bp, Arabidopsis thaliana landsberg
  unsure (1)..(1293): unsure at all n locations
ggaatttgggcttaagacaaaagaccccaccccccaacggagcaggagatgcttcaccagttcaaatgtatagccgtcttctaaacttagcttcggattctcttgcaaaggttagtgaaaatgtaagaaattatatttgttatttgtttgaatcattaataatcttcttctccatttgtattacaagaatgaattcaaacccgatacaccaaacttccgggaggaaagatcttcaaagtcatcacagtggaagccttgtgcagataataacaaagcagctgtggcattagagaggtctagagaattaagcaatggttacatcatggttagtgcaaatggaggccttaatcaacagcgcgtggctgtaagtatataccaaagtaatcattatatatttgattcatcaagaaagtatatatagtgaatgttagtttcttgcaaatctgtaacgctgttgcggttgctgctctgctcaacgcgactctagttcttcctcggtttctttacagcaatgtatggaaagatcctaggtattttaaactcctcaagactttcaaaatttattataaaaaaaatttgcttgttgattttgcgaaagtgcgtaaatggcagccaatttggtgatatataccaagaggatcattttatcgagtatctgaaagatgaggtgaatatagtgaagaatcttcttcaacatctaaaatctactgataacaagaatctcagcttggtgtgttttgaactcccttttttcctgtcgggtctaatttatggagatgcaaaattcataatgtttgttttcntacataggttactgatacggagcttgtaaagaggcaaacaccagtcgattacatcgaacatgttcttcctttgataaagaagtatggaatggttcatcttttcggatacgggaatcgcctcgggtttgatccattgccttttgacgttcaggtaaaatgagaatgcataattagagtactcacttggtttcttagaaataatatggttttttcttttgcttcatttaaagagattacgatgtaaatgcaactttcacgcgctgaaattcgcgcccaagattcaagaagcgggatctctgttggtgaaacggataagaagattcaaaacatcgcgtagcagattggaagaagcattacttggtgaatccatggtgaaaagtactgttaaaggagaagaagaaccgttgaagtatcatgatatgcatctaaggtttgaagaagacatggttgcttattctctatgcgattttggaggaagagaagccgagcg

SEQ ID NO: 34558 - DNA, 1028 bp, Arabidopsis thaliana landsberg
  unsure (1)..(1028): unsure at all n locations
taccactaccattcgccaaaaccacaataattcaattattctttatgtagattctattaatatggtcgaggggggttattccaaataatttacttgttttaaatgaaaaactcataactcgaattatacaaaagattgctgattttggattcaaactttcaaagagaacttgtagttatgcatatacataaaaagctaagtcaatttttttttttgggctaatgaaaacggtaaaatcatgttattgataaaaaatttgcaaacagtacatgaaatatgaccatatttaaaaatttacctaaaaactatactgatgtgatcgcctgatttacttacatttaactaatttttaaggtctgtcgatcgaactcgttaccttgaacaattagtaggacaactccaaccactaaaccattatagtttaaggattcatgttcaatttccaatatctatagtttagtagatgcacttatcatcacactcaccaattggatttcaatacgtggttctagctttttaattaccaaagtgaaaaaactgactttctcttaaaaaaattcgttctagatggatgctctttaaatcttcgatattttttatccgtttcgataatatggtaagaatgaatgacgaatcggtcaagctaatctgtatattaatcattgtactcatcaacgtaaagtcctattcgtctatacatatgtgaacttatatatgtctatcaactagttcactaccctataaagttcatcagagnnnnnnnnnnnnnnnnnncactacacattcttcatacagctgagttaggaatgttaacaaaatagtttatgggagtatgttttatacataataccatccctttaaaaacacagaattttctttatcatctccgaaacaaatcatttacagtagtaaatgtaaaaacacaacattaattctgtttgttgttggcatttacaattgcaaaatcattttctcatttattattcgnatttattttgtcaagaaccctngtctctaaaatattcata

SEQ ID NO: 34559 - DNA, 9473 bp, Arabidopsis thaliana landsberg
attccagttgctccaactagccgattaacacgggctgctgtggttatgcctccagttctgacagaagagctattaggtaaaggaaaacgcaacaggaccccgtcggttcatttaaaagattttgttgtcccacacgctcccaaaccgaaacaacaagaagaaattaatctggtttatgctgaaaatctgactcacaacgtggatgttcaccgtttctccgaaacacttgttgcttatgttgctgcagttctctccaacttggaaccaagatcattcaaacaagctatgcaagaagaaaagtggcgaaatgctgttggttcagaatatggagcattagaagaaaacaacacatggaccattgaagacttacctcctaacaaaaaggcaatagggagtcaatggatcttcaaggtcaaatttaaatcagatggtacaatagagagatataaagccagattggttgcaatgggaaataaacagattgagggagaagattatggagagactttctctcctgtggtaaagatgggaacagtgagattgtttcttgacattgatgttaaaaaagggtggattatacatcaaatggacgtccacaatgccttcttacatggtgatttagaagaagaggtatatatgaagctgcctcctggttttgagtttgttgataagaataaagtttgccgattgcgcaaatctctgtatggccttaagcaggcacctcgatgctggtttgcaaagctcacttcagctcttcttgagtatgggtttcagcaatcacgcagtgactactcattattcacttatgcacaaaggtactaccagtcttaacattctcgtttatgttgacgatttagttattgctggaagtagtcttaaagctacagaatcatttaaggcttatctctcgtcgtgtttccatatgaaagatcttggagaactgaaatattttctaggtatagaggttgctagaaatgcatcaggcatctatctttgccaaagaaaatatgcccttgatatcattacagaaactggtcaactagaagctaagccagcaaattttcctttggaacaaaatcacaagctagcactctccgtgtctgctctccgacctgatccgaaaccatatcgtcgtctgttaggccgtctcatttacttgggcgtcacacgtccggatctagcattttctgttcacgtactagctcagtttatgcaaacaccacggttcgatcattggctagctgcgttgcgtcttatcagatatttgaaatctgatcctggccaaggaatattgttgcgggctgattctaatattcaagtcaccggctggtgtgatgcagattgggatagctgtcctctaacgcgtcggtcagtcactggttactttgtgcagttaggagactctccaatatcgtggaaaacgaagaagcagaaaacagttcgtctttcatccgctgaagcagagtatagggcgatagctaaactggttcaggagcttatctggataaaaactgctgaagacacttggtgtggttcataaacaaccaatggtggtgcaatgtgatagtaaatctgctatttacattgcaacaaatccagtcttccatgaaagtacaaaacatatcgaaattgatctccattttgtcatagatgaggttttgaagagagaaattcagctgtatcatgttgattcacgttcacagctcgctgacatcttaacaaaggcaattggaaaggatggttttcgttacttcaagtccaagctgggaacacgaaatctgtattctccagcttgagggagggtattaggggctggtttggctcggttctctttagttactcttggcataatcatctacgaatatactctaacagatgcatatattctttgtaactagagttagatagatcttcctagattcacgctttcggttgtacattgactctatatatgttgtatgctgttcattgtgatcaataacacgaatccatttgatctctgaaatcctttacaagaacaccaaaactgctactatgcatttcaaaaagctctctccatgtatcgtagttgagtttggccttgtcaagagtgatgagaatgtaagatttgatttggctaatagagaacggtttgtcagaggtggtagatagattggtacgggccatcgttgagaatagagagtaattaaaaaacaagaaaatataaaaagaaaaataaaaggtttagatgaggaagaaagaagatgaagagaaaagaaaattcaaaggagaagaagaaaaaggagagacgaagagagaaaaggggagacgaaaagaatacttttagaagaacaaaggctatgataccatattggataataaactctcttgactgaattattatgagagacacaaatatatagagatacaaagagttctagaaaattctatataaaagtatatatgaaaatatgcatatcctaacatgttatgcatactataaacttttcttcttgaaaatgagctgtcaaagcgggctgtctatgtccattaacccagtctaataatatccattttgatatttggacaaatagaatccatatccattaagactctgtctattaacgattgcatctgttggagctggattcccctccaggaatccacctgcgaaaatacaaagctaccccacaaaagtccaccaagcccaccaagtagaggacctacgcagctgacgagcccacatacgcgaatgggtacttgggccagataagcccagtcacctgatgaagggagataagcgaataatgacctaggaactgatgaggagatattcgcggagcggacctgatatttcggaactgacctgccgaatatccaggaggatctccgcagatcccggacgaagctaccacgtgcgtagttctatataagggagcaaggacgacttggaagagacattcaatccagttcacattcgcacacacacacttttacacttgtaatctcttttcacattgtaaaagctttgtcataattaatacaaaagtccattcgttcttagcaatataactctcaagatttcagtgaagatctagccctcctttctcataatcttaaatacaaatatcgagtgtggatttcagaaccgacatttggtgccgtctgtggggacggaaatagatcattccaacaccgaaactaacacatcaattgtgaccaacgatcatggcacctcccaacggatctccctcccggagcccaggttgatgctatccataacactgacacggagaacatctcccaaaactcgaattcttctggatctgaccgaatcactccccctccgcaaacaaggggcggagaacgaaacgtcacgatacagcctccaaacggagataacccgaccaacctgtctaatcaggtccccccgcgacctcccagcgaattggccgagctccgcgcaatgatcattaacttgatcaacttaaccaaaaaccaagaaattatgcatcgcaacctcgccgcaattgtgggtcggtagagacgcgactccactcgcatggcacatgaggaagagcgcgataccgcgggtaagtaaatttaccccccgcgaaactaggattcctgcccaggtccccattgatctgacaggtaccgtctccccggccgatcctactccaaggacttgtctagacttcatctcgatagacgtctcacctcctaacaaccggtaggtcacctttttgcaggcacctaccaacactctcgtcgaaaacccggcaacaggaaacgagatgagcacaacacttgccttcccaaggctaccggtcccaccttcactgccgctgggctatttgcctcctaggtacacgtggacgagaaatcaaacaaccgcgtccagctcccgcgttcccgggaactcaacgcaacaacgaacctctatcgctaatccgccatccattccccggataccaggaagcgacctccttaacagttcaaccgatccccaagcaccggtcgatccgcgtaacgtcctagatatggaaacattccgcaattacgcagcttaaacaaacgcgaacatggctcaaatgcattctcgaatgcccctagcagtgagcaacgctcccgacatagatcatgtgatcgaagaaaccaggcgcaccccgttcaaggataggatcgctcgttttcgcctccaagacgtcaggagactccgtttcctggagtacgacagaacgagcgacccaaaggctcatctgagatccttccgttttgctataacacgagcgtacctgacagacgaagaaaacgaagcaggtcattgccgtttcttcgcagaaaacctcgtaggtcacgccctcgaatggtttgctagtcttgaagggaactccattgataccttcgaccagctcgccgccgctttcttaaaacagtattcggtacttatcgaacagaggacgtccgaagccgacctctgaagtctcactcaacttcagaacgaatccctgcgatcttacgtcaaaacattcaaagcagtctaataaaaaattgcaaacctaaacgaagaggtagccatagcagcccttcgtaacggcctttggttctcctctaggttccgtgaagaactcactgttaggcaaccagtctctttagacgatgcccttcacaaagctctccacttcgccaaagccgaagaggagctcgctgtgctggccttacgattcaaagaatctataaccaaaacgctccccttgcaattaagaaacccttcaagaaggaaaacaaacgcaggggcagcataccttattcgcaatagacgaggcagctgaggaggagagtccagaacttgacctcggaaaatattgtaagtaccacaagaaaagaggacattccaccgaggagtgtcgtgccgttaaaaagttaatcgcagctgcgggaatgactaaaaaaggtgcaaaccccaaagttgaaacccctcctcccgacaaacaggaggaggagcaaactcccaagcaaaagaaacgggaacgaacaccggagggaagtgactctcccccacctgctaggagagaacgcatagacgtagtctttgcagaactcgatctaggtggcgagacaggaaggtcagtcaccacacagaggtttccattacgcctctcaaaattctgctgaagcgcaaccgagcacctctcccctaaacgcatcgatttcatcatgggagggtcttagctctgcaacgactcaatcaattcgatcaaaactcattagaggaaggcagattcttacacaaaaggcaagagctcgatgatgggacctgaccaccagatcacattctgggaaagcgaaaccaccgaccttgataaactcacgataacgctcgcgttattcgaatcgatgtaggcaactacgaacactcccgtataatgatcgacacaggaagctcagttgacgtactcttttacgacgccttcaaaaaaatgggacaccacgattccgagctgcaaggcaggaaaatgccacttaccgtgtttgctagtatacgaccttttctttaggaatcatccagctcccaaccatcgcacgaggagtgagacgacttacgagtttcctcgtagtcgacaagaaagctcttttcaacgcaatactgagaagaccatgggtacacgccaataaagccgtcccatcaacctaccaccaatgcattaaattcccctcggacaagggaataacagtcgtatacggcagccaacgcagctcccgaaaatgctatatgggcagctacgagcttgtcaaaaaggctgaccccgtagtactaatgatagaagacaaactcgcggaaatgaaaacagtcagatcctctgatccttctcaacgcggacctcgaaaatcattgataacacaggtctgcatagaagaatcagatcccaaatgatgcgttgggataggtcaagacctcgacccagcgatacgagaggatctcataacctttctcaaggaaaacaaagacagcttcgcctggtcgagtgcgaacctccgaggattaagcctcgaggtaacctcacatgaactcaacgtcgatccgacctaccgacctataaagcagaaacgtcgcaagctaggtcccgaaagggccaaagttgtgcataatgaggtcgaccggttgctcaagatcggatcgataagggaagtaaaataccctgactggcttgccaacccggtcgtcgtgaaaaagaaaaatgggaagtggagagtaagcatcgactttacggacctgaataaggcatgtcctaaagatagtttcccactcccacatatcgaccgaccggtcgaagccactgcaggacacgaactattgtccttcatggacgcattctccgggtacaaccaaatacttatgcgcctagatgaccaagaaaaaacagcttttattaccgaccgaggcacctactgttataaagtaatgccctttggtttaaaaaatgctggatgctaccttccaacgattggtggacagaatgttcgctggctagataggtaaaccgatggaggtttacatcggcgacatgctggtcggatcagctccagaaaatgccatcgtcaccccatttacagtctgcttctatatccaaggcgtctttgaaatgaagctaaaccccgagaaatgctctttcggagttccatcaggagaattcctcggatacctagtaaccgaaagaggcattgaggccaatcctaagcagattgcaaccttcatcgaaataccatcaccaaaaaatggcacgagaggtccaacgactgactggtcgtattgccgccctcaacaggttcatatccaggtctaccgacaaacgcgtccctttctatcagctcctccgacaggagaaaaagttcgattggaatgaggactgcgagcaagccttcaaacaattgaaagcatacctgtttgaaccacccatactcacaaaacctgaacaaggagaaccgttgtacctgtacacggcagtctcccgaaccgcgataagcggtgtcctggtgagaaaagatcatgaaggacaaaaaccgatctattacgttagtaaaacgttgatagacgctgaaacccgttatttagcaatggaaaaactggcactggccgtagtcatgtcagctcaaaaactgagaccatattttcaatcacaccccatcgtagtgatgacgtctcaaccaatcagaaccattctacacagtccaactcaatctggttgacttgcaaaatgggccatataactaagcgagtacgatatagaatatcgcaccagaaccagcttgaaagcacaggtcctagccgactttgtaatcgagctcccgttagcggacctggatggaaccaactctaataagaagtggctcctccacgtcgatggctcctccaaccgacaggcatccagagtaggaatacaactcacctcccccaccgaggcagttatcgaataatcgttccgattcggattcaacgcatcaaacaacgagtctgagtacgaagacttcattgttggcattaagctagctcaaggaatggggatccgcgatatacacgcccatagcgactcccaactcgtcaccagccagttccacggggaatatgaagctaaagacgagtgcatggaagcgtacctcgaactagtcaaaaccttgacccaacagttcgaatcgtttgaattaaccaggatccctagaggagaaaacacctctggatacgccttggcagctctcgcttgcacgtcagatcctttcatcaaaagaattatccctggtcgaaggaatagaacactcgagcatcgacctaacggtcaaacatgctaggatggaaacctacacaacttgcaactttacgcgagtaacctgaagcaccagcggcgcggctagagccctcgcagcagctgagaaggcaggtgcagcggaggaagagtctgagctcggaacccccgaacaacctgcctcatacgaacctgaaccgtacaacgactggagaatcccaatcatcgattacatcgaacgagggatcacacctcccgacaagtgggagaccagaaaactcaaaacccagagcgcaaggtactgcatcatggaagggagacttatgaaacgcaacgtcgcagttccctatatggtgtgtacctacgggcaacaaataaaagacctcatgaaaagcatgcacgaggggcaatgtggtagccactatagtggacgtaccctcgccctcataatcaaaaagcaaggctacttctagctaacaatgctagccgattgcatagctcattcactcaagtgcgataaatgccaacgacatgcacctactcttcatcaacctcccgaagaaatgttctcgatatcttctctatacccatttatgaaatggtccatggatgtcgtacgtcccatggaagcctccggttggaagaagagactaaaaaacctgctggtcgtcactgattattctaccaaatggattgaggctaaagccttccaacaggtaaccgagaaacaagtcgaggacttcctatgggaaaatatcgtatgtcgacatggcataccttatgagatcgtcaccgataacaggactaacctcacctcgggaaaaatcaaagcattttgcgacaagtggaagatccgtcttaccatatccacccccgttacccacaaggtaacggacaggcagaagccgccaacaaagttatacttagcaacatcaagaaaagacttgattcaaaaaaatcaatgtggtccgacgtgctccacggagttctctgggcctaccgaaccacacctcgcaaatcaacgcaagaaacactgttctcccttacttatggtttagaagcagtaatccctgtcgagaccatggtaccaagcgtgagaagaaccgcctgtcctgctaacccggacctgaagacgcaaatattacaggacaacatggacttcatcgacgaacgcagagatcatgcaatgatccgagttcaaaattatcagcaagctgttgaccgctattacaactccaatcaaaatttggagattcgtcatggaagagctcgttttacaaaagtgttcagcaacacgagagagctaaacgacagaaaattgggcaccaactgggaaggtccctaccgaatcaccgaggtggtagtgacggcgtctctacgctcgaaaaactaatcaacggagtacctgaattttacggcgttggaatgctatgcatctcaagaaatatcattaataagtaccctaaaataattgaactacgataaggcttgataccctaaccggctacataggcagttcccccgggtacgtaggccaccatcttaactccttctattttaaaaggtcctttgacaaggaaagcaggcatcacgctctcaatataaccaagacacgatcggacgtgcccctctgtcgaagaactgaggtggctcacctaaacatctatgccattttccaaacctcaaacagtc

SEQ ID NO: 34560 - DNA, 1904 bp, Arabidopsis thaliana landsberg
tgatacatattatgtgaataactcttaaaaatatatgatattccaacaatattccaacttttctataacataaggtaaattatttcttcaccttttcatgtcaacattttacaagagaagcataaaacaaacaaaaaatcctctcggcaaccatatgccttttcaactaatgaggatttgtacttcttttttttttttcttttttcttttttttggcacagagccacaaactaatgaggatttgtacaaaagctaaatgaaaagagctacaaaactaagcccatacacatatatctcatgaagccactccagatcacctgatgctacatcaaactaagaatggttttaattaatatatgggcctcagatgaggaaacaaaagcccattaatttgcttcaatattggtttacccgtttattctacatgccacgtggaagaatatgagtggtcacgatattataaaatgcgtcaaggtaaacaacaaacaacaaactcgttttcgagcaaaaaaactttgaagattgatttgaagaagaaagctctctctcaggttcttgttctcaaccagacattgatttcttcgatttgcatatttcccttcttcgtcttacgaattttacttcctttagcgatggatttgatactacgttgacttttatcttccttttggaaatggcagcgtcgtcttctcttcttcttcttcttcactatcccacctgcaatttctactttgactcttcctcgtaccttaaaagatcgagactttcgagctatagttcgattatctctcggggtctccttgggtgtctctagctttggatctatgaccgttaaaagattctctagcagagacggaagcaggagcaatgacggtaacgaacaatttggagcgttggagcaagaatctttcatcaacaactcatcggagatacggaaagacttggtcaccggcggtgggattgaagccattgttaatcgtctggttagttaatggaaatcttattcatgcacgcaatgtgttcgatgaaatgtttcttcagtatcaatgtgtgtttctttctgaccggttttaattaatgatgacagagcaaatgggttgtgtctgttctatttgggtcaatcattcttttgcgacatgatggtgcagccttgtgggcagtcattggatcgatttcgaattctgctctctctgtagttcttaaacgtatacttaaccaagagaggcctactacaacattgcgatctgatcccgggatgccatcttctcatgctcaatccatttctttcatatctgtctttgctgttttatccggtaagcagcttaagctgttcactactcatcgttcgctatcgtggaactgtttacaacggattcactcgagtcgtgttttctgcagttatggaatggcttggaaccaacggtgtgtctttgtttcttagcggcttaatcctcgcattgggttcatactttgtaagtctgttataacaagtttcacctaattgattcaagcttttcattcatatatgaaatcatttagttgccattgatctcacactctctgcactatcacagatacggttaagggtttctcaaaaactgcacacaagcagtcaagtggtggtgggtgccattgttggttctcttttctgcatcttatggtacacaatgtggaattcgcttcttcgtgaagccttcgaggcatctctattagtgcaaatatctgtatttctgtttgcagctacatttgcgctagctttcgcagcgtacgttgtacttaactggttcaaagacgagagataagcaataccaagctttacttataaagcttaaaattgttatccctcaaattctttcaaaatatcgaaatgaaggattcagagcccgtttgttaaatcaagattt

SEQ ID NO: 34561 - DNA, 662 bp, Arabidopsis thaliana landsberg
  unsure (1)..(662): unsure at all n locations
agtttaaagaattaagaagactaatatgtacgttttggggtcaattttagtttggtaaagaagttttagggtccatttacatgacattatttatatcatttgtcaaaaggcccaaacgtctttttcagttgctctttcttggtgggaactgtttgagctttagttttatgatgaacgtgagccggccggcgattcacgcggttgatgctcttccggtggctcctactgccggagcgatcgatagaccaccagtgaggatgaaggatgtgcaaggcatgcccggaaccaccggcggtctcatcctccgtctctctcagttcgttcccgctcttatctccgtctccgtcatggtcactacctccgacttccgctccgccaccgcattctggtaactgaactctagagttagggatttagaatttgatgaatttagattctggaaactttagggtttttggtagtctctttgataacagttctatggaaatttggtgtttttctcatcgaatttgtttgttgttggtgtgtaattaggggtttgagatgaaattaggcttcttggttttgaaattagtggtttgagttcatgtttaatctgcatagcatcagaatttggatttagttngagcaacttggtttagactatatgaatctgacaagct

SEQ ID NO: 34562 - DNA, 4096 bp, Arabidopsis thaliana landsberg
gatacttggaaccgacctccttaacactcccaagcaccggtcgacccgcgtaacgtcgtggattctgtaacaatccgcaattacgcagctcaaacaaacgcgaacatggctcaaatgcattctcgaatgcccctagcagtgagcaacgctcccgacatagatcatgtgatcgaagaaaccaggcgcaccccgttcacggataggatcgctcgttttcgcctccgagacgtcaggagactccgtttcctggagtacgacggaacgagcgacccaaaggctcatctgagatcctttcgttttgctataacacgagcgtacctgacacacaaagaaaacgaacacaggacgtccgaagccgcctctggagtctcactcaacttcagaacgaatccctgcgatcttacgtcgaaaaattcaaagcaatcaaatcaaagattgcgaacttcgcaacggtctgtggttttcctctaggttcggtgaggaactcactgttaggcaaccggtctctttaaacaatgcccttcacaaagctctccactttgccaaagccgaagaggagctcgctgtgctggccttaagattcaaagaatctaaaacgcaaaacgctccccttgcaactaaaaaacactttaaaaaggaaaaccaaacgcaagggcagcataccctattcgcaatagaagaggcagctgcggacgagagtccagaacttgacctcggaaaatattgcaagtaccacaaaaaagaggacattccaccgaggaatgtcgcgctgttaaaaaattaattgcagctgggggcaaaactaaaaagggttcaaaccccaaagctgaaacctctcctcccgacgaacaagaggaggaacaaacccccaaacaaaagaaatgggaccgaacaccggagggaggtgactctcctccacctgctaggagagagcgcaaagaaaggtcaggaaaactcgatctgggtggcaggacaggaaggtcagtcactacacctcctcccgccccgcaaaagaaaaacacgaggttcccattacgcctctcgaaattctgcagaaacgcaactgatcacctctccccgaaacgcatcgacttcatcatgagaggatctcagcctgatgatgggacctgatcaccagatcaaattctgggaaagtgaaaccaccgacctcgataaacctcacgatgacgctctcgttatccgaatcgacgtaggaaactacgaactctccagtataatgatcgacacgggaagctcagttgacgtattcttctacgaagccttcaaaaaaatggggcacctcgattccgagttacaaggcagaaaaacgccacttatcgggtttgctggagatacgaccttttccctaagaaccatccagctcccaaccgtcgcacgaggagtgagacaactcacgaactttctcgtggtcgataagaaagctcctttcaacgcaatattgggaagaccatggctacacgtcatgaaagccgtccgatcaacctaccaccaatgcattaaattcccttctgacaaagggatagcagttgtatacggcagccaacgcagctcccgaaaatgctatatgggtagctacgagcatatcaaaaaagccgaccctgtagtactaatgatagaggacaaactcgtagaaatgaaaccagtcagatcctatgacccttctcaatgcgaacctcaaaaatcactgataacgcaggtctgtattgacgaatcggatcctaaatggtgcgttgggataggtcaagaccttgactcagcgatacgagaggatctcataacctttctcaaagaaaataaatacagctttgcctggtcaagtgcgaacctccgaggaataagcctcgaggtaacctcacacgaactcaacgtcgatgcgacctaccgacctataaagctgaaacgtcgcaagctaggtcccgaaagggctaaagctgtgcacgatgaggtcgatcggttgctcaagatcggatcgataagagaagtaaaataccctgactggctcgccaacacggtcgtcgttaaaaagaaaaacgagaagtggagagtatgcatcgactttacggacctgaataaggcatgtcctaaagacagtttcccactcgcacatattgaccaactggtcgaagccaccgcgggacacgaactattgtcttttatggacgcattctccgggtacaaccaaatacttatgcgcccagatgaccaagaaaaaacagcttttattactgaccgaggcacctactgttataaagtaatgccctttggtttaaaaaacgctggagctacttaccaaagattggtgaacagaatgttcgctaaccagctaggtaaaacgatagagctctatatcgacgacatgctggtcaagtcagctcgcgaaaaagaccacctcccgcaattaagagaatgcttcaaaatcctaaacaaattcgagatgaagctaaacacagagaaatgctctttcggagttccctcaggagaattcctcggatacctagtaacccagagaggcatcgaggccaatcctaagcagattgcagccttcatcgacatgccatcgctaaaaacggcacgggaggtccaacgactgaccgaccgtatcgccgtcctcaacaggttcatatgcaggtctaccgataaatgcgtccttttctatcagctcctccgaaaggataaaaagttcgattggaatgaggacagcgaacaagccttcaagcatttgaaagcatacctgtccgaaccacccatactcgcaaaacccgaagaaggagaaccgctgtacctgtacacggcagtctcccgaaccgcgataagcggtgtcctggtgagagaagatcacgaaggaaaaaaaccgatctattacgttagtaaaacgttgatagacgctgaaacccgttatccagcaatggaaaaactggcactggccgtagtcatgtcagctcgaaaactgagaccatattttcaatcacaccccatcgtagtgatgacgtcccaaccaatcatgaccattctgcatagtccgacccagtcaggtcgacttgcgaaatgggccatagaattaagcgagcacgatatagaatatcgcaccagaagcagcttgaaagcacaagtcctagccgactttgtaatcgagctcccgatagcggacctggatgaaatcaactccaataagaagtggctcctccatgtcgacggctcttttaaccgacaaagatccggagtaggaatacagctcacctcccccatcggggaagtcatcgaacaatcgttccgactcggattcaacgcatcaaacaacgagtctgagtacgaagccctcattgttggcattaagctagctcaaggaatggggatccgcgatatacacgcatacaacgatgcccaactcgtcaccagccagttccacggggaatacgaagctaaagacgagcgcatggaagcgtacctcgaactagacaaaaccttgacccaacagtttgaattgtttgaattaaccaggatccctagaggagaaaacacctctgcagacgccttggcagctctcgcttccacgtcagatcctttcgccaaaagaattatcccggtcgaaggaatagaacacccgagcatcgacctaacggtcaaacatgctgggatggaaacctcgacaacttgcaacttcacgcgagtaacctgaagcaccaccgccgcagctagagctctcgtagcagccgcggaggtaagtgcagcggagggagagccagagctcgaaacccccgaacaacctgccttgtacgaacctaaaatgtacaacgactggagaatcctaatcatcgattacatcgaacgagggatcacacctcccgacaagtgggaggccagaaaactcaaagcccagagtgcaaggtaccgcatcacggaaaggagacttatgaaacgcaggatcgcaggtccctatatggtgtgtacctacgggcaacaaacaaaagacctcatgaaaagcatgcacgaaggacaatgtggtagccactgtagtggacgtaccctcgcaaacagaatcaaaaagcaaggctacttctggccaacaatgctagcc

SEQ ID NO: 34563 - DNA, 2174 bp, Arabidopsis thaliana landsberg
acgatttttaaaaaaaggagtgatcggacggctgagtttactaaagagtgttttatgaccgttttcattaccagcttaggatccaaacctagattaattttaaattaaactgacccgttgaaaagaattttagaccgttagaatattatttttttaggctcggatcaaaacgaacctgacctctatataaagaaattcgaagtaatattacaatttcattgttaaattaaattcatctttctctcgcactctcatctgtttttcgaattcattacgagagaaagtaatcaaattcaaattcttagaattgttcaatcgagtttttttcttcctcataatttcaattttgattttgtagattggtatcgagagaaggttttgttcatccgattacgagaaaaccacacaaaaaatcaaaaggtaacaaactgatttcactcttcatatctttggttagtttcatttttcgtattcctcagaaatttgatttttgttcggtggtcgtgtgtttctcccattgggttacgagaacaaggcactctgagttttgaaatcgagtcaagaaattgcaagaatcatctctgatttctatcaaattcgttctaattttgatttcgcctttgatgtttggtatcaaggattagattcattaggttttatcacgtcgttgtcaaatctatctgaggatcagaagataaatagttatgggtgatcacactcatatttgtaaccttgttaattataatatcatacttctgtagtttataggttaagattctctgatagaaacttattgcttacatgaggaaaatcatcatataggctaattgttatggttgactagttaactacagtttgtctaaatttattagtatttatgatcttaattcaaattttatggttctttctcttatttgcaattgttgttttggtatcgagtattagattcactaggttttatcatttacagtaaaatctctataaattaataatattgggaccaagaaaattgattaatttagagaggtattaatttaaaaattaataaaattgtacaaattttgtaaattcttacaaaaatttgatataaaatgtagttttttctttataatcaatagtaattacaagtagaaagcaattattaagtttaaaaaacaaatcaaatttttttgatgttataaaatactagaattgaacactacaaataaataataaaaattgaagaaaaaaattactacagtcatattttaatatgatattataatatttattagtatatttatacagttattaatttaaactattgatgtgaccatataattatataagattttcaaacaaaataatatcttattaatatatcgatttgtatcaatttttatattggtcccaactcgggaccggaaaaatttattaatttataaagattattaatttatagaggttttgttgtaggtaacattgttaaatcagataataattgggaggaataaacagaatttagagtgcatgttttgagtaattattgttcttatgatctattaagatcttagctaaataacttctgattctcattaattgtaaagtatgtgtacaatgaactatatatacaagtatcaatatgcacatgtaaatgtcaactatagtatatacaatcaactaactatatacacatatctaatagaatgaatcctcaaacaacacactattaaaccaacttgaatcgtcaaagtaattcactcgtaaacacatcaaatgcttagtgattccacactaaaactcacatgcaaatagaattcaaatactacacactttggacaaaaaaaaataactaaaagtctaaaacgtttaccgaatatttttcaatgttgattctttatggccatggggagaagtcaatctttgtggtatactgtatttactcactactcatacaaaattgcaaattagtctgatttcgattggaattacttgttgaggcggtcaaataacttgacgttcaagagaatacagaacaaaattcatacaaaacagatttcaggattagtggtagtgaaaagaacaatttacattaagaattatttaaaaaatattgtggccaaaggaatcataacccctcatgcccctaaaccacgaacctaaatgatgttggttctttttgtggcgcctttttc

SEQ ID NO: 34564 - DNA, 5401 bp, Arabidopsis thaliana landsberg
  unsure (1)..(5401): unsure at all n locations
gttaactattgtttaatacttggtctagtttattctttcagttgataagtgtctatcttacattcttttgttccaagtactgactatgacagaggattcaacacatattttaagtcgagtctattttacattcttttcttacattctttgttccaagtgtctatcttacattcttttgttacattcttttgttccaagtactcaagggaggctattttaagtcgagtctgccactgaagctagcaaggtaactttcttattagttacaaaggatcaacttaagtacttaacatttacgacttgtaaattatttatgcagcttttcatggctagcagtttcacagacaattccacaactgaatcgatgggcagattttatcctttcacagaagcgaccacaacaaacagttctacctccaccacgctaaagatcttcgataggctttgtctccactctgaaaatattcctaggcaaatccaaggattgtaattggaaattgttcatcattttaacttggttaattggataattttattcctttgttggtcatactagtctgcttttcattttcaatttctcttgtattttaaagtgtttaggaatacttgtcttcgtttcgactttggccacgccaacaagaaacatcttatgtaataacagtcattaagctactgatcgactttccgcttttagctgcctgagttgcgctaccatttccgaaccatcggatgactatatggcccctttaatggccagttggaatctggaggagagaaccgacggcattgggctgggaccagagttggttctctcctgccttgagtcaatgttagtcttaatgggcatttcttggctcttgctcttctttctcgtgtatggaattctttgtagctgcaaaatattctcacggttttttggagatggttcctataggcttcttcttaagaacgtatagcttctctaagagggtgtgaatgtaaatggaccctatgaatagaagaatattacgatgttctctcagaatcacgtatcaatcgggtatataacaatattcagtataatcatttgttgtcccttactggtaattttagtttctactagtttgctccgattacaatacatacattaatatttttcttcaaatgtaaatgtataagaattacgaagttccacataatcttcataaggctatttgtaaaccgtgatgctgcaaagttagaaataaatacaaatgcttcatatatttcaaacttagctgcagcttccaattaatgcaaagcaggctgttgattaaatataaatcgaaaattttaaaactctaacgaatgtgcccgtaaaacctctttgaaatttcagatcggaaattgttgatgaccagaatcgaataaaaacgatttaatttcaggtctcttgagttcaaatctggtctcgattattcaagattcatacatacaaaatatacattcttttgcccgcgtaaaaacaaccttatactttatgtaagacaaaacatatgggcccaagaaggcccaataataatcatttacattggttcgtaagtcagtttgatttttgtttcctcacctccccgatcgtcggaggatgtagaaggtggcggcggcggctctcacctgcttcatcgcagtttagaaatgactagaggagatcgacgtagctccccgagtttcttctccggctcgaagcggagttggctagggtttcacggtggctcacggtcgccacttctattgattccgagctgatagatgatggtggctcgaggtcaatcgtgcgtatgggtttgcggctccgatcatccctgtgacaagaaatcgagcggcggatcccgcagctgaggggtgatgacggctatcgtcggaggtattccgtgctcgctttctcttttcgggagtttcagcgacggcggttcatgtgatggggttaggtcctgcggtaagatacggttcctccggcttgcgggattggtggctccagtctcgggttgttggcggtggctgtgctcgcaaccgtcgaataagggatagcctcgttgagagaatatcggttttatttccggtttaaatctcatcaacaaaccatctctaaaccgggttgtacttatgaattgaaaacatcacgtagttttattatctcttctatctgaaaacagcacgcatgttatagcattttgaatgattttttataagggattatttagaggcctaaggcgcgtaaagaagagctaaaagcgtaacagaagaatctctctcagtcgcaacagtttccggttactccaagatcgccgtcgtgcacctttcttctctcgctctctggttctgaggttagctcgtaaatctcatcgaccatcacttcttctactactcgttccaattaccatagtacgaagacattgctcgagaatctctcagtcgcaacagagtccgactactccaagatcgccgccgtgaacctttcttctctcgctatctgtttctgaggttagttcctatatctcattgatcatctcttcttatcctactctgattcaattacgatagtaagacgacattgctcgcgaatcttggtcaggttgatgtttcttgtaaccgcaactttgcaaaggtttggctatatcgttcctttgatgcttagatgagaaattttatagcttttctggagaattcccaaaggaaatcagtggaaatgagataatttagggattaaactgagtcattgattgttggagatacacttgtgtttggatattcgatttggattgtaaagatcagtttatccagtagtctaacttttcaattgccttccaccgttcagtttttggtttcaggttcgagaaattaataaacatgtcagttctaattgacacggatttagggattgtgtttcttgatctctacacggataaatgccctagcacctgctataattttcttaagctgtgcaagtaagtgttccttttgcctatacctaagaaacatctctatctttaagggttttaacttacttgttttgtcaggataaagtactaccatcagtgccttatccacactgtaaaggatttcatagcaaaaacgggtgatccaacaggcacaggaacgggtggagactcaatatacaagtaagatgacggtttcttaccttctgatgatatgtagactgcttatctattttggtcattctttatactctgtgttgcctagttgtgctgctactgctttatatttccctatgttgaatttccagacttttgggagatgacaatgctaggtttttcagcgatgagattcatgccgaattgaaacattcaaatactggcaccgttgccatggctagttttggagaaaatctcaatgcttcccaggttagtcaaaacgttttgcttgaattaccaagttctttgtgggtccgtggatcaacttttgtggtattgcatgtcttcatctgatttgtctgttttcttttcagttttatatcacactttgtgatgatgtagactgtcttgatgggaaatacactgtaagcaccaattattaatgacccgcctattctttttttttatgtgtatataatataaatctttttcaggtgtttgggaagattaccagcgggtttgaaactttgacttgtatagccaaagcttctgttgatgcgaagaacagaccaaataaagatatcaggatacgacacacatatatacttacagatccatttgatgatcccccacaactggctaagatgataccagacgcttcccccaaggtaaaaccgaaggtcgaggtcacagatgacatgcaacccagagaggattgggatataagggatgcagaatttgactttctggaactaaacgaggccttcgccgaaatggctgccaatcctgttgaagttgcaattaattctgtaagtatcaccgatgtagttgctctcttttgatgataaatcaaatcatgtttaatgctttctgttgcagatgatcataagagatattatggaggatcctgagaatgagggcccccacaatatgcgttcagactttgaacctctcttatcgtaagtgataattttcattgcttccttatccgtatgagaaactcagttctcagttttttggcatatggttgtggtagagtgctccgcctccgggattacgagacaggtgacatcatagagtttgatagtacagaggcaagtgaagaagcgctttctgacattacagagtttgggagtacggaggcaagtgaagcacattttgaggtgaacattgaggaatgcgtattcgaacgtgctttacatatctggcagaaagaagaatggcataatcatacttctaaagcttcaaaatcctcattccttagcaggagccttactctgcacgcataaagaaagtagagaaagaaatcaatgagctcgccgagaagatctgcaatcttggtatgttcgcactcttgttgctgaagttttgggcttgcttggagttagtgacttctgtttagggcatgactaaagtgaagctttcactttcattgcaggtatcaaggagtccgatactggtttagctcctcccaatcaatgggatcttgtatctgataagcaaatgatgcaagaggagcaacctctgcttgtaggctttttattcttttagttctctgaattttgcttcttctctcacggcaacaataaatgtgttttcctatccaggttgcgacatgcacacagataatcagtccaaacactgaagatgcaaagtatgtcgttgatatcaaaaagataggcaaggtaaacaatatccctacgttgtggttgctacacgatcagttctgtgttgtagaaccttttgttgttcggtttattgctgatattagttttgcttcttaactgcagtatgttgttggacttggcgataaagcttctcccactgacatagaagcaggaatgcgtgtggggtatgtacatttcttcagttcaaatcctatttgaggctgtacatttctcatatgaatgaaaacttacgagaacgttatgtctctgatctgtacttgcagagttgatgagaagaaatattagcatatagattcatactaggtgaaagatcgatggtagtgccgaacatgatgaagcgttgaagagacangtgctggaagttacagtgatatcggtggacgaacggcgcagactcaccacatcaccgaggcacatgctgagtttagttattattgggtctcgagctcttctctgtttaacacgtagacttctaaatttactgctgtggtctagcttctcacggaacaactttcttaacagctctgcagtntgtatttgctcgattgcaggctgttgcantgtgaatgcttactgagagaaacttgtgaggcttggaatcga

SEQ ID NO: 34565 - DNA, 610 bp, Arabidopsis thaliana landsberg
gatttagcactctcatcattttggtccagatatccctctcgtttcgccttgcctcgatctgctaccattgcgtcttgagttttcattgtctgctccatgatatcaagtcgtggatgaatgacagcggagtatcgactataaaggtcgcgttggttgtctccgagatcagcatcctcctccaaagcattgtgcaaaggatcaatatcttcaagggcatgtgtctcttcatcaggttcagcaatcactggctgcaaaccaggtcccccattctcctcatcctctgcaatttccgtataacaacaccttgattctgatttggtgggtcagcattaggcatgtcgtcatcatcatcaccttcagaattggaatcaggaccaccattaagaatgagacatgctcctgaatcatgagtgagcatgccacagacttcacaaaaactatgaagacgctcataacgaaacctcaagagcgtgtttacaccggcttgaaattgaaagtaacgttgaaaccggagtggctgatcaacgtcccaactgactttggacccgtacgaactcaaccctaaaagccaattctgcatcaaaatcaatgttcagaacattaccaatag

SEQ ID NO: 34566 - DNA, 1747 bp, Arabidopsis thaliana landsberg
  unsure (1)..(1747): unsure at all n locations
ggttaacaatagtcgggaaaccgaaccgtattggtggatcctatcaaatcaaagcaaaccagaacagataaacgaattgaaccaaatcagagctaaaccgaaaaaatgcaacttgaaattcagctggacctacattgggcctttcggcctgtataaatttccacaatttacggtaatacccttgtaagaaaccctaagtaataatgatgtgctttaaaagcgcacagcctcacttccaaacccttcgtttacagcaaaaaatcgaaaatggttgcctcagccgccgcacgacctcttgtcaccgtccaaggacttgacggtgacatgagcaccgatcaatccaccaccgtcactttaccagacgtcatgactgctccagttcgacctgacattgtcaacttcgtccacgcccaaatctccaacaacagccgtcagccttacgcagtctccaaaaaggccggtcaccaaacctccgccgagtcctggggaaccggaagagccgtgtcacgtatccctcgtgttcctggtggtggaactcaccgtgccggtcaagcagcgttcggaaacatgtgtcgtggtggtcgtatgtttgctccgactaagatctggagacgctggcaccgtcgtgtcaatgtcaacatgaagaggcacgcgattgtttctgcaatcgctgctactgctgttccagctcttgtgatggctcgtggtcacaagatcgagaatgttcctgagatgcctcttgttgttagcgactcagctgaagctgtggagaagacatcagctgcgatcaaggtattgaagcagatcggtgcttacgacgatgcggagaaagctaagaacagtattggaattcgtcctggtaaaggtaaaatgaggaatcgtcgttacatttctaggaaaggtcctcttgttgtgtttggaactgaaggagccaagattgtgaaagcttttaggaatcttcctggtgttgagctttgtcacgttgagaggcttaacttgttgaaattagcccctggtggtcaccttggtaggtttgtgatttggactaagtctgcttttgagaagcttgaatctatctatggctcgtttgagaaaccatcagagaagaagaagggttacgtcttgcctcgtgcgaagatggtgaatgctgatcttgctaggattattaactccgatgaggtacagagtgtggtgaacccgattaagaaggatgcgaagagggctgttcttaannnnnnnnnnnnnnnnnnnnnnnatgtgatgttgaagttgaatccttatgctaagaccgcgaagaggatgtcactgttagctgaagcacagagagttaaggctaagaaggagaagctcgccaagaagaggaaaaccgttaccaaggtaatctcaatacttgacttgttctcttatcaaccgtttttggattgtctttgtttagttactgattacattttgatctgtggttgcatttcatttgacttaacttatattgcaattgttctaattgactgagtttgtgtatgactaagtgtcaggtatttgtttacattctatgttaagctatacaataatctgttcccctctggtttagtctatgactatagtagtctttctttactagatcttaccttttctgttctgaattgtggtctagtagtttgtcttgtaaatctgttgtgaacgattctttgtcttgatattgattttaggttgagctattaagcaattgaatctcttagcactttcttgt

SEQ ID NO: 34567 - DNA, 2352 bp, Arabidopsis thaliana landsberg
  unsure (1)..(2352): unsure at all n locations
tccatttagagaaatagtcggtcaggacgaggactaactttttttgcttcgagggatccataggtataattatatccattgaccatcgcatcaagggatatggcgaggtgattgatgacaagagctcggccggttgatggattgttggcgcgtgcctttgacacttttcacatcgttttgaaaatttttcgcaatccttgaccatcgtcggccagaagaatccgtggcgttttattttaatggctaaagcccttcccccagaatggtttccgcatgagccgccgtgaatttccttcatgatcttacaagtcgcttctccttccacgcaggtcatcaagggtccggataatcgccacttgtaaagtttttcatctactaagacgaaacgcgcacgttgagctttgagtttacgagccttccattttgtccgagggcgacttcccttcggatatatagcttatgatgggttccatccattctgagctgcattcgtctgggtcatcttgatccgcgctgatttgtatggcgaggacgtgctcttcttcgccgagctcaatacttggcttttcaatgaattccactgggatgattcttctcaggttcgggtcggaggttgaggccagagcagctagggcgtcgaccgatgaattttctcctcttggaatccttgttatcttgaattcgtcgaaatgttttgctaacttttgaacatgaatcaggtaggcttccattttttcgtcccgagctgtatattccccgttgaattgattcgcgacgagctgagaatcgcaaaaagcgtggattttttcaatctttaacccccgagctagattaagtccggcaacaagtgcttcgtactcggccacattattggtagcttcgcagtttaacctgaatgactgctcgaaaatttcacccgttggcgaggtgaggcggatgcctacacccgagccttgttttgatgacgagccgtctacatgtaggagccaagttgtgtcgagtgggttttcccgagcttctttggtgggtaattcgacgataaaatcagctaggacctgcgattttgcgcatgttttgttccgatattcgatgtcgtattcactgagctcgattgcccacttagctagacgtcctgattggctttgactgtgtaagatggcgcggagtggcatggatcccattactacgatggaatgggattaataatagggtcgtagcttccgagccgatattacgaccgctaaagcaagtttctccatttgtggatagcgagattccgcgccggtgaaagtctgtgagacgtagaaaatcggcttctgttcgcctctgtcttctcggactagcactccgctgactgcagtatctgatacggcaatatacaaatataatggctctccgattacgggtttggcgaggatgggtggtgttgctaggtacttcttgagttcttgaaaagcttcttcacatcggatcgtccactcgaactttttgtttccccgtagcacatcgtaaaaggctaagcatttgtctgttgatcgagagatgaaacggttgagggccgcaactcttctggttaaacgttgcacctctcgcttgttttgaggcgatgccattcccaacaatgcctcgatttgctttggattcgcctcgatgccgcggtgggtgaccaggtacccgaggaactcgccggnnnnnnnnnnnnnnnnnnnnnnnnnggggttgagtttgacgttgtataagtttagttgtttgaaacattcgcgcaggtgggctatgtggtctttctcttccatggattttaccaacatgtcgtcgatgtagacttccattgttttcccgatctataatgcgaagatcttgttgacgaaacgctggtaagttaccccgacgttcttaagtcagaatgacatcactcggtagcaaaagattccttgctctgtgtagaaagcgtttttttcttggtcctcggggttcatcatgataccgttgtgtcttgacaaaaggccgaatctcctaaaattgtgaagattcttccccgagcagcttccggtttatcgtcatctacctcgcggttgcctctacctctcttcggtccttcagggtttgtcgcgggggctacctgctcgaggttcgccatagcatttacctgctcggttttggccttctctgcttctaagtcttcgatggtcaggcctccaccgattctgccttctaggaatttagctgtaaacttcgcccgagactacaacacctggaggtatgatggccgtagcttttatgcaactcgcagtactcctgctcgtttcctgcgggttggttctttgtccaagtataggattcttggccacgacc

SEQ ID NO: 34568 - DNA, 2925 bp, Arabidopsis thaliana landsberg
cgtccacaaattctaaattactgttagcatataactgacacagaaaacaattactgttacaaaagaattaactatcatttcaccgaaataacgaaggagagtggcattttggtaaataagaacaaagtctctatttataatcgcattttggttgacttgcttcaatcttgaccacagcaaagagaaacaaacaatggcggcttctctgcaatcagcaaaccctacattgtcacgaaccctagcttctccgaacaaaccttcctccttcgccaccttccgatctccatttctcagattcaattcaacatccgtcgcttccaatttcaaacccctagtttctcgagaagcatcctcatcgttcgtcactcgctccgccgccgagccacaagaaagaaaaaccttccatggactgtgctatgtcgtcggcgacaacatcgacactgaccaaatcattcccgcggagtttctcactctcgtcccttcgaatccagaggaatacgagaaactcggttcttacgctttagttggtcttccagcttcttacaaggaacgattcgttcagccaggtgagatgaagacgaagtactcaatcatcattggcggtgaaaactttggatgtggatcgtcacgtgaacatgctccggtttgtttaggagcagcgggagctaaagcagtggtggctcagtcttatgctagaatctttttcaggaactctgttgctactggtgaggtttatcctttggattctgaagttagggtttgtgatgagtgtacaactggtgatgttgcgactgttgagttgagggaaggagatagtattttgatcaatcatacgactgggaaagagtacaagcttaagccgattggtgatgctggaccagtgattgatgctggtggtatatttgcttatgctaggaaagctggaatgattccatctgctgctgcttgattttgacttcaggtatgattctgtaacttgatgatgatgatgatgaggattggtaataggttaggattgagatcgaatttgtggaatagtctaggaagcttgacattgaattgaacgatgcaaaacatagttttcaatggttctagttagagaaagagaacacagtagttgggattctagttttgtgttgtttaaaatgtgttggtttagtttttgtgtgagattgataatgacttgttattctttctcttcgcttaagacttactttatctttccattggttcaatttctagattgtacatctcttgattgtagttgttgggagggtaaaagttatgatgttggctgatcttttccatgctcatatccattaagacttgagtgtccgatagtagaacaatacttcactcttattttgtctctaagactcctttttttttttcctttttttgttctatttgttttgcaggtgtcaatggaagtgcatgagagtcacttcaaggatcttgatccaataataagaatatgtaatgtttccaaaagcttatgaacctaatctatgttttatgaatatatatgactatcggctttagtcttcagtatcagtttcttgtttacatttggatgtatcagctgctaaaaaaatgcatagtttcccatcccatttgaaacgacgttttctctcatgtcttccactaatataatcttctggtcatgagaacagaacaggagctctgtttttctcacacaatgatcgaacacacttttgtcatatagtatagagaaatattaacacttctttttaggcatccgtttctagagtctttgtttcactgtgacctacctaagtatatcaaaacgcacgtttggaattctgaatggcactttcgtaaataggagggtacaaacatttctccttttaaattgttttcatcgtgaactctctcactcactcaacaaagtaaagaaacaatggcgtattctcttcctacatttccccaagccttaccttgctcgtcaaccaaaacttcttcctccttggctaccttccgatctcctttcttaagattcaatggttccacttccttaatcccctcctctatctccatcacttcacgtggcacatcctccccgaccatcatcccacgtgctgccgcctcagaatccgactctaacgaagccctagccaacacaaccttccacggcctctgctatgtcttgaaagacaacatagacaccgaccagatcatcccagcaggagccgcttgcaccttcccatttaaccagcaagagcgtgatgagatcgccgctcacgctctctctggtctaccagacttccacaaaacacggttcattgagccaggagagaacagatcaaagtactcaatcataatcggcggcgaaaactttggttgcggatcgtcacgtgaacatgctccggtctgtcttggagcagctggagctaaagccatagttgctgagtcttacgcaagaatctttttccgtaactcggttgctacaggagaggtgtttccgctcgagtcagaggttagagtctgtgaggagtgtaagacaggagatacggtgacgatcgagctgagtgatagtggtggtttattgactaatcacacgaccggtaaaaactataagctgaagtcgatcggtgatgctggaccggttattgatgctggtggtatttttgcttatgcgaggatgatgggaatgattccatcattagcttaatcctcttccataaccatgatggtgttcttgtatgcataactatttgatgaatatgtgtgttttagagttttctattttcttaacttttttatgtttgtttgatttggtattgttgttgttacctaaagaataagaaatcaaaagcaaaatagaccgacatgttccaagatatgtgaatatggtgagtgtttactaaattatgcgaatattgttgttgcaaccttattttcttc

SEQ ID NO: 34569 - DNA, 620 bp, Arabidopsis thaliana landsberg
tacaattccattttctaaatcaaatctagactaattttagactataacatgttagtaattagctgacatgcgaagtggatgtttgacaaaacgcgcgatcatcaacacgcgagtcaagtcgtgtacctacccgctattgtaaaagagtgaaaacgagaagggtattttcgtaagtgcaagcagtatataatgaattcccgtagactcttccctctccaggagtctttagtgttcgttctcttcttcttctatttttgctgtgtgacgaacgagaagactcttttttgaattttgattcttcttcttctccgtttctttcgctacttcctcagcttcgtcaccgtcgaaaattcttcacgttttcctcggaattttccaattgtcttctccaattctcttgcgatcgttgaagatctgaaaaattcgaaggtatgtttcctgaatctctcgtcttcctttatactccattatctcgaattttacattgatcataatgcttcactgagtttcattcacagtttggcactctgtctatttgagccgatggtcatgatctcagaatggagacttcggatgtggggctgggccagtatgcgtttgattccgtagatctactgagt

SEQ ID NO: 34570 - DNA, 1600 bp, Arabidopsis thaliana landsberg
ataatcacttaagataattgtagtttaccacatatattcgggtagaatttgattatatgagccgtgaataaataaaagcagacttatacattaactttggtgtagaatgcatatgcttagtaaacaagtttccgtatgaacacatttaaaatggacacattattatagatttgataagaataacaaatgcagagaaaggatttcgtgaaggaaagaatgttaataagattttgggttttagttggtatggttttgtctttatatgaaagcatgtttgatgggtctcgttcttttgtgtaagtaatgtattgttattgtagatattgtgttgaataagaaaaagacgcatgatttgttttgactaagttgtgattattgcatcaccatgacacgctttttcattcgaaagaaaattgatgaaagctctacacgtgaattatttgtgttcaagtgtttgtcatgtttcaccattactccacatgttaaagtctaattggacaagttataatggacacaaactatcattgactaattgggttttgagtgttgctatttgaaagcaatgtctacatattgttcttggggcttggagacctataggattattagtttatatataatgaaatcgtgttggatgctttgatagtttatctccataaaaacttgtccagcaagatgtgaccatgtggaaataatttattctcatgtgcgaagtaaagtgctcttagcttagaggttcaacgagacatcaatttatcaaactagaatcaaatggtaccaaacaagctgatcatatggatatgaaattcaatactggaatttgctaatctggtgctccatggaatagaacagagtaacgaggacctcgcttctccgtaaccccgtaatatcgaggttactccgaacaatttttgttctcacggaatctcttccatgtacgctgccatttcttcttctttttcgggagagagttcaaattctcaggtggaatttcaaaatccaaattaagtaagtcgagtaacgtcccacgttacgttatcaccgcctctctcgtcgccttcttgcaacagatctgaaacaaaggagagtaaggaaagaggaactttcgatctgcaaccgatctcatcgtcttcacaagcacaatttcgctaatatgaatcagatatttacacaatctaacaaaactctaaattctattcgtagaattgaagaatcatcgcaaaagctggatcgattggttgtaagattgagggaacaaatccttttcttctttcacctctagatgttattgtctgctacactcaagcttccgccgttagtcacaagcgctgccgctccgaaaccaatcgaataagcctaatcgtcacttaaatctagagaggcttctccgtaaaggaaaatacagaagctacacgattttgacaaagtctctcatgtttgattttgcaaggaaagactgaaagatgaagaaagagatagatagagaaagaaaagaagaagaagagtcgatgaagaagaaaaaaagtagacaatgaagaagacgaagaaaaaaagtacaaatagagaaataatattcattatacttttttgagtaattaaa

SEQ ID NO: 34571 - DNA, 2664 bp, Arabidopsis thaliana landsberg
aaaaaccctttttttatcccaaaggttttttaaagtgttgtttttttttttggagagagcgtaattcaaggattcattcaaacaactcaagaactccttctcatctcctcaaggaaatccagcagacaatccgtgcttggcttgatcccatctgtcgtaatagaccttctggacctcttcggacttctctcttggctacgtggttcgagctcttccaagtctagcttcgttttctgtgtgttcctcttctcttctcttcgggacgcttgtgcaggtaagcctgggttcttttggcttctgttgcaggttttgtctttctttggccttcttttgtttttgagtttgaaggccttatattcggttgttgagcttgtcctttctgttttgggctgtgtttgctgtttttctgttgtttagttgggcctgcgtgcctggtttgtaggcctgttggccatgtatgttttttcttttgaatggaaatttatgaaaaaaaaaaaaaaaaaacattaaaagaatcggttatcgttagacgtcattctagtaattagttttttgacaacgaatctgttacaatgtgacatatttgtttaacaaaattatgaatctgccatcacttaacgtaaaaaatcatccacaaaaaataaatctgtcaaattatatgaaaatctatggttgaataaataaaaattctgtcaatcaaactaaatctgctataatttataaatctgtcataactatcttctaaaaaagtctgtcaaccaaaaaaatctgccataaaaaatttgtcgcagttagaatagtctacgaaataagaataaatcttccataactaaaccatatacttttgtaaaatcgctagaattttttgtaaagagtatttttatatttattttatttttaacatatgagaaaagggtattttagacaagaaaataactaatttaaccccaatattttctaagacattctaatcattaatctcattatttgggttaatcttgttttttcccttgattaaaaaataaacttgtccccacataaactgaaaatctaactcttttgtcccacattggtaacttcaaacatttttttgtatataaaaggcctactcaagagaactggagtccatgtatttagataagctctagcaagagcaatagagtgtgagttttctaggttttttgacgtcaatatggcattataagaaaataggtgatttgcgtgaagatatgccgaggaactatatgcgtcgctaaacagtgtgtaatgagtatgaaaattgtttcaaactaacatgtgatactacttttttgctaatttacttagaaacaatttgtcacaaaatcaaagccgacatgcgtcgaattagcgacgaattagagtggaactggtgaattcttcgcaaaacacatggacatttgcatcgaatttgcatagacatgtttgatgcaatgttgagatgcatttgagacgaatttatagtggtaagtaagaaaggttttaaaatatgctaccgactttgctttctttgtaatattatagctaaactaccacgcaaatacctcgcaaacagatttttatgcttatataaactgatgttgagatgaatacgtgagtaaggaacaacatattttctcttcaaaattaagcatttttcttcaaatctcctattcaaaaattttatatattttagtatattgataaatatgttattaataatgttgttaaaagatataatcataaccaaaatgctttgaattaattatatggacacattttcatactattttatcggaaaacggtctatttccccccccccccctccccgaaaactatcgtatccggccagataaaacccgatctttgacctctatctagatacccatgaaatggaagttaaacgtttatttctccaccaactgaaagtccgagagcttgatgtccctgaatcgtaagttcgagatttaaaaccccatagcattgggctttatctgctaactgtataccaaaccaattatttaaccaaaccaattggcaaaaagtcagagtcttcacctttcaccggaaaatatcaccttttcaaccggcgtatgttcacatgaacggcacaacatcatcaatcaacttcttgacctccgacgatgacgcgtcggcggcggctatggaagctttcattggaacaaaccaccactcatctctctttcctccaccaccacaacaaccacctcagcctcagttcaacgaagatactcttcaacaacgtctccaagctttaatagaatccgccggagaaaactggacttacgctatcttctggcagatctcacacgacttcgattcatccaccggagataacacagtgatcctcggctggggagatggttactacaaaggagaggaagataaagagaagaagaagaacaacaccaacacggcggacgaagagcatcggaaaagagtaatacgtgagcttaactcgttaatctccggcggaattggagtttccgatgaatcaaacgatgaagaagtaacagatactgaatggttcttcttagtttcgatgactcaaagcttcgttaacggtgttggtcccccggagaatcttcttaactctcgtgtgatttggttatcgggtctggtgctttaccgggtcgggttgtgaag

SEQ ID NO: 34572 - DNA, 1237 bp, Arabidopsis thaliana landsberg
tcatggcataactggttgcttcggcaaaaaaaaaaggagagcttcttcgtgtacaaaaagaagagcttcggaagaaagagaaatgttgttttctatgcttcgctgtgtacgaaaagaagggaaggtgttttttcgccttcggctcaaaaagataatttcgtccacatcaaagcacctctcatacattaatggaaggataagagcatattacaaggtatgaacaaaattcattaaagacaagtttagttacatttacaaaagttatctcaaaagtttcttaagtctgtctacagtttactcctatttaatcttcaagggacttcagcttcggcgtcattctttttaaccatcggctttggcttcgtcatcctacatgaattaagttgttgtaagtaaaaatcgagcttgaaggaagaggtaagcacaaggtatgacttcttactggttcaagatggcttcgtgcttcatctccagccttctcccgcccgccttttgtccatatcatttttataaatctgttggagatacttcgggcaaggtcaggcatatcatccaggattgatggagataaggcgaagttgggcctgttaacaacttttccatgttcacagccagccttcatgaaggctgcagcagtccctcgagaagctacccaggcacagaaatcaccatgcccagctatgacttcgtcgagctcgtcaatttcccctcaatgtgttcgaaggtttgcggtaagtcttcagctgagggggtaaatttttcgctgctagctccaaccgaatgaaaaatctttcttagtcgctgaatgcacttgttgctaaattctaggcatttttcttgaagatttgtcagtagttttctcaaatccgaattttgctgagcttcggcttcaagttttgcattgagatcttgtttttctcgttcgaactgctcagactggcggagaagcttcgtgtttagttctgatatttttgcttcagcttccgccagtaagccttcggctgcctggagctcaaagttctttttctcaaaagcatctgactgctcctttattttgttttccaaatttccaattataacttcatgctttttatcttcaagatcttgttgcatttgcaaggctttgctcaatagcatactctacataagcacaaccttcgtcagacatgtttttattagaagcaataaaagttaagggacaagtaattcaccttgaagttggagaaaaataaactac

SEQ ID NO: 34573 - DNA, 614 bp, Arabidopsis thaliana landsberg
ttcccttcgcaggagtaaccagcttcatactgatcacctgctcatcaataggaggcaatctagcacctgtcccatgtgccccaacctgaacgtaaacaaaaatatagactctaaaaacctcaaagcacaagataaagacgaacaactaaaattgtttcagattctccattagtttcacaaccctagacttcacacaagggagagaaacatatgcaaacctgaataataccaccaatctgctgctctctaatggaggcaaagttctgaagagtaagaccatagtctttaatggcgtcaaccaattgctggaccctaatcccagcctgcaccgtaactctcttcttctctttatccacctctagaactttatccataagcgccagattcaccatcccagagcgagacaaaccaatcccattaggcgagagacccgatccaacgggacgaatccttaacttcttcttatgagattccttaacaagagcttctagatcagcaagattttccggttgattaaagttcctagtctggacctcatgagtcccactcccattagagacagtgtgaagatctttacgtaacggagcgtaaccgagattgggcctttttgtgtt

SEQ ID NO: 34574 - DNA, 1601 bp, Arabidopsis thaliana landsberg
atttttaatatttagtcgttatcagtatctagctttgatcaaatgttgtctcagatacttcaaaggtcccgaacttctagttgatttacaggactatgactattccttggacatgtggagcctcggttgcatgtttgctgggatggtgagtaccttgcgaaatgctaggcttccaatgctacatttatatatgatcattcttttcaaaaattttccaaaatatagtatcgtaatgatgaagtgtctaaattatcttttcttgtagatattccgcaaggaacctttcttctatggccatgacaaccaggatcagctcgtcaaaattgccaaggtaatcaaatgcgtgggtaaatgtgggaattttagagggattgagtgttttttcacatctttagagtgtatgtttgattcttgactcaggtactcggaactgatgaattgaatgcatatctgaataagtatcagttagaacttgatactcaactagaggcacttgttgggaggtaagcagaactcacatattctctctatagtataagagtagattaaagcagtgccaatgaccaatcctctttccacagacatagcaggaagccttggtccaaattcatcaacgctgacaataggcatttggtctcacctgaggtttgtttactttgttctctgtattctataagaaacacaaacgcttttgtttgttgccatggtttctctctcgagctgtaactttgttttaaatgtaggcgattgattatttggacaagctgctccggtatgatcatcaagacagattaactgcaaaagaagcaatggtaagtatcatataacgtaactcaaacaagttttcgttctcatagtctgctaaattgtgatggttttatgaattgatgacaggctcatccctatttcgctcaagtcagggcagcagaaagcagcagaatgaggactcaatagagatgtctcggccgatttttgtttcttcttcttctccagtgtgctcttttgttgtttactaatacattttcatatacatagttacatacatggatttcttttacaatgtcgaaattactttaaattatggatttctatatatgagaagttttattactctctccgtttcttaagaatgtatgttttcagatttttgacactctaagagaattatttgcaataacaaatatgacctcattttcttaactaaatccattattaatcttgtttaattatacgttatattgtattaagttgattttgggtgaagtagcccaataaccatataattttaaaaaataaaacacctttctaattcagtaataagtgaatttattagattggtcttttgtgttcttcagagtatctagattccataaccagaagcagcttgtgtttggaaacttcaaaaacagtaaaaatcacaagtaccttgtgatcgcagaggaaaaacagacttcaagtcttgacgattcaagtcttttggatgatgctcaagggttacatgaattctcaccatatttctctatctatcatgaattctctcgtttttggttcattttactcagttacattacataactaaattttgttattagagtaagatg

SEQ ID NO: 34575 - DNA, 623 bp, Arabidopsis thaliana landsberg
ccaacatcatatgaaccaaaacagtgttcaaacgctcaagtacaaaattcgtcgaaacagaaaacaaatcctaatgcctttggttaggttcattgtcaagcatcaaagcttgtacacaggggtgattccaacaaggtggcagcatttccgctctgactatagccgttgcttcgcaaagtaagaaacggctcgtctcatcggccgaaccattcacctgtatagagaaagatcagaacaatgctgaggtttgtttgcctacagtctagtcatccataccaatatggaatgctcacctgacaatacgagttcaatgtggtgaactctacggataagtagtaaaggtacttgcaaagcacattcggtagcaatgtggtgcacgcttcctccaccgtctgcaagtagatagtacacaacaactgttcatcttcttgttaccaagaatatcaacgtacaatctaatgagtatatgtcttacctcagcatactgaagcatgtgaagccctacttcccgttcggctgcatgatccaactctatctttcccgtctgcaataagaaaagtgttagcgcattacacagactttgtaggtgattgagttcatgctgcttaaataccttttttagc

SEQ ID NO: 34576 - DNA, 1070 bp, Arabidopsis thaliana landsberg
agagagtgattctctcaacatcggttagtccacaattttcagtcaaacatattattcatattactactaggattgtttttagggttagggttttgaggtgaggagagcaagtatgcgggagtttcatcctttttgagttactctggattcctcaccctctaacgacgaccaccgtcgccgccgccgccgtctcgacgaatatgctctaccaatgtctgacgaccaattccatcacccgccgcctccttcttcaatgaggcaccgttctacgtcggatgcggcggacggcggctgcggcgagattgttgaggtgcaaggtggtcacattgttcggtctaccggaagaaaagaccgccacagcaaagtctgcacggctaaagggccacgtgaccggcgcgtgagactctctgctcacacggcgattcagttttacgatgttcaagacaggcttggtttcgaccgacctagcaaagccgttgattggcttatcaaaaaggctaagacttccattgacgagctcgctgagcttcctccctggaatcccgccgatgcaattcgcctagccgctcgtaacgctaaacccagaagaaccaccgccaaaacccaaatctctccgtctccgccaccgccgcaacagcaacaacaacaacaacagcttcagttcggtgttggcttcaacggaggaggagcagagcatccgagtaacaacgagtcgagttttctcccgccgtcaatggattcagattcgatagctgacactataaagtcgttttttccggtgattggctcttcaacggaggctccttcgaatcataaccttatgcacaactatcatcatcagcatccgccggatttgctttctcgaactaatagccaaaaccaagatctccgtctctcgctgcaatcgttcccggatggtccaccgtcgcttctgcaccaccaacatcaccaccacacctctgttccgcctccgagcctactctgttctacggacagagcaatccgttagggtttgacacatcgagttgggagcagcagtcgtcggaattcggaaggattcagagtctaca

SEQ ID NO: 34577 - DNA, 1682 bp, Arabidopsis thaliana landsberg
agatcaataggggttgtgtccacttaaagggggtggtccctttttattaacaaactggaagtttatttttcaaactattttcatcgcataagtaggctttttattttctgaacaagtgttttgcctgaggaggcttttaaacctttttaagaccgtgatcccaagagggtttctgcaatatttaagtacggatttgcaaaggccatcttttaaatagcttctttgtttaaccatgtggccaagttgtgagatttataggctgatcaaacctatctcttaaaatgtgagtctgaactcgttttaaatccgcgaattccccaactcgggtttggtcaattcgacttatttactgggcttgggccttaatcgtttttcttatatttaatgaaccgtttgtctttaatgcgacggttgccatttccttccttggaaaataggaaaagcctcacgtctctaaggcaataattgccttttcctcgatttccaaaaatgatttaaaccatttggacacgccccaattattaattttgtggtttcgagaaaaaccgtaactctctataaataagagcacaaacagtcattagtgtcccaaaatatgatctcagaaatttacttggtaaatacttcaagaatggaaaacgaaagagcctccaccgaaagtcctcttgaccccggtaacccactgtttcagtccggcgatggttttgagcccgccggtgtcctctttccacacgcttgtttccacttcccttcgaaagagaaaaaagagacgtacgactttatggacaggtaaaccctctcttgttctctttttcggaacaagttttacttgttttttaaccagttcgtattctaggtcgtcgacaagcatcgctgcctatgcgatgaaaggcagcgcttgggtctcaagaggcaaacgcttgaggcccgaattgcccgtatcgagaggaagataagggccatggagagcgacccttttcaatgggagtggaggaacttcgactgcgtggcaaagatcccgcacatgctccggatgtaccttcgtactcgaggccaagttcctaatcccgtaaatgctccggtcgaggtggtccatccgaaagcgaggaggacgacgaagaagaggacaacaacccctgcaagcgcgtcaagaatgacttcgaggcggacgacaaaaaacttagcgtccactttgaacgccgaaccggcgttgaagaagcctgttcgtgagcctcttccataaatgtcctttgaactcgctacttactttattgttttttatttatttccttttgaacttgctatgggctccggcccatttttaattcatggaaactttcctattttcttgatttcaaaatatttgttttggagatatgttataaatgctgggaagacttgaaggcgtgagtctttccacgaatcactcagatctcgaatggaattgcgatcttaaaatccctataaatttcaactcttaagttctctttatttttcatctaaactttcttttctttttgcagctatggagtttaaccttcgatgtttaaaatccatgccatacttttcgagggtcgggatgatggacgaagacatcccatacgtgcctggaagagggccttcttcacctcgtggcttcttcaggtccctaatccgaactccatgtgcgatgatcaagggac

SEQ ID NO: 34578 - DNA, 8196 bp, Arabidopsis thaliana landsberg
  unsure (1)..(8196): unsure at all n locations
cttcatctccctccttcttttctagtctctaccatcttgatcttcctctctctctcatctcaatccgccttcaatccatcttgatcttctttgttttcctctacgatctccattcttcttcagttcttctttctccatcaacctcgtttaatggtatctctcttaatgttggaatagaatggtcggagtttgtcgcggatcagacggtcggagtttgtctcggctgtcatcgttactgtcactgttaccgtcatcgtcacaaccggagccgccgccgttcagctcatatccttgtcaaacccctaaaatttgtattgggttgagctattaactgtattgggcttttatttgggtttagttaattgtattgggtttgatttgggtttttgttattgggctttgatttgggtttgtaatgatttattttattggatatgggtttgtaaaagaatttttttttctttctaatatctaaaccgaaatagaaaccgaattaaccgaagaaataaaattccggttcatgttcggatcattaattttagccaataaccgagccgaacaaaccgacttccgaaccgacccgacccgaatttcaatttgggtctattcggtggaatttaaaaaaaaacaaattttcttcaaaccgaacaaaccgacccgaataacccggtttagccgaactcccaggcctgcaaataacaggtaaataaaagtgcaatcatggggtgaatacaaataaatctaagaagaatagaagtcctaagaatggattcattgataagggcaactctagggttcatcaggtggctaagaggtgaaaggtagataccctagacgatagattcaagaaccgggtcaatccactctcgtgatagagacccccataactctaccacttcctaatctcaactctcattgatgaaacttagaagagcagggtttaagcaacaatctaccaaagccaataaacaaactagccaatctcttggtctataccttacaaatttctggaattcgtagatcatgcatccatttgaacgtcttttagacgttggacgtctatagtcgaatttcacattagctagcaaaaatcgcataggggccaacgaatccagaagggatctaacctaatcttaacaacctgactaacgtaaagattaccctaatctgatccatcctcaagtaccctaatcactactcaagcaacataatgaagaacacaaacccagaaattactgaaatcataccaaaatgtagatgcaaacaagataaacaactttgctcaaagaacgaaatagattaagagtaattaagattttaagattaaaaacacaaagaaaaactaagagataaaaacttgatcctttgaacaaatcccaaattgatctatttatactaaaatgttgaaaaccctagattcaatagaagacaagagacttgaggcggtttggatgattgctcgatcttgaggatcgagtaaagagggtgctgcaaagtctgcgcctttgcctccatgttccgagtgatcatttggtcgagtagttgcttcttcctctcttattcttatgctcagatgtttggttgagtgggggatgaggaggatcaaaagacgctttgaacgatcaacaagtcttgtagagtaggtttcccttgatcgagtaaactggtcgagtagaggatcgagtagggggtcaagtagagtctgctgcctcctctgtagctgccttgatcaagaaaattggacgagttgattgctgcctcctctacagctgcctggatagagtagaaggtcgagtaaaatccttttaagctcctgctacacctgaaaacacaccaaaacatgcaatatgtatgcaagatgattctaaatgcctaagtgtgcaaaataagccaaaatggtgcaaaatgatatgatacaatgagcagatgcaaagctgaatgatgataaacacacacctaaaatgagtaaaatacagtgctatcacttgccctcaaagaaaacataaaagccgaacccgtggaagaggttttgaaaaacaaaggaactgccaacattctttagtcttttgccatgattattgtaaccaaatccatatgcctagcaagtctaatcaaattctaaccaacatgtaattctccgctagcttacacaacatcctatattccataccaaagcactcaactatatccactaggctatcatcgctgggtctcatcaatcaagttaatgtttaagaaccttctagactcattcctgtattataccatgacaaatcgaccattcattttcttcttctttttttggtattctttctctcccctagacttaatcttttaagagaggaaacaaaggggaactcgcatactggattgacaccctcggcatttttccaacctttgtaattgatcattccaaataatgtataataatggggtcataagaaacattcctacccttatacactattcgaaaattctatcaatctctcatatttttattatatatttttttataaggggagaggaatacttttttttatcacattagtcgacttatcaggtataaacaaacagtcaagtcctatgaacactaaccgttttgatgaggtaaaaggaagagcagtgagattccctccaacctttgtggattatgttgggaatggacgtccttaagtttgttggttggctttctggattttccattagtcggattgatttgaatctacagtacttaagcaatccagacaataaactcgagagatagatcataatttcagacaaaagttttgacttaataaaacaactatctaagtaagaataacacaactgactcataagaaaagaaaagatgaagttagtaactgactcccccaaactaaaataacattttccccaaagttattaagctagggaatcgaaagaaaaatagtcaaaagttaaaagttagagaaacgtgagttgccacctgagagtgttgtcgatcgataccacggtggtgtcgatcgacactctggtcgtttgcacagctttgcgaattcagctcaatgttgtagagcttgggttagtgttttcaaatggatcctccagttagactgttaaatcactaaatcacacatcaatagtttcaacaaagcataagaaaataagtgcaacaagttccaaaacaaataacaaataggttgaaataaaacaaaaacaaagttagaaaacaaagcaagatagggaggatggctaatcttcatgctccgagtgcgggagagtgacgacggcgacgagtgggagcaacacaaccgcagcgagatagtgtagctatggcgttccagacgctcttgaagctgtcgacgacgtacttctgaaagacatgtggctccatcgggataggaggaggagaaggcagctgatatgggagagctgaagaggaagagccacctcgagtacccccagcagttcaatgaactcatccttagtctgtgtaggtgcggatcctgaagctgaacctctatgtctcctggtgcgtggcgcggaatgcagaagggaaggatcgggatgaaaaccaagctcctcatgctcgcctgtaattctgtaagtgcagggcaaggtaactgaatcatatggtgccatgtatcatctctgaagcaccacattaagttgcctttcagccagtgagagttcttccggtaagcctcatccatagtgaatatcgtggtgttgacctcctctccctcaaagttgatgtgaaagtgatgaaatatgggagtgagaagactgccaactctctcatatttctgtcctctacctataaagggcttggtcttgagagaaaccaagtgatgagcgaacacagccccaaagttgacattacggtcaacctgctcaaatccaaggctgtctagaaagaagtcacgaacagcatgatagagcaacaacagcacagaaagtctcatcttgccaggcttcatcttgcacaacagtgtgcttctaatcagcctaaccaaatatcgcaaaaaccgggtgacgaatctctgagtgaactgcgtccttggaatcaaaaattccattaccaaacctgcaccagataacctgagcatccttaaactgtccaggcagggaaactctagtgagatcaaaatcaaaaccatagatgtcacacaaatctctcggtggtagactctatctgacaccgcgaatgaagtagataagagctccttcctgagcattgcgtttcctgtcattcacatagtagaccctaacaaaaaccatgaattgtctaactagctcaggatacaaatcgtactgcctacaacagatggttcccaaacctatatcatctagcagtcctaaaacagatttctctatctgcaaacgctgcattaaaccaaaatccgcaaaccgagtaggcaaaatttctacactcatctaggcattatagaaaaaagtatcataataatcccaatctggagaaaaagggcgattgatatagtcacctttagtgaattctttgttgacatccttctcccaaactctttgagaaggaattctttctgttagtagctttggccatggaaatcaatagataagaggttgaggcgctgcagcaggtagttgcggttgggaagggcggagaccggcggcggtggagcagcggcggaggaggaaggtggaggaacgctcttccttgccttctttttctgcccagtcatgttgcagatcgatgaaatagatacttggggaagaaagaggatgaaattctaatgagattagagctaaaatcacaagaaacggtgaagaatcgaagaatctagagagaaaagagtgatttcggtggtttggaagaaagtgaaatgaagaagatgaaatttttaggttaagtcgacttacctggaaaatgagggtgtcgatcgacaccatagcgtttggtcgacgcgtccttttttttctaaatctaaatcaaaaatcctatacaatcaaaaatcctatacaatcaaaaatcctaagtttaaaatcaaatgaatgaaataataaaaaagagaaatacttaccagtgggttgcctcccactaagcgcttgtttacagtcaatagcttgactctacaattgctcagtcaacaggtgggtcttgaagatccaaaggcttttctactggaatctcggcttcagcctagtagtgtttgactctttgtccattcacggcaaatggttttccattgttgtttttgagaatgactgtttcatatggcctaaccgagtggactgtgtagggacctgtccaacgagaagacaattttccaggaaatattgtcaatctagagtcataaagaagtacctggtcattaggctcaaaggtccgagtgaggatcttcttgtcgtggtaagcttttgtgcgttctttgtagagcttcgagttgtcataggcgtgaattcgtattacaacaagctcattcaactgaataagtctcctttctccagccgatttgatgnnnnnnnnnnnnnnnnnnnnnnnccaagctgctttgtgctcttattacactggaagatgacaagctttaccatatataaaatgaaaaggtgtggtaccaagcggagttttgaaagctgtcatgtaagcccacagcgcatcatctaacttgtaggaccactcctttttcgccttacccactgttttctcaagaatttctttgatttgcatgttggaaacttcaacttggccgctcgtttgtggatggtagggagtagcaacccgatgcttaactccataatgtagaagcaatttcgcaagaatcttgttaatgaaatgcttacctccgtcactaataactatgcgtggcactccaaaacaagggaagatgatagacttgaagagtttcatgacaaccgctgaatcgttcttcggactagctatagcttctacccatttggagacataatccacagctactaggatgtagagatttttgttggaagacgggaacggtcccatgaaatctataccccaacaatcgaagacttcgacttcgagtataaatttatgaggcttctcattacgcttgctgatctttccccttctctgacaagggtcacattgtgatatgaacttctgagcatcccgaaacattgtagaccaccaaaagcctgcttgaagaactttggatactgtcttgaaagttgcaaaatgaccaccatagctagagctgtgacaatgtgatagtatatcaggaacctctgttgcagcaatgcatctcttttaaactccatcagaacaatgcttatagaaataaggttcatcccaataatatcgcctaatctctctaaggaatctctttttgttgtaatctgtgaacttatcaggttccacatctgcagctaggtaattaacaatatcagcataccatgggtaatctttctcgaccgctgtgacggcgcaattctcagttggtgacccatttctcattgattcagaagagtgtcgatcgacaggtgcagtggtgtcgatcgacaccgttcctctgcaactctcattggcgagctgaacgggtttggagcgttgtgtgtggctctgtggtgggattctgatcaatctagggaggtgtgtctgtgctggaggcaatgcaactgataggcttagtaagctctgaaccatccatgccaaactccatctctgaattacaaaccttgagagagatgctccctctcttcacatcaaacctagcaccagctgtaactaaggatgctcttccaaggataaggggatccttgggttccttctcatagtccaggaccacgaaatcagcagggattatggagttaccaaccttaacatgaacatcttcaaggattccttcagggcttcgcttggaacgatccgcgaaaagatgagtgatgctagtaggcctgtagtgagtcatgcctagtctctcagcaacagacttgggcatgaggttgatgcttgatcctagatcacacaaagagcagctgaatctgcttgtggagatagagcaatcaagaacaaagctacctggatctggaatcttctcaattgtctaaccaggagtaatggtgcggatgtactcagctatgtctactctctatgccttctccttcttggccttaggcagcatgattgcactgatatctctggtaagcagcttagcttcatctgaactaattccaatgtcaacaagtcgcttgacatacctgtagagtgaggcggaagatgtctctgaaacatccttaggaagagtatggaggatcttctccattatggctgtgcacttggcagcatgaagcttctgcttagaacaacgcctcctcggataagggataggaggagtgtagacaaactcgggatgcataggtatttgcacctcgcaaggtgcagtccggatccagtatcgatcgacagtagaggggtatcgatcgacaccatcgtaaggaatcgtctccgagaagagcgtcccatagggtgttgatcgacactggaaggtgtcgggttgacaccatctttgaaactgcgagctccaactcgtcttcagtgtctaattcttcccatacatcatctccttctctaatcaagatggcattacagctcttccttgggttagcatcatgattaccaggaagaaagccctcttgtctcttccagcttcttcaagtgagagctcagattgtcgatcttcccattgagatctgtgtagacaacatcaaacttgccattaaactccataacgagctttgtttggctctctaaaatctactcaagcatagattccattattgtctctgatgaggggtggaggggggggagaggggggcttggtaagctgaattaccataggtcctctggaagttacacttaggaaaggtcttctggaaagcaggcattggagtgtagttggaggaaatctggttccctgtaaacttgttgccatgtggttgcccaaacttccagtagactccctctttagattcagtctcaggctcaatagtctcatcctcagctgcaaagtggacatgcttcttccctgtaagcaagttgtgaaccgaatccagcttagcattcacctctgccatctgattgcctgaaatagctcctacaatcttcttcctctcgaagtcagcgttcttagtactgttgctacaagcgagattctctattagagcggtagcatcagctgggtaacgtgtattgaagtgaccatt

SEQ ID NO: 34579 - DNA, 1974 bp, Arabidopsis thaliana landsberg
  unsure (1)..(1974): unsure at all n locations
acacaaaagcaaaggcccagttgaatatttaatagcatcttaatgaaattattctatagaccaaatttcttgtaagattttgtttttaagtgaaaaaataattttaattgtttaatgctttgaaattactgatcatttattgtttatgttaatttcttcctcaaatccatcagattagacattaacaattgaaaataaataatcgtggactttttggttagtcatattctcaaatctgtatacaagtataagagtataaactcaaattttgaaattttaatttttaatttaagaaaaaagtatagatatttgcatgttgaaaacagcatttagtttttagacaaataaaaaatgaacacaagcctgatagctgaaagcataatactgctttaattatttgattaacaaggatacaatgataatagttcctaatttacaaactcgctccaacaaccatggagagtctttggctttaaaaaccatcattacacattatctaaacaagaaaataaagttaaattaaagactctcacataaattacttggcttccctctccagaatcatttttctctttttctccaacattaatataataataataaaattaaaaatcatcatcatctaagaatctgtgcattgcccaccatctgatgagtccccactgttccacaccctttcataaccactcccccgccgccaccaccaccactcgccgccgtcattccacctccaccgatcaaaacccttcctcctcctcctccccctccgccagtaaccaccgcctgctcctccagagactgcacctgtttctttaaaaacttcacataatgaattgcttcatcgagcatcgaagctgtatccatcttcgtcccaccaggaacaagccgttgcaaaatccgaatcctctggcttattctctcccttctatgcctagccgccacgctttgaggatctttagagatcctgacgttcctcctcttcggtggcttaaccgcctcgggatcaatatggatcggttgcatcacggcgatacggaagatcatctctcgcatagctgccatgttcgtgccattattgttgttgttactgttgtttcttttgtcaagaaaaacggaagagtaagctgtgttgggagagatagaagaagggttagtgagtaaaccggaaccgtaccggaaacctggttcgttggtcattgagtgatcggactggtaatgagtggagttaaagagaaaagggtaagtgttgttgtggtcgggagagaagaaagaggaattagggttacaaaactcaggaagcttctccatctgatnnnnnnnnnnnnnnnnnnnnnnnnnnnncatagagaaagatatggagaagctgataaaatgggtatggagagaaactggtgaaaagcttacaagtgaaattttagggttttttcttttggatgattgatgattgatgatgagagaaagagacggtatgtgtgagagaaatggcaatggtactactgtgcccaatcagaactcaagcaatagtatacaacaagaagtggaaggatttatatagcaacttgtggcccatccatcttctttaacttatgctacacatatataataaaaaggaatttcttcccattttcaactctcacatttatgggcatatatgtatatattcaatttcaaaatttgtcttcttgtctaagtgcaaattccacatgcattcggtcattcggactaacttaccaatgtaatatcatatatcaactattataggttattatataccaaggcaagtaaaatattgaggtggattttattcctcatatttgaacttgtatgatgataaaattcccaaacattaatgttaggaaaaatcatttttataaagccataatattttcgtttcggtgcgaatagaagctatgaaaaagtgtgtacacgtaggagttactataagtagaataattgcgtaacataacttggatc

SEQ ID NO: 34580 - DNA, 3519 bp, Arabidopsis thaliana landsberg
cctttttcttttctctttaagtgattcttgatctgtgtttctgttgttaagatttaatctttagctctcttttatcattggggttgggtaaaaatattctctgcttttgctccatcttgctcatctggaaggtattttacttttggcagaataaaaagagtctacaatgagaaacattagttgctgaatcaaatcaatgcaagttggttccaagaaagcatcaatggggaaacagcagcaatcagtaagtgacgctacaagtccaagaccgcctcttgctccatctgagaagaacaatgtaggttctgtcacgcgccgtgctagaacaatggaggttagttcaagatatagatcaccgactcctactaaaactaggagatgtccttcacctattgtcaccaggactgcgccttcttcatcacctgaatcgttcttgaaaagagcggtttcagcggagaggaaccgtggtccttcgacaccaactacgccggttagtgatgtattggtagatttaccggtttcttctaggagactatctactggtcgtttacctgaaagcttatggccttctactatgagaagcctcagtgtttcttttcagtctgattcagtgtcagttcctgttagtaagaaggagaaaccgcttgttacttcttcgactgatcggacattgagaccgtcttcttcgaatatagcgcataagcagcagagtgagacaacctctgtaacaaggaaacaaacgcccgagaggaaaagaagtccattgaagggaaagaatgtgtctcctggtcaatcagagaattcaaaacctatggatggttctcatagtatgttaataccaccacagcatcgatggtctggtcgaattagggggaacagaagctttgatcttggggataaagcggtcaggagagtgtcattgcctttgtccaataaaagctctagacataagaagtcttctagtgacataacaaggttgttttcatgttatgataatggtagactagaagtttcgtcatcaacaacttcagaagatagtagtagcactgagtctctcaagcatttttctacaagttcattacctaggttgcatccaatgtctgctcctggatcacgtactgcttctcctagcagatcctcattttcatcatcatcatcttctaattctcgaggcatgagtccttcaagaggagtgagtcctatgagaggattgagtcctgtgggaaaccgctctttggtgagatcgtctacaccgccatcaagaggtgtaagtccttcccggataagacaaaccgcgcaatccagtagtaccaacacctcggttctcagcttcattgcggatgtcaagaaaggaaaaaaagcgacttacatagaagatgttcatcaactacgcttgctctataatcgatattcgcagtggcagtttgcaaatgctcgagctgagggagtgagctatgttcaaagcttgattgctgaggtaatatactcaaaacagaaaaaatgtgacattgtattaagtgtatcttcctctgtttttaacaatcttgaggttacaggaaactctatacaatgtttggcatgcaatatcagacctaagggatctagtgacaactcaaagaatttgtctccaacagttgaagctagaaatcaagttaagatccatcttaaatgatcaggtatgtcttcactcgcacgcatttgtgtatttgtgttcatcgaagtatcatcctcatgatctaaatgtatttatttgcgcagatggtttgccttgaggattgggcaatggttgagagagaacacattagttctttagctggagccattggagacttagaagcaaatacactccggcttccactagccggaggaacaaaggtacggtttacgttttcccagaaaactagaaaacaagtcgaagagcaagaaccgagttctgattttgtaaaagctcttgtgatcacaggcagacataggatctctgaagttagctatgtcctcagctcttgatgtaatgcagagtatgggatcatccatctggtctttacattcgcagatggaggagatgaacaaacttgttcgggatctcgctgttatagctaaaacagagaattttttgcttgacaaatgtgaaaatctcttggcatcaactgcagtcatggaggtaacaaatcaaaaatacaaatccaagaatctaatgactaatatagttcaacacgttaaaccgagtttttcgtcgtgaaaatacagatagaagagcgtagcctcaagactcatctgatacaaaagaagcaagaagaagaagtaagagatgatgcagagtcttctccattgttgccattaagcaagtttcaatggccttaacaacaacacacttacaaaatgacttgtaaattgctctttttggctcgcattttcttctgccttcttctacttataggaaaaggatgtgaagatcacttagggtttaaacaaaaaatcaatgaagaaaatgcgatttagctatcaacatgtaaacctcaattagtttagtgatcagtgtttatctagtttctgtcatggaagcgaaaaagttgtaactctgttaaaagataatacaattcttttgagaatcaacaaagctgagaagttaaacaaaaaaatagattagagaaaagatctacaaacgaagaacatcattcaaataggactaactctatttgttatacagctcttggctctcttgagacatggtagaaaagtaaatatacaaaactttactttagctctgaaaatcctaccacaagattttaaactcaagaatcgatctgtagaggctctggctcaggctcaggctcaggctcaggctcaggttcaggctcaggctcaggctcagctgttatttctgcagctgaagctgaagcttcgttttccgctgtttttttcttctttcttgtgggtggttcttgtggtttccgaatcatttctttgtttgggaccaagataatgaacatatttctgtccctgaagtttttgctctcttcagttgcaagctacagatccgggacaagtttcagtgatccattcatttcacagtcagtacacattgaaatctgatacatactttctatatataggaaagggtggagaacgaacttattacctcccctatttcggtttgaaaacgtctgaggagttcaatagcgatatttctgaactcgttttctcgtcctttcatgctcacaatcaccttaacctgtgtacattacaagtagtaaacaaaaaattacattcagacgggacagaactctaacagctcgtgaagaatatgggaacaaccttgtcaccatcttgcaagaacttttgggcagcccttagacgaacggaaataatcatgctgatcaatattataactgtcagacaaaaaaaaagcagtaacctttgagaggattcagttctacacaagtcatttgcaacatcacagacaaacaaaaaaaacgaaagccgtaccccattttaagctcctttaaatccatgcgaggt

SEQ ID NO: 34581 - DNA, 908 bp, Arabidopsis thaliana landsberg
gctgtagggttattattgtttactttgatctaccattagattcttatctttaattagcgtctaagctgtggtcatttagctgtatgattatcatttatccatgactgcttaagaacattgctgattacttcgttcattagtatttcttggatttttctagcattaacattgcttgttttctgaatctgtgcgtgtcttttttgaaatcgacagcgcactccaatcaggttgcccatgctccttccagtcaggttgcgcagatcaattgtgggcattgtcggacgaccctcatgtatccttacggtgcatcatccgtcaaatgcgctgtttgtcaattcgtaactaacgttaatgtgattattcctatctattaagccacctctgcatggttgagttaagtatagagatctttctgttggaaattttcatttctgattcattttgcatccttagatgagcaatggaagggtacctctcccaactaaccggccaaatggaacagctcgtcccccctctacatcaactgtgagttatcaaattatgaatttgtaatagttctgtatattcttatggaactggtacttactctgttcatcgatttttcattttaccaacagtcaacaccaccctctcagacccaaaccgttgttgtagaaaaccccatgtcctttgatgaaagcggaaagttggtgagtatttctatcacctgtgttcttcttcttatttaccacattacaggaagatattacaaagtgactgtaacacacaaattgcaggtgagcaatgctgatgttggagggacaactgacaaaaagtaatcaataatgattgagatcttatagattaaatccaaagtcttactttattgctgcgtttggtttgtgcatattacctacgcgaaaataact

SEQ ID NO: 34582 - DNA, 4399 bp, Arabidopsis thaliana landsberg
tggaaccgcatatggtcgcggtatgaccgaagttttagtggttttgagaaagcaaaagggtcttaggactcaggaagaagttaatgataatgaatctttagccattaaggagcaaaaggcgattaaaggttttaacttctgggatgagagaatagttgatggacaatggattaatcaaccgaatgcagaacttattcagaagttctttcgtgtgttggcaatttgccacactgctattcctgatgttaacagtgatacaggagagatcacatatgaagctgagtctccggatgaagcggcttttgttatagcttctcgagagcttggatttaaattctttgtaaggtctcaaactagtatttccttgcatgaaatataccacatgaccggtgaaaaagttgacaggtaaatcacaaaggtcttaatctctctcgcttggtcaaagaattttatcacatttttgttaaaacgtgcagagtatatgagcttcttcatgtcctagagttcagcagttcacggaaaagaatgtcggtgattgtccgaaatcccgaaaaccggttgttgttactttcgaaaggcgcagacaggttaatacttttttctttgtggagaagctcaaatcttgaaatgattgcattttatttcagtggaaatatcttatattgtaatgtgtttcagtgtaatgtttgaaagacttgcgaaacatggacggcaaaatgagagagagacaaaggaacatatcaagaagtatgcagaggcgggtttaagaacattggtgattacctatagagaaatcgatgaagacgagtacatagtatgggaagaagagtttctgaatgccaaaactttggttactgaagatagagatgctttgattgatgcagctgctgataagattgagaaagatttgattcttcttggttctactgcagtggaagacaaactgcagaaaggtgtaagtgacaaaaacgaaatttggttacatttttgagtttcttacttaagcatatcatttgttgcttttttcttgttaaataggttccagattgtattgagaaattatctcaggctggagtcaagatatgggttttaaccggcgataagacagaaaccgcgataaatatcgggtaattttcagactcctcttgatcatctttttttctgtaagaagttcaaatgtattaagctgtgttgttattgacaggtatgcttgtagtctcttaagagaaggcatgaaaaagattttgataactctagattcatctgacattgaagccttggaaaaacaaggagacaaggaggctgttgcaaaggtagtttgtttttcctatggacatagctgctaaaatgacttgtaatgtttgaaatgatgagaatgtttttttttgtttgttgataggcttcttttcatagtattaaaaaacagttacgagaaggaatgtcacaaactgctgcagtaaccgatgattcagctaaagaaaactcggaaatgtttggtttagtgattgatggaaagtctttaacttttgcattggactcaaagctggagaaagagttcttggaacttgcgattcgatgtaattctgttatatgttgtcggtcttcgccaaaacaaaaggcgctcgtaagattcgtgtcaacacttctcgtactgttttcacgttggagtaatctgattaagatatgttttaggttacaagattggtaaagaacgagacaggtagaacaacactggccattggagatggcgcaaatgatgttggaatgcttcaagaagctgatattggagttggtataagtggtgctgaaggaatgcaggtaacagattttcttaggatcttctatttactgttaaaatggtcattagagtattgaagttttctgttacaggcggtgatggctagtgattttgcgattgctcagtttcggtttctggaacgtttgttacttgttcacggtcattggtgttatagacgaatcgcattgatggtaacaagatttaaaaactaaactcattgcaagatttaaacttatttttgattgttttcttgtgatgtttagatatgttacttcttctacaagaacctcgcattcgggttcacgctgttttggtacgaagcttatgcttctttctctggaaaaccggcttataacgattggtacatgtcgtgctacaacgtcttcttcacttcacttcctgttatcgccctaggagtcttcgatcaagacgtctctgctcgcctttgtctcaaggtagatattcttctctatctttcttgatttaaaacaaatcgcttagcgtttctttattttggtttccgcagtatccgttactataccaagaaggagtacaaaacgtattattcagctgggaacggatcctaggatggatgttgaatggagtcataagctcaatgatcattttcttcctcactatcaacacaatggcaactcaagcttttaggaaggatggacaagtagttgattactcggtcctcggagtcacaatgtactcttccgtggtctggactgtgaattgccaaatggcgatttcgataaactacttcacttggatccaacattgcttcatatggggaagcattggggtttggtatttgtttcttgtcatctacggttcccttcctccgacgttttccactaccgcgtttcaggtcttcgtcgagacttcagcaccgagtccgatctattggctcgttcttttccttgtggtgttctctgctctcttgccttatttcacttacagggcgtttcagattaagttcagaccaatgtaccacgatattattgttgaacagaggagaacagaacggacagagaccgcgccaaatgcggttcttggtgagcttccggtgcaagttgagtttactttgcatcatcttagggcaaatttgtctagaagagattcttggaattgattcgtaatttacacaacttagcgtcgtttttttttccttcttctgacttttgtatatatatggaggttcaaaaggagatgagagtgtgactgatttaaaaatgtggttagtttgtagatatttgaagtaagttcagcgataaatggatgctataaatttgataatttaatagataaaaaagttcgacattgtgatatttgaaggaaaatcgaagccaagatatggtgtatgatctaacacaagctcaaaggcaatgcaataaatgtttttaatgcaattggtgtatgaatctcgttttcaataatcaatttggttattttgtttcttatgtgctcatgacaactcacaattttagagatactatttcatcatcggtcaacgttttcttaatgaataggtattttaataacatttgagatttacaactacgcaaaacaatatagaattctatattagtactgaatccggataatgtgacgatatggtctaatggtggaagaaaataatgtaagaaagatcgttgatttgattttgatagcgattacaagtctcttttgcttggctcataagacttcgtcaagaaaagtgataacgacttctagaagtatagcgagttacaacaatttgatcttatgcaagaatttttgttttggatgctacaaattttaatgttttagcttagatcaaaaaagaatattttcttttttttagcttagagaaatatgtttggtatataaaaaaaaatggtgacattgtagaatttgttcatgtagatcaaggaaaatcgaaaccaaagactttgaagtgtatatttattcgacatctacaatggattaagagttatataaggtgtagttgctttatatcaataagggttattcgcggtaatctagtatttgatgaagaaaagttgtacaaagacctatttcatgagctaaaaatggttttgattagcgtaattatactcaactcaagcacgagtttgtgcatataggcaatacaactgttttataaaccgatatataatatgaatctcgttttcaatatacaagtaatcaatttggttatttgtttctaatactcacaattctagagatactatctccaaggtcaacgttttctaaatatataatatttcaaaaatatttgtaaatttacaaatacgcaaaacaatggttaaatggtaaattggtaatccattataaaagctgtacattttatacaggtttaatagttatctatcataaaaactttataataaacgttacaaaaaaatttattattagttttttgtatatcgtataactatttcgtagagtttgcactattctataaaaagcttaccattccaaataacaggtaaagtttttgtatagttttgtgttactaaatagatccaatatttaattaacataacagaattttataacacttataccggatgataatgtgacgctttggtc

SEQ ID NO: 34583 - DNA, 1332 bp, Arabidopsis thaliana landsberg
  unsure (1)..(1332): unsure at all n locations
gtcaactcgggcaaggtcggtcagaatgtacannnnnnnnnnnnnnnnnattcagcagaagaagctacatgggagactgaggattttctaacgtctcgcttccccgactttctgcccaaaggagtcggtatgtaaccccaaaaccccacccccacctgccctttgaatccaattataagaaaaacttagatagcaaggatagtctaagttgagaatttaacttaagaagggcttccttctgaagttgcaaagaggatgacattcgaagagcagttaacaagagaaacttaagtgtaaaggaaaaacaacaccagcacaccttcaagcaccctccaagggactctacctaaatctcgggacgagattcctttaaggggggagggctgtaacaccccaggtgttaccctggctaaaacccactttggcaccagaagctgtgttcacaaggggtaaagacttagggcaccacataagaacttggagatcaagtgctaataaagttgccaatgacataagaagcattactctaatccttgcacacttactaccttggataagaggggagaagaaccctagacctctcctaaaccctatcttccaaaaccctgggtaagaggggaaagagagtgaacaagggtgcaaagtgtgtgtaacttttgcccaaaacctaagcaacattttaaccatcaattaagggagggaaagattgcaaaaagacccctagagaaaccccaattcaaatctccaagtggagagagagctagagctctctatttccctctaagtcacattttagccctaatccaaagaccagtcgtgttcactttgaagatggcgccaaaaccacttgggtctataccaaaaatgtgctataccacttaaggcaccccctggaaaaatttgagaccgagactcagacatttgacagcacttgacatcagttttgtcgctgagtgggcagtgagacaagccagatttggcgcccgtctatctcccgatctagggcgtatcatcccttggaactcacacatgtgagatagccctaggtgccaggaggaggtctgcgccggattcatggcgagattcgcacgtttgcgatctctggagacgtttgaacactggaagaaactcacctccacgtgttcgacgccttctgcccgcgccagagcacactcacgcgcgccctcgcacgccccgcgccgcgcccgagccaaaacccgcgccgtggcccgcgcccgagcttataaagccctcccaggcttcgactacacccttccgcgcaccctccacacctcaccggagttagctcatcgccgtttgcccgtgcgcagc

SEQ ID NO: 34584 - DNA, 1318 bp, Arabidopsis thaliana landsberg
aattaaagcatttttacaaatacatggttatggatgtttatataaaaataagacaattttcaaaatttaacgaatttgtaatttttagatagagaatgggcatacggactaatcaagtgttacttccatatacaattagtttcttacgcagcatgaaagcaaaagttcatcttcatgagaatttcattactccaaagtttcatctttctaaatgagcattagtccaaagattggttcttccaaaccaaaacccaaatttgtttccccactattctatatatgggcattggacagatcgctaaggttactagaaattatttcatatgtccaattctcctagtagatgaggatggagtatgagatgttgaatttatgtttatgcttaaatcattttggataactgtataatccatcgggaatattatcaagaccttaaacgacatttaatttaaattggaggaattaagtgttgttatagttatccacaaaaaatattagctaaaatgttttaaaatttcataaaatcatcacacgttaagtttgataacgtaacattttccgacaccctcttgtttttttcttacaatttggaaattaaccattcttcttaatattctactactcagaaattcatcacttagtactacgtttgaatggtggctttaatatacgagtggctgttggaatctgttctcatctttatgtgaggattcctcgaataggccatttaaggtgaacgttcccttaaatgaaaaagaatgtaattgatggtgacttggtgggttttcattctttatttaatgtccgcttgtggaatctttattctcaataatttacagtacatacatatgtgaacgtgctttaaatttcggccaatagtataggtgtatgaagtacacatataaagagagtaacaaaaacatctggcatgttaagtggacaaaggcacaaagcatttcttgattaaatattcaatatacgtatatctgaaatatgtaactcaagacttcctcctaaaagaagaaaccttgagtgttattcatatcaagaccaatgccatttttggtaagtattagtgggagcatgcttcttttcttatttcaaagtatcatcgaattgactatgtatgatacgacaacaataccatgttcgaacaccacctacttttaaacgaaacaagaggaaatacaaaacaaaacatatgacttttggggtccacccatggagccttcttaagtagcatccttctcccttgtgttgatgagaagaagctcaatcatttcctctagaattctataagatttttttctctataaaa

SEQ ID NO: 34585 - DNA, 720 bp, Arabidopsis thaliana landsberg
  unsure (1)..(720): unsure at all n locations
gaatattaactgcgacagatcaaaaacatgctttaaaagccacgggaaaaagaaagaacgaaagaaagatgctctaaaactagggtttgcttctttctttaaaccgggaaagtaagtaaaaccatgtgctgcttttgacaactgtcatccgctcactgcatgttatttttggaaaaccactaagttttatttttattttggttttagttaatagcataccgtgttgattcgtctggtagcctttttaaaaagtaatgatttttttacctgcaaataactaggttgaaaaagtaataataaaatttgagaagagtttaaatttcgaatttacatcaaaatctatttaaatactaatttttgattagtaatactattactagcacataatttttgataacaaatttacataatctaaccacaaagaacacatcatcacacatcaaatttacatatgtattactcatgcctcatgttcacactaagagatgaaagcaatggcatcttaaataaatacataaaataaaataaaattatgcctaacgatccaaggcattatcgtccttataccatcataagaaaatagtttttcgtaattaccaaaaaaaaaaataataatagtttttcaaaaatggtacctcttattgttgctctttttccctttcttttcggttttattaaaattatatgtacccctttntttctttctaaacctaccaaatt

SEQ ID NO: 34586 - DNA, 997 bp, Arabidopsis thaliana landsberg
  unsure (1)..(997): unsure at all n locations
aaaaattatatgacattggcatctgatgttaagatgcatctaagatcaaatgagcttcttaggatcatagatgcatttgaaacgacatcaaatgagagtaaagcttaagccatggtgtttctacgccaccatctccacgacaatttaaaaaatgaatacgtaacgagagaagatcatgagaatctatgacaatcacttaaagatcggttcgatcatcaaaaaatatgtgattttgccaaaagccaaacctgaatggctaaatctctggttcttggattacaaaagtgttggtgattataattctgtcatgtttggaatcacctctaggatgatattatgtggtgaaaatgtgagcaattacgatatgatggagaaaacgctctccacctttcatcctggaattgtaatccttcaacagtaatattgggccaaaggtacactcgttattccgagttgatgcaagtccttttggttgctgaacaaaataacgaactcgttgtgatgaatcatttatctcgcccacctgatcaactccacttttagaagtgaatnnnnnnnnnnnnnnnnnnnataattggcgaggacccggaccttgtcgaggtcgtggtcgtggtcgtaggagaggtcgtggtcgtggccgaggaaaaggaagaagtttccatcccaattatttcaacacggaaaaaaccaacaaaaataatgttggccgtgttaagaaaaggcatgttgaaagcacttgccacagatgcggcatgaaaagacacttgtaccagacgtgtcatataccaaaatatttagccgatatgtatcaaacctcataaaaggcaaaagaaagggatgttgaaactaatctcatctgtgatgagttggaaccttcctttaaaggccaagatgatgataatcatcttgatatggcagattttctcgattgatcatgacaacgagaaatcaatgtaatatattatagccatatgtataatcatgttatgcatgacaa

SEQ ID NO: 34587 - DNA, 1578 bp, Arabidopsis thaliana landsberg
taagtcgctagcacttatctatcaagatgaagtgtaaaattaaatcgaaattattatgatgaaatagataggtaaactatattacaaactaaatgtaagattgaaatttggtgtaaaaaaaaattaaatatacaaaaaggtggagtaaaattcaaatattatcactaagatggagtatgtagaattaaaatttaggttattttgatgaattagatagtttttttttttttttggacaaaatgaattagatagttaaaatgtatatgaaatagaatgggtaagattaaaaaaaattttaaaacaaaaattactgaactaaacattaggaaaagtgtgtgcattactatttattattcgaatttaaattacaatgatgaaatttatatttatatctatactcgcttatatacgtgggctttagctaatatcataataatggatccatcaaactaggttgaaacaaacttttctaaatcccatttgattcaaacatatatgcctaacacttgttattcttatgcagacctcatccaattcacagcattacacaaatatataatcgattcggtgtttcttgttatctgaatcagtatccattctcaaacagcgcaaactgtgtaaccttaacatgtgtacaaaaagcataaccagatgaatggcaaatcattaataagagagaaaactgagtttacttttaatattacgctaaccaattaagctaattaacattgaattataagagatataaaaaatattgatttagggcctgactggtttaaacgcagcggatgcggttgcggttgcgggagtttgcggaaacaggcggttgcggtttcaagcgttatcaagcgttttgaacgactggttgagcgtttgataatgggtgcgtttgcgggagttttatgactggtaaaccagcgggtgcgatagtaattaaataaaaaataaccaaaataaatataatatattactattaaaagaaaaaaatataatatattattatgataaattgataatattagaaaaattaaacatgcttaataattaaaaccataaataaaacattaaattcaaaaataaataaattttgtaagaaaaagcttaatacttgatgcatgtggtacatcactaaaaaattgcatcaagtagtgtgataaactgtaaataacgttgaactcgcgggttttccggattgcctttatacatatgataaagttctaacaagaaacgggtcatctcgtctgaccaaatgattttctaatcgagaaaacaaatcaaaacatgtattcaatcaaaaaactctaaaaaaaaaaaaaaaacaatgacgatgccatgaaatactcagagaattacactagctaataaatgaatgaaaggatagatcatatttacgtttgattcttgattttgattttgattttcatcagtttaggtggatgctataattgagagaatagggtttcaatatattgattagggttttctgataagaataagatatatagggtttaggtggaagacataattattttaattaattaaaaaaagaaaaaaaagtaacctaaccgctaccgcccg

SEQ ID NO: 34588 - DNA, 2880 bp, Arabidopsis thaliana landsberg
taacaaatctccaaacacaaaatgaaaacaaaaccaaatgaagcatacaccaaagaggaagtacctttccgaacaattctgcattctctacagaattcagtaatcaactcttctgatgagccgaattctcgagtccatacaggggttgatgtcaacggagcactacattaaatataaacaaacgtgcttatgcgctaatctatagcccggattgtaactcttagactagaggataacaatgtacataactaaaaaggagaaaaacgtactcagttgctgttcgaagcagctcataaaccatgtctgtctgtgtacacaaaaggccacattttaaaataaacaaacataagaaaatgagaacaaactgatgaagaagggtttaggagcaagttacttgtaaaacgtttggcaagttaagtctctgagcaagttgtgtagctatagtggacttgccaacacaagctgttccgcaaacgagtatgacaagaggtactctttgatgatgaaatctacaaaaccaaaagtataacattcaaaaaatatgacctttgagaaaagattttccctctagtaaatatcatatactagcgttttactttgtcatcatgttataacgattaatgagctcttgtccataaccacgtcgctccattagctgcaaagttcaaccagtaacagattacttcaatgttcataagacatccaagataagttttagcgaggatctaaagatatgtaccttaaacaaattggtttccaaatcagactgagagctgcaaaaagagacaaagcaaattatgttacaaacaagatcaaggttatgtaaattgaatcgataagaagaagaaggacgaaatgggcatacacatcaagaagactgttgtcaattagaagcttcttgagttcaagagaaatctttatagcttcatgatttgggatctgagtcaaaattggcaaatattgtaaccaatgttattatagaattattcagtgctaaatcatagaatctgaagaagacttagatgtcgaaattgaacaaaccttagtaacagttaacattctacagactaagaatcgagacagaacatagtagtgatctgcgttgtctccaagccatactttgaccttaaaaaagttgccgtcaacaaaaaaaaaaaaaaaatcagaaatttgaaaaagaagaagaatcaaaaaccacccaaatcgaaagaaaaaacgaaccttgacgaaatcgtatttggaagaagcgttacgaggagaagaaggaacagaagagaatgatcggatgttgatatctcgaggttcgtgttcgccgttgttgattattccattagggttttttgttgtcattgaagaagaagacgatgatgattcctctctgtccttcatcttcaaattttgagttttttgagaagaggaaatttcgatctctctgattaataatctgttgatgtttccgacaatctgacttctttaggacatatactctgttttctttttcctttattttttttgcttaacaaataaaattacagtatgattaacatagatagcccaatatcaattatgattagcccatattaagaattgaatccacgtttatttgggccagcccataataattttgttatttgttgattctgcttctttgatttttgatttttgatttttttgggttttgattctttcaaatatatatgttaacaacttccaactaaaacttactactcatacccattagcttacatgaagccatctcaagttcaaagtgaattctatccaaaccatgtgcatcgcgtatgagggtttcaacggtcatccaccagttacataacgttatttatttaggtcacacatttactggtttattggcgggatgagccaggcccgtgcagtagtgcaacgcatgggcgactcgtgaaaacccagatagcaagctaccttagtgggttttctcccttaaaaaatagagttaatatcgtgtaggccgatggcccacatatcagatattaaactgataagaacagatactacacttgatcttagccaaaaggccgagaaaggtatgaattgttcgtggccgtggcctcgttatttatactactacttatttctcacatacaattttaagttaacgatgtgggacttgtgaaaactaaaaaataaggcttctgattgtctcacagtgcggagacattgagaaactcataaaatagctttcgaaacttactaagctgagtcttcttcaagcacatggttagcatcatgctcccttcttcgtctgggttcccagttacaaatcccttcccttcatttaaatgtgaagctctcttgtagtaagcttttccccatccgaaatccatttcgtacgcggtctgtttgattagactgacgatgcagaagtttgtgcgcagctgaagattgtattaccttcaccaggaactaattggtcgagatcaggatgtctctccaagtagtcaatcgctgatctcaagtactcgttgtccattttccttatttctctatgaactctctccactgttcactgaaactctctctgtggaaagcacccaacggtgataccggtcgagcgtgaaagagagtgttcccaatgtatccttgcggaagctttggttgtagtctcggcctcccatcaattattatatgcaacctcgtcgaatgttcttcacttaagtctgcgggtgaaaaaagtgtaaagtgagaaccgttgttcaatgtgtataagaccaagagctgaaccatttctgcattatcttagttcatataatctagagaaagtttaggctttaagcttccagagaaagtgtttccaacaatatcaacatgtaccttcatttcaaaagaagcacaacgccagga

SEQ ID NO: 34589 - DNA, 1031 bp, Arabidopsis thaliana landsberg
  unsure (1)..(1031): unsure at all n locations
ccaggcccagtctggcgcagacttgtccacatacagcctctgctccctcgccctaggctgatgacccagatgcagccacgtggcctactgcgcgtgacgtaagtcagcgggcggactgtacgtaaggccccgggttacgcggcccctgcatttattgcggataaggcgcgccgcgtacccactccgctgacaggcgatgtgccgcctcggcatttagtgagccctgtccattccgcaggcggcgtgcctgtccattccnnnnnnnnnnnnnnnnnnntctccgcatttaatgagacctgtccattccactggcaggcagcgacctgtcagtcccataggcggcatgcctgtccgtaccactggcagactgcacgaccatactgccgcgtgtgctacgccatcattactcgtaccttaccaaggaagctgccaccgcatgtcaacgctgccgtgctgcagacaacatgggcctgaagattaccagacaacactgcattagttgctacaagtattacatccgttatgtccctgggcccgcatgtcggggctcagcacccttgtatgtgcccccctttagctataaaaggggaggcacgcaacgttacaagactcagacacacttagacccagctcaggctcataaggtcatacaagctctcaagctcaatatatcacacagtgtagtagggtattacactccggcggcccaaaccactctaaaccctcgtgtgttcttgtgttcgttcatcgcttagtagacaggcaaaacgcttaggctagggatggcaacggggattttccgtcggggaatggctcccatccccgtccccgcggggaggaaaattcccgcccccgtgaatgctcacaggggagcttttctctcatcccgtcccgtcgggaatttatcccgtgggaacccgcgggaacttgtcccactataactcaatatttaagataatttaattattgtatcaattaatacaatttacaaataagatgaaattacagagcatctctttaagtttagttgt

SEQ ID NO: 34590 - DNA, 614 bp, Arabidopsis thaliana landsberg
ctctctgattcagttattctctctgaccaaacgtttccaaaattttctctcattttctcgggaaaattacaaccaatcctagaaaatttacacagctattttttaactcatccaattcatcccctcctcccctatttctactttaccatccaccagttcttctcaatctttctcttcctgggatcatcatcgttatgatttgattagcagcataacctggaatcaagatggtggatgagcttatgaagaacgatggggcaattttcactagattctatttgctcggagatatttgtgaggaaaagggtatttcactaatcggttatgccagagggggtttttttttgccacggtcaccggatattgttttttaatttcaatgactggtcacgtgattttaaaatccccggtgttagtttcatcggaagaatcaacgatgagaaactcttctccttcgacgacgtcgttaaacatggacagacgaaaagccgcataggtaccctcaggagcggcggccgaatgtgcagatgtgaggcgatgttgaccatgcgcggaggtgaatctaacggttttagccgcgtataaagctccggccgtggataggaaaaaaacct

SEQ ID NO: 34591 - DNA, 720 bp, Arabidopsis thaliana landsberg
gattccgtgtacagcacgtggcagtgtcgggtcatgtgttattggtacaacaggttcagggacgaaccctgggtcggatatgggcaggtataccggatcttgcattcgggtcgacccgatggactcatggatgagatccctactttcggtgctgaccctcttccctccggtgttgacaaggttctttatcttacttaattctttgttattggtgaaaggtgtattggttatagctagattttagaatcttcatgatgttatttttcgatttagaggtttattttataattgaaaatagtaacgtaaaaaagaacaatctcaaatcttgtattatatgattgattgacttgtcaaaataagtaatgcatgttcacgaaatcatgttgaggataaaacttcttctttatcaaaaaaaaattaaaacattatttttaataaacataagcatcttttatgaaattataagatttaaaacaaacatgaaaaaacctcgtaaaacaaatgataatatgtgtaaattttattccaaggatgatgaaattttcttaaagaaatatttacacaaaaaaaacatgtgatgatgaattgtatataatgtgcagggatatgttgttctaaatagaacttgggcctttgttcaatggcttcaacaagcacatatagaggaagagtacgtatcgtttacattctcagtccttgttttcataatactattttgat

SEQ ID NO: 34592 - DNA, 688 bp, Arabidopsis thaliana landsberg
catgtatataattatagagagagccgtgattacaaaaataaaggttcacaaagaccaagaatcaacaatttcatcatttaatgtataaaaactccggaaattcatttatatctgtgtagttacaaacaaatccgaaatatttcagaaactccagcatgaaatcaccacaagaagaataaaactaatcggggaaagagttacagattatacaataacggagcttactcggcgacaaacttgcggacagcaccgaattgatcggagagaagatcgaaaaggtgaggaagcaactccgtgggaaaaacggaatcgtctttttgcaaatcccggcgcatatagcgcaagcgttgcagcttgggaggcaattccgtcgctgatttggcggaattcgcgagatctttaagccttgctcttgaatacgaagccatgattccaaccataacaaataggtttcaaacaatcgataataatattatacactagtgcccagagctttgatggatatgcatctatcttcttcttcttcttcgactatggcatatagggtttagagacaaggacgacgatggagattcgttttatttctgatatgaacactaatgaactgatttccatttttgaggtctttcctaaaggagactgatcaatagttacactacgtcgtttggataaagaacgaaagagtgtt

SEQ ID NO: 34593 - DNA, 2426 bp, Arabidopsis thaliana landsberg
  unsure (1)..(2426): unsure at all n locations
cgcttcaaacgcatcccaaagttttagtattgttttgacaaaacattacataaactaatgggacgaaactgtgttatcctttccggtttcagaactttagctatcaacaccacgattgcatcattcgtacctctggaagtttcccgttggcgaagaagtccaacacaaaccgactaacagaatcacctactatatcccaacaatcctggtaaaaaacaggttgaaagccgtcaggccctggagccttatacttccccatgcttcgaattgatgtctcaacctccatgggattaaaaggcttgctcaaattagacagctcttcctctgtaagtctagtaaaaccgtctggaggtaacctctcaacaacctcatcgacatcctccatagaataaagccgtgagtagtaatcgacagccatcttctcaagttcctgctgttgtgaaacccaactcccatcatccgctttgagcatttcaattctgtttctccgcctcctaacaacagtcatagtatggaaatactttgtgtttcggtctcccaattctacccacttctctcgggatttctgaaaccatagtacttcctcctgctcaaggaccacatcaaattccttaatcaactcctcctccttacttaagagattatcagtttggttaatttccaaaagatcctgaaccaccttaatttcattcatcaaactctccttccttctattcacgtctccaaagacttcacggttccacttttttaatttactctttaaagctgtcaatgctacaggcgtctctacttccgtattccaagaagcctgaagcaaatccttaaaaccactatgggtaagccaagccgcttcaaaccggaagggtctcctcaccggattactccgcacctctggttccagctgaatataaagaggagcgtgatctgaaggtgagtaactgaagcttcctgccactttaaacgtgtttgaggacagcagagcaccctatccaaacgctttgcgacaaaagtactttctacacgacctcgcttccatgtgaatttgttccctttgaatcccatatctatgagagagagctcatttatccattccccgaaagctagtgaatccggcgagagtcctccattcccccccgttctttcgtcgagtctgataattgtattaaaatcacctcctacaatgatcggctcatccacactctgcactatccggctcaaacgactccatagtccacttcttctactaaccgaaggagccgcataaaccgccagcagatggatagccgctaacccattccccactttcgcgtgtatgaattgttccgctgactccacaattgaaacatctcccacctctgatttccacaagagccaaatacctccactctgccctcgcgcttctactctgtaagaattttcaaaacccaaattttgacaaattctgaccgctttctcaccacccgcatgtgtctcaaacaaagcaagaacatctattcgatgtttcttcagcatataccgaattgaatgacggaagttgggtttgttggccccnnnnnnnnnnnnnnnnnnnnnnnnnnnnnnnnnnnnngatgtgaaaagcatgaatgcaaataatacataagatttgtagtatacgacaagagttttaaagcagctctctcttttatactttataaatgttgtcgagatcattgatatgttatgttcattgttatgaatgatatgtattaaactctggtccattgctttactctatgtaatatgatactttatatttccgaaacgttttatttcttccgtctattcgtaaatgtttaattggttcacaattctaattgactactatttagtttttcttttcgtttttgcactaaaaagagtcgcatttgataaaataaaaaaataaataaaaattgggggtcaaaagtagcatttgataattaaagatccaatattgtgatatattaacaaaaaatattgtgatcataatctcaaatgttgcttttttgacatcaatatcaaatgttgatttttttgacatcaatctcaaatgttgctagttctctctctttaggagtattttgtaggaaaaaatagtttttcattcaaagttctattaacataaacgttgaacattatattactacagaaacttcatatcaaagtaccccgaaaaaaaacagatctttacaacaccaaaatccaccgtaaaacagatctctcaaaccagatcaccatgtgggaattacatctttaaaactaaaacgtaatcgcttaagtttagtaatctttgttatgtcatgaggatgggtttaaagtgtaagagtttattcacgtaccgtaaacatactgttgtgtttaatgtatgtccagggagtantctctacgggattcggcaacacttatcttacaatcttataaaaaga

SEQ ID NO: 34594 - DNA, 992 bp, Arabidopsis thaliana landsberg
  unsure (1)..(992): unsure at all n locations
caaagagatatcgatcgttcctaagggggacgcagagactgtgtgtttcaatgtggacgtgtgagtgtgtgtcttcggcattaacatcatattttgcatcatatcatcacatcatcccgcatagcatcacatcatatatcatatcgcaccaatgacacgagttgaataccaagtcgatcttcggaggatgctttatttacgaagtaaagatgagaaatacagtttcgtcagctctattgcgaaagaagggatcctttgtttacgaagcatgggtgttttacgaagtatgcatattttcacgaagcatggaatttttctttacgaagcatgaaaagaagggaaggtattttttcaccgaaggctaaaaaaggtatgtatataaaagtttcatgcatcgcaaagaagtgaattgcaaaatagtgtacatatcagattcaaaactatacacatcaaatattatagacttagtccaacaaatgttatattaatcacctaagaacgtttttacaataactactactcttccttcagaaccttctccgcaacttcgttaagcaatttgttgacgacttcgtcaacaatagattcggctatgttgataatttctattgctttcttcatctccgggtcggccagggggtcgaacggctccgatggaggaggtaattcagctgcgatagaaaaaatcaatcagttcgaagccactaaaacaaacgacgaagctaaaagccattaaatgatacctattcgtctctcgagttctgcaactttctcagccttttttgctgcttctcgagcgtcatgaatatctttttcgctattcttcattatttcgtgggccatttctcggccaccattctcccagatgtcagtgaaaaaatttctgcccagaaagcttgcttcggccgagggatcctttgtgtcaccacggagggcaactttggcctgggcaaggttttacatgattacactcgcctcnccaagatggttga

SEQ ID NO: 34595 - DNA, 906 bp, Arabidopsis thaliana landsberg
aagcatgaatctagttgtgagctcttcgtgtttgcccccctttattatctttcttgacaatcatatttaactagttccttaaacaaacaaatttggttcaaattctatatgaacaaaaggcttcgtatatccttgatcgtgagatatatactatagtgtgttctccatctcttcagcgaggttaatgaccttgatccccttctcatcaaaggccagacatttctccaactgggcagagaccatacgaaagtttatgttggctgcatatctcttactgccattccccttgaggaggactcctaagtccgatgttatcttttatcactttccaacccatttctatttttagaattttagtttttgttgtttgtttttgaacaacaaagttatgtttagttagatcacttagggatgtttttactcatgaataatattgtaagatactcatagacatgatctacaaagaacaagaataaagaaaaggtggagtaatgggtatcagtctcgatatgatgtctaaatacaaggaaaaaacaaattaaccaatcaaataagaacgacgtcgtcttggatcagtgacattgatcttccaatgataatcagtggaacctctaagccttgctttcctcctctcccagttgatctccgttctcctctttttcgtcagcctgcaaaacttttgcaatgcatcgtccatggagtcgtgcactttccaccacctaacgtgagccgcatcactagcgtacaccaactgctcgtccacgtcgtagttgcaatcgtagtccctatagcaaagccatggtttccaacctaagtagtggaacgcgtaggacttagggcgagtcggggcgaagaaggttgtcctggtggtaccatccttgggtgggttcggccaggaattcttcc

SEQ ID NO: 34596 - DNA, 2291 bp, Arabidopsis thaliana landsberg
actcaactatatccattaggctctcatcgctgggtctcatcaatcaagctaatgttcaagaaccttttagactctttcctgtactataccataacaaattgaccatacgcctttttttttggtatactttctctccccagatttatactttttaaagagtgaacaaaggtgtactcgcatactagattgacaccctcagcatttccaacctttttaattgatcattcctaagtaatgtataataatggggtcatgggaaacattcctacccctatacagtacctggaaatcatatcaatctcttgtttatttattttttatttaatcaagggagaggaatacttttttttttatctaacacattgtcagtttattaggtatgaacaagcagtcaagtcctatgtacactaaccgttttgatgaggtaaaaggaagagcagtgagattagctccagcctctgtggattatgttgggaatggatgtccttaagtttgttgattggctttctggattttccattagtcggattgatttgaatctgcagtacttaaaccatccatgcaataaactcgagagatagatcataatttcagacaaaagttttgactcaataaaacgactatctaagttagaatgacacaactgactcataagaaaagaaaagatgaagttagtaactgactcccccagacttagataacactgtccccatagttattaaactagaggaatcgaaagaaaaataatcaaaagttaaaagttagagaaacgtgagttgccacctgagagtggtgtcgatcgataccatggttgtgtcgatcgacactctggtcattttgcttagctttgcgaattcaggtcattgttgtagagccttggttagtgttttcacatggatcctccagttagactgttgaatcactaaaacacacatcaacaggtccaacaaagcataggaaaataagtgcaacaagtttcaaaacaaataacaaatagtctgaaataaagcaaaaacaaagtcagaaaacaaagcaagataaggaggatggctagtcctcatgctctgagccggaggtgggtgcgggagagcgacgacggcgacgagtggaagcaacacaaccgtatcgagagagtgtagctatggcgttccagacgctcttgaagttgtcgacgatgtattgctgaaagacatatggctccatcgggataggaggaggagaaggcagctcatatgggagagctgaagaggaagatccaactcgaggacccccagcagggtcgataaacttatcctcagtctgagttggtgcggatcctgaagctgaacctctctatctcctagagcgtggcgcgaaatgcagaagggaaggatcgagatgaaaactaatctcctcatgctctcctataatctctgaaagcgcagggcaaggtaactaaatcatatgttgccatgtatcatctctgaagcaccatagtaagttgcctttaagccagtgagagttcttcaaataagtctcatccatattgaatctcatggtgttgaccttctctccttcaaagctgatgctaaaatgctgaaatataggagtgagaagactgccaactatcttagagtttttccttttacccgtaaagggcttgttcttgagagaaaccagtgatgagcaaagacaacgccaaagttgacatcacggttaacctcctcaaatccgaggctatttggaatagcatgataaagtaacaacaactcagaaagtctcatcttgccaggctccatcttgcataagagtgtgctgttgatcagcgtaaccaaatatcgcaaaacagggtgacgaatcactgagtgtactgcgtccttggaatcataaattccattaccaaacctgctctagaaaacctgagcatccttaaactgtccaggcagtgaaactccagtgagatcaatgtcaaagccataaatgtcgcataatgctctgagtggtagactgtatctgacaccgcggatgaagaagattagagctccttcctgagcattgcgtttcttttcattcacatagtagaccctaacagaagccatgaattatctaactaggtcaggatacaaatcgtactgcctacaagagatggttcccaaacctatgtcatctagtagtcctaaaacagatttctctatctgcaaacgttgcatcaaaccgaaatccgcaacactagtaggcaaaatttctacactcatccaagcatataaaaacagagtatcataatcattttcctaaactctttgacaaggaat

SEQ ID NO: 34597 - DNA, 1120 bp, Arabidopsis thaliana landsberg
gaccgtgtttaaatcattcaatgatagaaattgtccaaattgcaaaagatttgaggaagaagaaatcattgtacacctcaaaatacattgttgtacctgtagaaataaacccattgaattggaaatcgcctcccaatctggtgtcaaaacctctgatcctgcagcgaggaagagtttcgacaaacctaaaccaacaagcccagcaacatagtggcagtattcatcgtagtcatcaacagtttctacctgtgtataatagtgaaaactggatcaactggatcggtaaacaaatgatttcatttctttacaaaacttataaataagttttggtactttcaatacaattactacttgtcatatcatagaagcatcacatgaggcattccaatatttatgacttatgaaaagattaagcatgacagaattctaactgaaacagagacctcagtccagctcaagacattttgtcaccataactcaaaaacatatccaactacgaaaactgctctgtatcacatacctccttgcaaatgaacttggccattcctgcacccattcttttagttatatcttcaatagcctcttgataccttttttgtatatataagttagtaaaacaaaacataaaattagtatcaccaaattcagtagatcaatcaataaatgagcaagaacatttataaaaaacagaacagaatttgtatatagcaaattaaccctttttcaagtttcagaaaagctgcagaaacatggtgaaattggtccattagaagtttatactcttttgtaccacctaaaattgaatgaagagtaattaagttaaaagaaaagaatttcatctgaaaggttaagatgtgaaaagtctcttcttattacttacatgaaaaatgccagtcaccatcgtatatatgacggtggaaagctatcagaattggaactttgatctccactggtacgcttgtgtcatcctctgtagtagcaaaaatatggagaagatgatactaactttttctatcatcaagaattaaaaaaacaaaagacttggagaagaagacttatcaaatcaaaggtaatatatggatactatagttatgaagcactaaccaacagtatcaagagc

SEQ ID NO: 34598 - DNA, 408 bp, Arabidopsis thaliana landsberg
gtgttagctaaaccggacaacacataatctttcgaggtttattgcgatgcttcaggtactggatcgggatgtgtcttgatgcaagataatagagtcattgcttacgcctcccgagcactcaggccccatgagcaaaactaccccacacatgatttggaattggatgccgtagttcatgctctcaagatttggagacattacttgatgggagctcattgtaatatctatattgatcacaagagtctcaaatatatcttcacttaggttgatcttaatatgaggcagagaagatggttggaattaatcaaggactatgatttggaagtgcattaccatccgggcaaggcaaatgttgtggcagatgccttaagccgaaaggcccagtgcaactgtgtaacaatggactac

SEQ ID NO: 34599 - DNA, 306 bp, Arabidopsis thaliana landsberg
ttcttcaccaacgagacttccaaacttgttcctccgccccgccctcggcaaacgaaaaaccgccatcagcaatccagtccacgatgtaggggggttcgcctcacgtcatcgtttccgagccacatcccttgacgtagcatcttcgacttcacgctgctacccgtaccaagagtccgcatatcggtcgacgagtaggacagagcttcaaccaataagcaacgtcgtgatagaaacaaagcttcaatagcggcgcctttagaaggtgagtgtcgtcggggacggcaccgtcgcatgtgcaggatggcc

SEQ ID NO: 34600 - DNA, 3189 bp, Arabidopsis thaliana landsberg
  unsure (1)..(3189): unsure at all n locations
ggcaaagacttaagacggtacaacatgctcatacttacaaaattcagggtgaccactatgccctataaacagaagcaatcgacttaagtccgcagcgatttaaggcgatatgacgtgcttacaactgctcatatagggatgacttctatatcccgcaaacaagtttcaaaaaccaacacacagcctttttactgctacaaatttatgcactgctgaactctaaaacagtaggagaatagcaatatcattcaaatgctaaactggtgtcctctaacaaatatatgatcgtgctaaccgcgcgctcaaagcacgcaaaacatccctctatttcgtgatgtctttctcaggagcaaccgacgaggaggggcgacttgaggaatcaagcgcacgattcacatcagcccttatatcttcaggaacgactacaccaggtctcctcatcaagattcgtcccgctcgaatggccttatccatggccctgtcgcgctgagttttaaaagcgacagcagcttcttcagcaactttaacagcctgctgagcagtttctaactcctgagcaatggatttcttagaagcccggagtcccttgatggtggcgtccttcaccgatagcaactgtgtaaggcgggctacttcatccgaggattcttgcagttgacggcgctgattgtcaagctcctccatcgtaaaacggcggctcctctccaagatggtcagcgagttgctggaatctcggtacaatctgtccaagttatcgcgagaagcnnnnnnnnnnnnnnnnnnctcctacaatcaaaaatcaacccattcagaatccaaaagcatgataaggcgaacgacggtttcgtgagttaccttttcagagtcaagctgagcatgaagagaagaactcagagcgttggcgtcatccaaagccgcagagacctgactcaattcaatctggctctgagaatacttatcctcgaagtcagcgcaccgtcgagccatctcagcttgatcttgggaattttttttcttcaagaactttaatctgccgagtcatccctatcaagaggtattcaaatgaaataggtcagaaggtaaaacagtccacgaacaaaggcaaagaagaagaagaaaaagggcactaaccagcgttagttgcctccaactcggatacacgacgatgaagcgacactggattccaacgctcaagagacgaagcgacttctgggatgaaagcaccctgtgatctcagctggctagccatcccatccaccaaagcctgataaaaagaacagatgaacataatgacaaaagctcatgcaacgcaaagatcaagctaaaagtacagcacagtacctggagattggaaaagaacgaagggatcccaaatcaggagaaatcagctgataatcagatgccagaccaccactcgaagcagcttgcaatagaccagtagaaacgagctcagtgccttcagcagagcctaacaccagaccagtggggatgctgccctctaaagcgaccccctgatctggagtttgagccaccaccatgccgccagagtgtggaggtgaacccacgtgaacgtccatagaagtgcaggaaggagaccctgctcatgcaaccctcgggggctgggtcaaggttggcactgcccacttgagccgggtcacccccggcaacaccctcgggggctgggtagtggcctacgctcctcacctgagctgagtcctccccggcgacaccctcgggggctgggcacatgtcagcactattcaaaggatccaagctctctgccgtgaccacctctaaggtcgacgggccttcagctacctccgcaggatcaggacgatccaagtcatcattccggccctcgagatcgtgctctaaggtcgacgaggcacgggacgacctcaacccagcatctggcacgcccgcacaagtttttgttgcatcaacgtctgcaggttccaacagcaagttctcagggaccatatcctctagagcttgatcaaaattggtcatggacagttcttgcagaccaataagagcagacaaggcaggagaaggaaccccactactaccaccactagcgacgagctgccgactgttcttccgagttaatggagtttcattctcttcctcctcatcttccacagcagcagcgcatacagcatcctcattggggtcagcagcagatggagcacacccattgggatcagcaacagatggagcacaccattggggtcagcgtcagtaaattcaggcacaggcacttcttcagcagcaggaaccgaagtaccaacgtcccgatccaaactagatactcgccggaggcgtctctttttctttttctgctcatctgcggaaggatcaagttgattggctcggcaagggcatctcgagcgagtactggcaggcttctggatatccaaggttgtatcagtttctaggagaggcgccaccaccaacgtcccagcaggagcagcatcagaagagtccttagccagcaaatcaagcatagcacttatttctgcgtcactaggatccaaaggtacctcaaagtggacgtgccgttcatcatcaggaatttccccaagtgaggcaaccaaggcgttaacttcttcagcatacgcactctaaggcccaagctgccatcaacaacaggtggattcaaaacaaaatgagtgaaggctttggaaggaggcaggttccaggccgagtatgccactggagcaccaacatttgacaccttacccctgaggatcattttaagtcggcttaccaagtctacagaaggaattctcctattggtaaccccagttgagtcggctagccctcgatacatatatgctggataggccctgtctttcagtggctgaatgttcttgaaaacaaaatcggcaaccacagcctcggcagtcagacccttctccttcaacaatgcaacctcagcaagcagacccccggcctcagctacctccaggtctgtgggtgattcagtccaacttggagtgcgcacatctggctgtctccctgaccgaggggggagggagttccagtgattctccatgataatccattccaggcgccatcctttgatgctgtccttgagtgggatgtcaaggtactcggttttcctcccacgacgcatctccaaactcgcacccccatgagctggtgctgtccctcggccatcccagg

SEQ ID NO: 34601 - DNA, 2237 bp, Arabidopsis thaliana landsberg
ggtttttggaaatgttctttaacaggtatctttagctttcctgctcctactaaattctgatactcggctagaccttcaggatcagccctcatatacgtccaccaatagtctgtttttatataagttcatcacagtcagattttatcacattaaccatttctttcccactcaaaagctcaatgagacaggtcttattatcagaatagttacttcaaaatcaaagagagagagagagagagagtaatgcaggatatatatatatatatcatatacctattccatgagaatactgatattgtatctttttcttcatcaagagcgatgttgcaaggggaagcccaaccacaaaaccgtatttatcagtcaacgatgcagcctcaccctttaacagataaattcaaaagagggaaaaaataaatcactgttgttaaaacaaaatccaagaccaaccaaggtcactgcagcttgtaaagcagaaacacaagaaatgttatatacctggagagtcatatagtttccacccttccttaagaagttaatgcctattctctccgtttcaggcccaccaatagtatctaacacggcatcaaattttccttttaccgccaactcaatgtcctgtacatgaaacagattcagattcaagaatcagaacaagatcataatggctctactttgggtgagcagataaataaacagctggtgtcattacctcggttgtgtagtcaacagcttgctcggccccagctgcaagtattctgtctttagtctgaccaacacaagaggctgtaacatgacacccagatgctaccgcaagctggattgcagaaaaacctactgctcctcctcctccaaagactaatagtctttgtctgcaaataaaaaggattttaagattatgctattgagttcatagtagttcacaaaaaacacgaaaagcatttgtgtgaatgttgaaaggtgaattagtatcaacttcttgccacatgaataatagtttctcaaaatcatacccttcagttatccttgcattactcttcaaagcacgccaagcagtcaaagctgcaaaaggaatggcacttgcttcctacaagagacagacacaagaatagctgaaatcacttaaccaaaaaacaataaaaaaaaaaaaggtagagaggttaatagggtatctaaatctttctacttaccacatgtgaaattgatgagggctgtgtcgtgagttcgtcttccgaaagacttccatagtcagtataagtacctcttaacgccgtctgatgcaacgcaccaaaaacttcttgtcctactttaagtgactttactgaagtcccaattgccgcaacttcaccactgacatcacgtccaactataataggtagatgcggttggaatacagaacgtccatatccagctcgtatctgaaaacaaacacatttctcatcttaacacttgatgccatatcagcaaaatgatcatgaaaaaaacaatttcactactcttcaaagtatcgaagacaagattttgatttgaaatctaaagaagtgaagcagcaagcagcaaacattctggatattatcatcaacgtgagattaaactcctagaacatatgcaagagatccaagctaaccgatcacgccaatcttaattcccaaataaagcaatctccgaagatatctaatgccactcataaaatgaaatcaaaacggatcaagcagattaacactcactctgcaatcaagaggattaacggagacagctttcgccttgacaagaacctcatttggattcagattcggcaccggaacattctcccggagctcaaaaacctccggaccaccaaagcggggcaaaatcacagcacggcaaccggtaaagacgctccgaagagaatttaacctcgccggccggaaaaccaatccagcaccggaattaccgcgcaatgatctcatcactcgcatttctccgtcgtctaagaaatcaatctactcgtccttttcttcttcttcttcgttgatgcgagaatctgcttgcttctgttttttaggttttcttgtttacacagaaacggaaattgaagacgtggcagcatttgcgtcgcagagcggctttgtttacttgactgtacatgcaacctctagagttttatgtaattaaccggtttactccaaaccaaaccgatttgatcagtacagtatatgtgatgtgagaagtagaggttttggtttctacaatgttca

SEQ ID NO: 34602 - DNA, 1389 bp, Arabidopsis thaliana landsberg
tattcgtagttatatataataatcagaagctatccaataatgtattgttatatccactaactattttatcttatctataactgataattaggaattacataagcttggagctcgaaaaattggagtgtttagtgcagtccccgttggttgtgttccattacaaagaacagtttttggagggttttttacaagaggatgtaatgaacctctaaacaacatggcaaaacaattcaacgcaagactttctccagcattagattctttagataaagagttggatggtgttatcctttacattaatgtttatgatactctttttgacatgatccaacaccctaaaaaatacggtaagttcatctaacagatttatctatatagaaactatatattataattcatttttattgtcgaactaaattttattccaattatctcaattcttttaggttttgacgtagccggtcaacgatggtgcggtcaaagactgctcacaatatcctatttatgtaactcattgaacccatgttacgggttctaattcttcatcttacatattttgggatcgctatcatccatctcacagagcttatcaagctctcgtcgacaatttactcgatcaatattagagcaaagtctattgatgttgaggaatcaaagaaaattgtatgtccttgcttcagatttatttttcattcttaacccatgtctcactatgtattcatatcttaaatcttaaatactcatactttccctataataaaatgtggagcgataaatatcaatattgttcatacagaattataccatcacatacaggaatttcatacgttttacactattttattccgtttgttacctactagtgtaataatacctaaaatagctacctatgtgactttcataagacaataaaagaaactattcgacatagtaggactagtactatattgaataaaacttttatgtcatactcatgcatatctcacttgcaacaagaaacacatgaatccaaaatccatgattccttcttcacctttcctttaatttttcaatagtcataacagttttaactaacacttgagcgaacgttgtgaaaaaaaaacgcacccacacgtgtcgctatcttacccattctatcacaaaaccaacggtcataataaattcgaccacagagtagtcgctctcacatagtatcaaatcttggagcatcaaccattttataaccgacacgtggcgtaatcgtcgctcccttcttcaccggccacacaacgtggcctaatcatttgtatttaattttaattatctgcatgttttcattttaagttatgatttgaatgaactggaaatgcgaactcttcgcggaattggaattttaaaagcaattcgggg

SEQ ID NO: 34603 - DNA, 1249 bp, Arabidopsis thaliana landsberg
acggagcgttggtggtcttgtcttttcaagtttcttcttcaactgacactatttctactaatcaacctctttcaggatttgagaccattgtttccagcggtgatatattcgaactcggtctcttcaccccaactccagatacttatgatcatagaaactactacataggaatgtggtacaggcacgtctctccacagactattgtttgggtcgcaaaccgagaatctcctcttggaggggatgcttctacttacttattaaagatcttagatggaaacttaattctccatgataatatcagcgccacccgtaaatctcatacggaggggacatctcggagatcccctcaaaagatctcagaaggaaacttacttttccatgaaacagtttggtcgaccggtgttaactctagtatgagcaaggatgttcaagctgttctgcttgatagtggtaatctagtattgagagatgggcctaattcttctgcagctgtgttgtgccagagttttgatcatccctcggatacttggcttcctggcggtaaaatcagattagtaagccaacttttctcttcttgggagagcttgatagatccatcaccgggtcgatactctctcgagtttgaccctaaactacactcactcgtcacggtttggaatagatcaaagtcatattggtccagtgggccattgtatgattggcttcaaagcctcaagccatttccagaattgcaaggtactaagaaaagtatagcattgaatatggatgagtcttacatcaccttttcagtagatccccagagcagatatcgtttggtcatgggtgtttcggggcagttcatgctgcaagtttggcacgttgacttacagtcgtggcgtgtgatattgtctcaacctgataatagatgtgacgtttataacagttgtggatcatttgggatttgcaatgaaaaccgagagcctcccccatgtagatgtgttcttggtttcaaacgagaattttcccaaggatctgatgactcgaatgattactctggtggttgtaaaagggaaacataccttcattgttataagcgaaatgacgagtttcttcctattgaaaacatgaaattagccactgatccaacaacagcatcggtcttgacatccgggacttttacgacgtgtgcctcacgttgcgtagctgattgaactagacaagcgtacgcaaatgatggaaacaagtgtttggtgtggacaaaggatgctat

SEQ ID NO: 34604 - DNA, 1158 bp, Arabidopsis thaliana landsberg
ctatttacttaatgtgcttttagaaaactaagtaacaaactacaagctgaaaatgattcatctttcgtcctaaaaacaatgaagtttattattaaatctatacatcactaaagatttagatagttaaatgaggagcttagtcaagattcctttcttcatcatgattacgttagttataactattaaaatttatgtcacatgcgacggatctaatattagggaagacccaaaataaaaagaaaaagttccaataacagtccctattgtaatgtcatcgctcatcggtctttaattgacgttggtcttagttaacaccaaaacgtaaatgttaaggtttatgatttcgagctcaagaatatttggtaacaaagagactgactcatattttatatatattatttggttccaatatacgtactaatactattctcctatatatttcgttaggttccaatataccagaagaaaaatcttattgagttgcgtcaatcagatgggccttaactctctaaacccataaggtaattaaagctctcaagttcatgtaccttggagtttgttaaaatctcattttctcgaaaattccttgaaataatacttttgttcaacacatgttaaaaagaatgtaaccataatatgaaaagaatttaatgcacaattacacagcaaaatgtggggtactgcatttacaaaagatgaagtatggaaaccatgtaagagtatcatatactttctctgccgataacaagtgctagaacttttttttttctttttttcttatcttcttattatccttgccaataaaattgataatcaatgtcatgtaatgaaagaaacagaagatttttcttttgactttttaacattttaaatattgaatgttcttccctagcccacactacacattgaacatgctttgaaaaaaaaaaaactatgactaaagatcacaaacttattagtaacagattgtttttttttttcgttggcaagcaactattctgccttaaaagcgtttttgtaaactaaactctcattcctaattgatgatgatattcacattcacgtatatataaaatatgtaaacgatataggaatcacactttaacaaaaaaaattgttctaattaaaaatagaagaagaactggcgcacaatgtaaa

SEQ ID NO: 34605 - DNA, 6528 bp, Arabidopsis thaliana landsberg
  unsure (1)..(6528): unsure at all n locations
tttttagcaagtattttttgtctttcgttcgagtgttgacacttcgatgatttaggtgtgagaccacctcgctttgtccatgtcccggataataattggacttgtttcgcgtccaaattatttcggatgtgatatggtatgttctttgaaggttaaaactttgaatgagtttgagttgttttgtcttgggaacctattgaagtgaggtcacacaagggacctgccagattttgggagctgagcttgtggtatcgccaggtcgcgaatgaaaccttcgtttcttccttgtttactatgttatgcgttgatagcgaaagagttagatttggttgtagtaggtgagctccgatgaagccgaagtgatgtgttcttataagttttagttcactgtcgactttttggaagcgagatcacaaaatggatccgccgacgttcgggtgttgggctttaggtatcgtaagattacgccagatcgtcgcttgctttacctccttttcgtttggtcatcgagcagggacctgctcgataccgaagggagattgaactatcaggtgagcagctgatcttcgttgatgggagatgcgatgtctgtttcccttgttgaagtttcgtcttacaaatagaagggttgagatggtaattgcgtttgcggaggtgactnnnnnnnnnnnnnnnnnnnnnttaagcccttttgatttgattgaagtggtggttgcactcttggggggagttgcctatgtaccctaccaagggatcaagccttatcgtagtttgattgtttttgagtacctattcgtggtatttcttgagatgcatggcatttcaagaccgtaactcaggtactccgttaataacttttacgagcttatagacgccgtcacgtaccacctctgtgattcgatagagaccttcccaattagttcccagttttccagcgtttagctctctcgtgtggctgaacacttttcgtaaaacgagctctcccatgtcgaatctttgaattttgatattggagttatagtagcgagcggcggcttgttgatagttttgaactcggatcattgcctgatctctgcgttcatcgatgaagtccatgttgtcctgtaacatttgcgtgttcaggtccgagttaggaggactggcggtccttctcacgcttggtactatggtttcgacagggatcactgcttctagaccataggcgagagagaacggggtttcttgcgtttattttcgaggtgtagttcggtaggcccagagaactccgtgaagtacgtcggaccacattgattttttggaatcaagtattttcttgatgttgctaagtatagctttgttggcggcttctgcctgtccgttaccttgtgggtaatggggggtggatgtggtaagacggatcttccatttgtcgcaaaatgctttgatttttctcgaggtgaggttagtcccgttatcggtgataatctcataaggtatgccatgttgacatacgatattttcccataggaagtcctcgacttgtttctcggttacctgttggaaggctttagcctcaatccatttggtagagtagtcggtgaggactagcaggttttttagtttcttcttcccaccagaggcgtccatgggacctacgacatttcctcgggaggttgatgaagagtaggtgcttgtcgttggcatttatcgcacctgaatgaatgagtacgcaatcggctagcattgttggccagaagtaaccttgctttttaattctgagggcgagggtacgtccactacaatggctaccacattgcccctcgtgcatgcttttcatgagatctttcgtttgttgcccataggtacacaccatgtagggacctgcgacgctgcgtttcatcagtctcccttccatgatgcagtaccttgcgctctgggctttgagttttctggtctcccacttgtcgggaggtgtgatccctcgttcgatgtaatcgatgattggaattctccagtcgttgtacggttcaggttcgtacgaggcaagttgttcgggggttccgagcttcgagttactcgcgtaaagttgcaagttgccgaggtttccatttcagcgtgtttgaccgttaggtcgatgctcgggtgttctattccttcaactgggataattcttttgacgaaaggatctgacgtggaggcgagagctgccaaggcatctgcagaggtgttttcacctctggggatcctggtcagttcaaaagactcgaactgttgggtcaaggttttgactagttcgacgtacgcttccatgcgcttgtctttagcttcatattccccgtggaactggctggtgacgagttgggagtcgctatgggcgtgtatattgcagattcccattccttgagctagcctaatgccagcaatgaggactttgtactcagactcgttatttgatgcgttgaatccgagtcggaacgattgtttgatgacttccccggtgggggaggtgagttgattcctactccggatccatgtcggttagaggagccatcgacgtggaggagccatttcttattggaattggttccatccaggtccgctaacgggagctcgattacaaagtcggctaggacctgtgctttcaggctagttctggtgcgatattctatatcgtactcacttaattctatagcccattttgcaagtcgacctgattgagtcagactgtgcagaatagttctgattggttgagacgtcatcactacgatgggatgtgattgaaaatatggtctcagtttttgagcggacatgactacggccagtgccagtttttccattgcgggataatgagtttcggcgtctatcaatgttttactaacgtaatagatcagtttctgtccttcgtgatcttctctcaccaggacgccgcttatcgcggttcgggagactgccgtgtacaggtacaacggttctccttcttcgggttttgcgagtatgggtgtttcggacaggtacgctttcaattgtttgaaggcttgctcgtagtcctcgttccaatcgaactttttatcctttcggaggagctgatagaaagggacgcatttatcggtggacctggatatgaacctgtttggggcggcgatacggccggttagtcgttggacctcccgtgccgtttttggcgatggcatgtcgatgaaggctacaatctgcttaggattggccttgatgcctctttcggttactaggtatccgaggaattaacctgagggaactccgaaagagcatttctcggggtttagcttcatttcgaatttgtttaggattttgaagcattctcttaattgcgggacgtggtctttttcgcgagctgacttgaccagcatgtcgtcgatatagacctccatcgttttaactagctggtcggcggacattctattcaccaatctttggtaagtagctccaccgttttttaaaccaaagggcattactttataaaagcaggtgcctcggtcagctataaaagctgttttttcttggtcatctgggcgcataagtatttggctgtacccggagaatgcatccatgaaggacaatagttcgntgccggtcgtggcttcaaccatccgatcaatatgggggagtggaaagctatctttaggacatgctttgttgaggtccgtgaaatcgatgcaaaccctccatttgtcgttcttcttttttacgacaacggggtttgctaaccattcgggatacttgacttcaacaatggagccagcgccgaggagtttatcaacctcgtcgttaacagcttttgagcgctccgggccgagcttccgtcgtttttgtttaactagtttgaaggttgggtcaacattcaattcgtgacatgcgacctcaggatctatgccgaccatgtcatctattgacccggcgaacgttgcgacatttttcttaagaaattttacgagctcgacccttatattctcagcgaggtcagcgcccatccctacgaatcgctctgagttaagtcatcgatgttaacctgaactaccaattctctggtaggagaactttcttcttctgctcttttcttaggtgcgggctcgtcactgctggcttcgaaagctcgctttttagtggatggttcggcagattccttgggttcggcgtcctttaattgctataagtcgagctcctttcgaagtttgcattcaattaaaaagcactttaggacatgctttgttgaggtccgtgaaatcgatgcaaaccctccatttgccgttcttcttttttacgacaacggggtttgccagccattcggggtacttaacttcgacaatggagccagcgccgaggagtttattaacttcatcgttaacagcttttgagcgctccggaccaagctttcgtcgtttttgtttaattggcttgaagattgggtcaacgtttaattcatggcaagcaacctcgggatctatgccgaccatgtcgtctattgaccaggcgaacgttgcgatgttcctcttaagaaatgttatgagctcggtctttatatcttcagcaagatcagcgccgatccccacacaccgctctgcgtttgagtcatcgatgttaacctgaactaccaattctctggtaggagaactttcttcttctgctcttttcttaggtgcgggctcgtcactgctagcttcggaagctcgctttttagtggatggttcggcagattccttgggttcggcgtcctttaattgctataagtcgagctcctttcgaagtttgcattcaattaaaaagcacgtaccagctaacttttggtgtccccttattgctacgatgccgacgctcgttgggattttgatgcatagatgatatgacgaaggaatcgcctgcatgtcgagaatccacggcgtgcccaggattatgttgaagatagctggcttatccacaactacaaacttaggccatgttgccgtccctcccagatagatcggtaatttaattgttccgttcgtcatcaatgtgttcccgccgaagcctgttaaggggcggactgacggctcaatgtgacgttcatggacttccattttttgcaggacgtctctgaatataacgtttactgaactccccgcatcgattaagattcgagtgacttcactttctccaatgtggagctcgattaccaacggatcattgtgcggcagatctacgccgagaaggtcttccgaggtgaaggttaggggggccatctcctttgccgtaggtgacaaccataaagtggcggctcctgacttaacgtattccttgattgatcgtacagagtcacggcaagcagttaggcctcccataatcatgttaacccttcggcggggaactggtgcgtcgatatgttgttggtcgttttctcgatttcgtttggggggttccatgtctggatcacattcttcttcattggttggtggtgcttcttgctgccggctggcgtgtgggtctaaacggtgaaatacaatgttgccacctcggcctcctcgtgccgcgtaggtgttgttgtggcctgtgtattgtgtatgctgaacctcgatgtcgcccttcttgtacttgtttaatagaatgctttgtaagtgccgacatgcagcggtggaatggccagatcgtttgtggaaatcgcaatattggtccaaacccccctcttcatctgttcgccgagccttttcaaggttggctggctgagccactgggtctgcctcgcttacgagatacgatgcagccttcctttcggtctcctgccggtactcctgattatagtgttgacggggttcgtaataatcatcctgaactttttcttttgactgtttgttagaagtatgtttcctgctgaaggccagcttttcttcttccatttcgatatagcgcgttgccttgtggagggcgtcttctagatacactggccgatttaacaacaaatcatcgcgaaaacgcgactcgtgccacacagcgttgcgtaatgccgagatggccgcctcatccgggacggcgatgcgagagacgactgccttaaacctgtcaataaaggtgcgaagcggttccttcgggccttgggccatagtccaaaggtctgcgtgtgtcgtgccgcgttcaatgtacatggaatagtgcttcaggaaggcgattgaaagttccaagaaactccctattgaattagcaggtaggtcggaaaaccaattcaaggccgcacccgtaagatgttcggaaaataactgacacttgccggcctcagcttcgctcggatggaaatgggccctttgcgtggcgatgctgaaagccgataaaaattgttgtggatccgtgttaccttcgtaactttttaactttatcttgttatcatgccgaactgagacgttgctgatgtgtgcggcaaaaggtgtcttttgggttttttccaggatctgctctaactcaggagcggaactggtcgcctgataaactaaatgggacattgctaggatctacttctcagctcctggatttcctcgttctgagatcgct

SEQ ID NO: 34606 - DNA, 564 bp, Arabidopsis thaliana landsberg
tctagacatccacggaaccaccaccttcataaaaacaaacatatatcagtacctattcaaatgaaacaaacacaaaggaaaggattgaaatataaccttacgatactcttcctcgcgaaggtatatactcgaggcccttgtcttcttgttcatcttttgccctaaaatttgttgataatacatgcacgtggcctgaatccttgcctcgtacagggcctccttcaccaactgataggcatttacttgaaacaccttctaggcgtggttcgcgtcatccccgtcggccaaccgaaaacgtgcctacaaaaagaatgcaatgttatctaactttttaatgattgcttccatataacacacacaagattacgtacccagaagtcagcgcgaacaagcccctgggcatcgccataagtgacatcgaccttcagcttgtaatcgtccaacatgagacgaggactggcgcacgtctgcatcgtcggacgtcttcaccagtccagggtagtgaacttcaggagcgaactcacacagagtcacatgcttttgcgacctggccggtgaagagta

SEQ ID NO: 34607 - DNA, 1089 bp, Arabidopsis thaliana landsberg
gtacacaggccacattgatagtaacgcctctaattataatacacaccttagacatttcttctggatcatcaatgtagagcttgttaacaagccgtgcaacaaggttctgctcttcctggaaatcttcttcatcaatctagaacccaacatagtttcccgtttgaaagcgtaagttatctaaagaaaaacaactctttcgagtgacaagaaaactttgaacacaaatgcaataagaattgacgaacaagggtagggttctagaacctcatcatcaattgttccgtcaaaatccttcatgagaccctttgccagttcaaacaatgcatcgacctgtaacaaacaataaaagggaactccacatcaatagagaaatgctaaagaagaacttaatcgaggaagaaacgggacacctcatcagcagtagcaatgtgagtattatttttaaaaagactctttaggagaatgattgccattgctccgtttgtctcacggtcaaggtattccattactagaggatagatggtaagcttcaagatagttactacattattatacttttccaatggagcgctaagaaatgcgaccatctgttttgctgccttgtcatcacaaagctttcctgtggcagatagttgagtaacacatgatccctaaaggaaaaaagagagacaacaatgtgtattagcaacaaccagaactacttaaagcattaaaaaaaaagtactacagatgaataaacttaacacgcttatacatcctcagaaagcattataccaaaacttggtccacatagtccagacgatcggaatagacatggagagtgaattttagaagaaacaaatacaatgttacagatgctgcggccggcaagtccacctgtgcttctacaacctgaatcataatagatgtggactcgatcagctgtttataaatacaatagattatcaatgtgatacaatcagaggaaagtagggcaacaaaaattacacaaaaatatcacaacacaatggggattaagctagatttttcagctgtttctaatactagcacccctaataaataaacttacattcaagtgtcaatttctga

SEQ ID NO: 34608 - DNA, 504 bp, Arabidopsis thaliana landsberg
tgtgaagcctctaaacaaagcaacttcatttttcatttaagagactaagtatttgtattataaccagaacaagaagccacaaccagagacaaagctaacatcttttggattagaaaattgaagaagagtgaaattgtatatcacaaatctgaaaagcaaaactaacaatcttttcaactatgttcatcatcaagcaagttaatgtgattcaagagaccatgaaaaatatagcaaagtaccacctaatttttccggcaaatgtcgtctacatgcaagacctatatcatcagaaactagagaatctacctaccaatttagagattatgatgctatactcaaaatttacaacaaaatgcaaagagactatgaacctgagatcgtgtgacttgatgtaggtccaaatccccttgatggcgtcggtacgtgatgtttcaccggtaccaatgaactgagcgagaactggagacactggagtcaccttaaagatatcggaagacctcagag

SEQ ID NO: 34609 - DNA, 1460 bp, Arabidopsis thaliana landsberg
  unsure (1)..(1460): unsure at all n locations
aaattatgttagcatcaagcgaataagtttgtagagattattgtgggcgatggtcacaagctagtctaatggttttttcatgcatgtccccgctattttggggttaaaaacattccttagatgcatcacatgaatttgatatattattaagaatcataaccactttctaacactatatatagtttctagggttatggagtatgtttttcttggtagatgatatatttttattttaactaaaaaggtcgaaattcttgaataagatagtaccaatttaggtcaggtgttcaattttttgttgaacgtgtatattttagtcattgcgattttatatattcgtgacaactgcaatatttggaaattagtataggctcatcattttttctaatggaaaatgtaaagtagaaactgtaaattaattagtgagataaattacttagtaaaaatgaaattaattagtgagataaataagaaggagccaaggaaagctatgagagtaaaagagagaagtttcacttgggaaagagtggattagaaagcttggactcatgtggaattcatttaatgtgatggttgaaacatttcttgaggcttttatcaaaacaccatttattttaagaatctcttcagacattaattagggatttcttaaaaaaacactctaattagctttgtgtcggatctcgttttgtgggtcttgcataaatttcctctggatntatgttgttattttaattaaattcacacaatggattctaacttaatccctctcaagatcaatagttcgaaagtgatgcatgtatcttcgatctcctcattaagtatgggtaatcttgttatgatttatacacgccttctttttaatatatatatatatatatatatatatatatatatatatatatatatatttacacgtatataaatactaaaatagaattatggtagacatgtatatatttgagaaactacaaaatatgtgaaccaattccatgatagtctaaacttaacaaaaattatcaaaaacaaaaacggtatagtgattgtcaaatcgtcatattggttaagactatacgtatgtgttttagtactggctattgtagaagtgttaaatatactttgattaatatgtgttttagttacgtatttacccgtttattggaaaccaaaaacaagatatgtgagttgtgctatgtaagattgataaaaaaaaaaaaaaaaaagattgataaatatacacaagacttctttgaatttaattttttttaaaaatcaattcttgtttttggtagggaaaaaaaacaaaagaataaaattcttttaacatgtatattttaaataaaagaatattgtttttaaaagaaatggttagtttctatttgctctaaccagaaatggaattttcttttgttggaaaatgaataacatcagcagaatattgtggattttactcaaattat

SEQ ID NO: 34610 - DNA, 2061 bp, Arabidopsis thaliana landsberg
  unsure (1)..(2061): unsure at all n locations
ttttgattatgttctcgaccgaataattttaatatttaaacgaaccgtatcaaaccgagtatttggttatatgtttaaaacgtctttaagtatcaactaagtagaaatatggtcaccaattgctaactggtaaaagcggttgagactcagcatgatgagagagtctcaccacggtnnnnnnnnnnnnnnnnnnnnnnnnnnnnnnnnnnnnnnnntcatgccttaattgttagccgaaataaagtaatctaaatcacttctttttcaataatcatgcagcgaaccctctaaatgaatcagagggtctcaactctcaaagacagagtttaatggaggtggagccatggcgtgactttttgagcgactcgactcaatcgactacaggttgttcgttcatatggagtttcgttccctggttcgaaacagcagctagacgaaaactgtgtaatggctatatcactgaagaggaaccgtttcttcattccttatacgaatctcgtcttcttcttcttcttgtgtgtctctctgctcgataaaactgtatccatcaggatttcgaatcagatctcggatactgtcgttgattctcccgatcgtcctttgaaatctgcggttttcgctcttggaagcttctggagatcggaggcggcgtttggttgtatcaatggcgtcgtacgaacctccgccggttacgccggtggaacgaagacgaatccggagtataggaacttaggtgatcacgccgagtccgtacaggttggttttattgtttcaattttgaggattgagccaatgtttacttcgtttattcgatgtttagctgatatgatttgatttgatcagtgcctatgttgttcgatttgatttgctctacttaacagatttcgtttggataataaaattggagaatgctttatgtgaatatcatcattcattagctgattaggttgttttgttgaaatttggttatgtgtgatcttagtgtatatgtgattgtctgattgaagttaaactaaattgtctttgttcatctgacttagtgattgaggagcttaaagatttgtgttgattcttgctctgtaattgtcttcaggttgaatatgatccaaggataattggttatcgtcagctcttagatgtattttggtctagtcatgattctagacaagtgtttggacaaggtcctgatgtgggtaatcaatacaggtaaaagagcaagtaaatagctgatgcttatctttgagtttgtttgtttggaccaaatctaaaacatgggaatcttttttgaacagatcctgtattttcactgattctacagaagagttgagactggcttctaccagcaaagaaagggagcaacttaatacaagaagcagtatcgtgaccactcaaattcaacagctaggaacgttttatcgcgcagagcctgatcaccaggttcagctttaagtctctctgcatcttccattcatatcacggctgtttattagaggataaacgattaagaaaatcaatcttctcttgaatttctgtatttgcagaagtttgagctgaaacaacatccatttcttattcagctaattggaaacatggtagaagaagagcttgagagatcagctctagccacaaaactaaacggttacgcagccgagctctgcccgcctagaatccagaaacatatcgactctagagttaatgagatcattagaaaaggttggcccgtcttgagagacatctaatatataagccttgtgagatcttcgcgttcttggatttgattgcttagtctcagatgtaagttttggttcattcttttggccaggaatttggtcacaacaatgtttatgtcttactcttgccccttgagtggtgattgttcagcgttttgtcttgtttcttttaagatctctcaaatagtatatgctttttgttttcttggaagaagaatcaggtagactttcattgtatcattatgggattgattaccaattcactgatattatatatatatatatgatatactttggttgccaatctctcacatagaatatgctttttatg

SEQ ID NO: 34611 - DNA, 3953 bp, Arabidopsis thaliana landsberg
tcgaggcccaaacccattagtataggcgtctatactgcgactaaataccgagacaagtttgttttgtgggcttctaaatttcggggcccaaacccattattatcgacgacaatattgcgactattggccgacaaatgtttggtattttgggcttctaaatgttgaagcctaaacccagtaataatttatgacaaagattcaactatgttccgactagttttgatttgttgggctttgaaattttgaagcccaaacccagtataattggcgacaaaattgcgactattcaacgatacttatttgattagttgggcaaaaaaattacgaggcccaaacccaaatgaatatgcgacaattatgtgactattatgcgacttctattgagttgaaaaccctaaatcgagtcatttctcttcgagccaaacacttagccatttcttcgatccaacttcctcttcttcttcttcttcgtctcgaaaaccctaatacccaattctctttgttcttcatctctcaaaccctaatccctagttcctattctcgctcttcttcattcctcaaaaccctaatcccaattctcgatctgcttcctctctcaaaccctaatcccaattctctttgttcttcatctctcaaaccctaatccccaaaatcacgatcctttctccttctaagatcgatcttcttcttctccttctaagatcgatcttcttcttcttctgctaagatcgatcgatcttcttcgatctctcaccttcaacctcttcgatctgcttcgtcctcttcttcttcttctcttcaatcttttcatttggctcactatcatgcctatcgccggtcgaggtggctcccgaaagcgtaagacgacgccgaacgtcactcagagagccggcaccgtcggatcaagacttgcaaatcttcctccccaatacaacttcactccggcaccggcggttcaagttcctgcgacggagccggctcaaccacagcatcaagctcctccgcctctatctgaagaggtccactacactccgccgccaacaacgccacctcagcaaactcctcctcagtcgcgagattcagacgctccagcaaacagccacccttcgtctcaagggaacaacttccaagaggaagttcctgggacgttgccggagctacaagaagactcggcggtggctctgcaagcgacactctccgtgccaaacagggagcagtggtgttgtgtcttgtctctgattcccaaacctaaaaccgagtggtatgttctcttcctctattttattctagtgtttttagcctgtgtagtgtaactcgtgttatggtctgtagaatggcttgttgtggaacatagttgtgaatgatggttgttggaattggatgtttgttagggtttgtgtaacatagtagaatctgcctttgttctaaactcgtgtgtgatcttgttaagttcttcactgtgtctataatcttgttaagttatttattgtgttctgttgtgaatcatgaacataattgtggaacatttgttgattgttgaacttagcatgtttttggctttgacattgaggatctgtctttgttctatacttgtctataatcttgttaagttctttattgtgttctgttgtgaatcatgaacataattgtggaacatttgttgattattgaacttagcatgttttcggcttcgacattgaggatctgtctttgttctatacttgtctataatcttgttaagttctttgtgttctgttgtgaatcatgaacataattgtggaacatttgttgattgttgaacttagcatgttttcggctttgacaatgaggatctgtctttgttctatacttgtctatacttcttctttactgtctatgatcttgttatgttgactattgtgttctgtgtgtgatcttgtcggcttatacttgtctagaatcttgtagaatctgcctttgttcaattatatagtctgctgtagttgtagtgttttggattttaaacatgtttactttctgtctgtgttgcatgtgtttggaggtttactcgcgacagaggatctaaattggttagaaagatcacacggatttttactcaaaagttcaatgctccctactataattggtcctgtgtgccattggataaaagagaaagattgtttttagagtttgcggtaagcttcttgtatttctccaactttcattagactgtactatttaatctgtcatttgttcactaacttcacactttttttgtagaaaactcaccactgggatcccttaataacagggacagtccaatactacttcaatgagatcgttaagaggcgcttgaaggacatggttagcaccgcaaggagaactcgagagcagcctccatggattggagaaactctgtggagaaccgtgtgcgactactgggacacagaagaggcacataaaaggagtaagacctattccaaagctcgtctctctgactgtaacggtctcggtcttcacgtccactactctgggccaaagtctttccaaaaaatccaagatgaattggtaagtgtttctgcaatcttcccatgtgttttagtgatgttcgtttaactgtgtgtgatgtttagtctgttgatagtaataaagcttgtgatctgtgtttgcaggaagaaaaaatgggaagacctgtccctcttggtgaggtgttcatccagacacacactaagtcgtatgggacttatgttgatcagaaggcagagaagattgctctggcgtatgagcagaatgtgagagagaagctgtctgaactagaggcggctgcttcacgtcctcgggatctcacactggatgagtatgcagccatatttctcgaggtaagatgttctttgtctttttcagagtcttagagacatttaggatctgtcactaattatcttcctctttatttcttgcagtccacagaaaaggatgcaagaggcaatccttatggacttggctgtcttaaagaaactctaggcagtgccaaccgccaactccccggagactcaacctttaaagccttagaagaacggctgcaggaagctcagcggcaaattgaagaacaggctgcatataacgagaagcgagatgctgaaattgctgcccgagaagccgagacagcccgagtcacagctgagcaaaaggacaagctcgagcacttgtccttagtcgagaagtatctccgccaaaccgatccgcagttcttggacttcattgccacacactcttccacatccacagagcgtatccgaattactcccccatctaatgatccatagaatttaggtttccaaacactagttgtatctttcaataagttgtatgtttgaacaagataattttatgttttgaacttgattttcaatatataagcagtgttttcatattgtatagcatatcaataacaaacaagaacaatcgatgaacaaacaagaacaaacaagaaacccatcacctgatgaccaaatctttattcggaccaaactattagtcgcaaaaaagtagtaaataagtagcactatagtcgctgaatcgtcgtcaagtagtcacataactttacgacaatcataagactaaacaaattagtcataaaagaatcgtaaaactgacgtccaatagtcgtatatacttatacgacaatgttatgacaaaaagtttcaaatccttggcaaagtacttttaatcgtcaaagagtcgtcgaatagtcgtaaacatatttacgactactttacgacaactggaaacatacccagggtttataataattaatcgcaacatagtcgtaaagtcgtcgtacacaattaacgactacgaaacgactacatgttctcacacgctcagtacagtacaaataatcgtaggataggcgtcaataagtcgccgacataatacgactacgtaacgacgatttttcactgtttagtcagttg

SEQ ID NO: 34612 - DNA, 832 bp, Arabidopsis thaliana landsberg
tcttagcccttgctcggtcccgtttactcgttccaaagaaagatgggtcatggcgtatgtgcgtagattgtcgtgctattaataacatcacagttcgttatcgatatcctattccacgccttgatgatatgttagatgagcttagtggtgccgttattttctctaaggttgatttgcgtagcggttaccatcagattagaatgaaactcggtgatgaatggaaaacggcttttaaaacgaaatttggtttatatgaatggttggttatgccatttggattgactaatgctcccagcacctttatgcgtttaatgaacgaagttctacgggccttcataggtttgtttgttgttgtttatttcgatgatatccttatttacagcaagtctatagaggagcatttagaacatttgcgtgctgtttttgacgctttgcgtgctgctcgcttgtttggtaacatggaaaagtgcacattttgcacgcaacgtgtctcgtttcttggttatgtggttactccgcagggcattgaggtggatagcagcaagattgctgccattcgggagtggcctacaccgacgacggtcacacaaattcggagctttcttggacttgccggtttctaccgcagatttgttcgtgattttagctccattgcagcgcctctacatgagcttacaaagaaagatgtgccgtttgcttggagtgattcgcaggaggtagcgttcagcactttgaaagataagttaacccaagctcccctcttgcaattgcctgattttaataaagtttttgagcttgaatgcgatgctagcggtattgggctaggtgctgt

SEQ ID NO: 34613 - DNA, 1598 bp, Arabidopsis thaliana landsberg
taaagacaactacctatctatatatatatatatatatcttataatcaaaatattctatttttagattctgttttattgtcaatttctctggttgggtcctctgttttgaagatgttacatttgactctgttttcattattaaaaaggttgattttttttttgtgtttttaaaagttaaagcataccgatttgaatctaatgagaagttttttcttgttgtaatgcgaaaattaggtattttcggtgtcgaaatcattggtgatttaggcacatcctaataatttctctgtttttttgctctgttttgtagatgttaacatttgactctgcttctctaactaaaaatggtgactatttgtgtgaatttaatctaatcataagtgttttggtttttgaaatgtgaaaaattaggttttgtcagtaacgaaagcattgtcgattcaagcacatccaaataaggccttagcagagaaattgcatagagaagatcctcttctttacagagacaataaccacaagcctgagattgctcttgctgttactccttttcaagccctttgtggtttcgtaactcttaaggtacacaacttcagatctttctctctggtatcttattacattcgggttttaagttttgcttagatctgattcgatctaaacggttttgtacctaaattgaatcaggaactgaaggaggttatcactaatgtaccagagatcacggagcttgtaggaagcaaagctgcagatcaaatcttcaacgtccacgaacacgatgaagacgagagaatcaaatccgttgttcgattgatcttcacacagttgatgtctgcaagtaacaatgagacgaagcacgtggtttctcggatgaagaatcgtctgctcttagagaccaaacaccgtgaactgtcggagaaagagaagttggttttggaactggagaaacagtacactggtgacataggtgtcatctcagccttcttctttaactatgtcaagcttaatcctggagaggctttgtatttggacgctaacgagccacacgcatatatatccggtgattgtgttgagtgttggcgggcttcagccaacgtagttaaaggtggtcttactcttaaacatctcgatgttcaaacgttttgctctaagcttacccccaaattggtaactttctttccacgtttaaatttttggtatctttctttacacggttagcaaactggtttagttggtaagccgattgttttttcttctttgtccggtttattgataaaacgtaccggatttggttcagggttacccggagtttctgtaaggatttcctctgactccttacgttacaaggtatcttcctccatttgatgagtttgaagtggatcattgtgatcttcctaaaggaaaatcgacgggttttttccgccggtaccaggtccttcggtttatgtggttattgaaggaaaagggccattgcgaaccggttcatctaaagttttggtaatccgaggagatgttttgtttgttccggctgatattgagattctcgtacctggagtaagtgatgtgatgaagcttttcagagctggagtcagcagcagatt

SEQ ID NO: 34614 - DNA, 1399 bp, Arabidopsis thaliana landsberg
  unsure (1)..(1399): unsure at all n locations
actatgtgtaataataccctggattagtaaaatggatttagatattggtaaaggaaagtgtatgctaagcattatgggaagatcccttaataaggaccgcataaactatatttcataataaatttcctattaacataaaagaaatctaaatacaaaaaccatagactttatttaaaaaatttggaagaaaaataataatcaagaactagatatttataacactatctaaactctatcacaccctaagaaacatcgttttcacgaattattgcctttaggaccactagtctggcctttattaggtgaccaacgtcaagtagataaacatttatcttctgctggcagtacatcaattatacaaatatagcaagattgcttatgcccccgggtacgggaaaccttcgcacgtggcaaagatcgacagtctctacgtgcaagaatcatggtctcgccatctcactgtggagtcctttaacacctagctaaagtgtttccagatcaatcacatacatatccatctttgatctttttgtttttggcatacaagaaaagaaaatggcgtctcatgctgttacaagcggacaaaaaccacacgtagtttgcatacctttcccggctcaaggccacatcaatccgatgctcaaagtggctaaactcctctatgccagaggcttccatgttaccttcgtcaacactaactacaaccataaccgtctcatccggtcacgtggtcccaactcccttgatgggcttccttcttttcggttcgagtccatccctgacggtctaccggaggaaaacaaggacgtcatgcaggatgtccctaccctttgtgagtccaccatgaaaaactgtctagctcctttcaaggagcttctccggcggatcaacaccacaaaggatgttcctccggtaagctgtattgtatctgacggttgtatgagctttactcttgatgctgcagaggagcttggagtcccggatgttcttttttggacaaccaagtgcttgtggcttcttggcttatctacactttnnnnnnnnnnnnnnnnnnnncttatgtccgctaaaaggtacgtattcttacattgattattgatttaaatgacgttatgatattaaatttaacgtaagaacccttaagacacctcgagcagggtgagtttttaatctgagatatatcgtttgtatattggataaaaaatatccatttagctaccatatttagcgaagccatagactatcctaatcgatccacccgcacgacgagaccggtcaagactcaagatggtcatgttgtaatatatactcaattttatacaattgttacattgtagcctaggtttttgagcattactaaatatatagtatcaagagaaatgtccatattttaatatat

SEQ ID NO: 34615 - DNA, 1063 bp, Arabidopsis thaliana landsberg
acgaattaaaagaccaagtcgatagcatctacccttctgttgatatttattaagagaaagaatccacccattgtattcttcaagagaataaatttctggagacttagcagttaatgcaatctgacctcacgcgtttttttttttgacctcacgcggttttactaaaccgaccttcgtttacttcccttacctctctatatatatctctatcttcatttgcatatttcaattcatttcataatcatacacctctctacatttgttactactttcttctaacttgttttcaaagagaaatcacaatctatctgttccaagatgagtcaatacagccaaaaccaatcttcaggtttgtattcttttcttcgtactaatttagcatcagaccatatgtttagtcaatattctcatggttataatcatatttgcagtttcatagtagtaagtacttttttaaatggtaataagactaatgtgaaatatgaataacttataggagcttatcctacgccgccagtgtctaccggcccttacgtggcaccgccaccgctaggttacccaacgaacgacacaagtcatgccacggtggcaacggtggagacaaagtccaagggtgatggattcttaaaaggctggttagtcttctttttctagtataaaccaggcatgcacgtttggttaactatcaaaccggttcggttatcgtgtgttgcattgattaatctgttttctttcattttttgaatgcagtcttgcggccatgtgttgttgttgtgtcctcgacgcatgcttctgaagacttagatggtttattttgattatctttgtattttgctttaccaaaatgattcgactaggtttatgacatttggtacttctatttgttaattcatttctatatcactctttcttttgcattgtgtaattttataacttcttaatatatcgtttgttttctcttagacatcttctaaaccacgctagattcacatttttgactttattaccggttagtcaacgtggacttaaaatcaatttaaccacactacataagccaaagtta

SEQ ID NO: 34616 - DNA, 985 bp, Arabidopsis thaliana landsberg
gtcgaataaggtcatctggggactccagcgacagatgagttttgatgttgaaagtgagaacgaagatgccgaagatcggccacggtggccaattcatgtagttttcgggaaatccactgttaagcaagggcaaattgaagcgatgaagggcagtgttggtccttgttctcaaatgctatacatcatgaacaacgcaacacaactattaatgattaaagaccttcatccttcgaagcattatctcctttgggatataatgatcttcagacgaatgtcataaaggaaataccttcatcatcttagggaacaaatataagtgaggatacaagaaacattaaagaatataaataataattatgaaccattgagttatttatattctcattttatgaacatgaataaacatcaacaacatttatattacattgataccttcaacttgtcagaaggtgaaaatgcgagaatgacacaagagtgattacaatctagcatgaacagtacggtgctactgttcatctatttataggcacggggcacaacccgagtgaaagtacatttatgcccttaacattcatctataatcataacatgaattattaaggatcaaatagtctttgtccctttttggtcatcgtcatacttggtcttcatcatcacttcaagccgaagctctttggctataggttcgtcgtccattttcatcaccttcgggttacacctttacccttgtcacgagtgaagaccttcattccaaagccgaaacctcctgtaataatccacgtcatactgaaaacatatggtcagtcacgtttttgaggaccttcgaaagaggaaggcccccaatagtcagcttcaaaaacaacggaaacatggttaccagcgaaggggagttgactcttgggatcgattggagggatgaccaggacagcaacactctgttttcttttgttgggtgcatcgtgattcttcagatgacgcgaacgga

SEQ ID NO: 34617 - DNA, 2283 bp, Arabidopsis thaliana landsberg
  unsure (1)..(2283): unsure at all n locations
atattaaatgttgcttttaaatgtataatttttgtgatttacaattttcaataactctaaaccaatgatattcaataatttgtattgaagtttacaatttatcaattataactaataattattgcattgaaaacctaaaaaatcaatctttctgaaacaatttttttcttctaaacaatcaaacaaaaagaaacagagcgagtagtaagaattgaatattatttatatatacaaataataataatatttagtgtaaaaatacaaattacaacgaaactatagaagaaaaacaagcaggcgtgtaagctaacgtcgaccttataggcttgaaacaaaactgagcgtgagtgctatagtagagcttagtatacaatgcagagccttacagccaaaaaaataaagcttgtgttatgaaactctaaactaaagtgacaatgcatccataaatcgtttattttcttgaccggcatataagatgttgcgaatttctctatctagatattttgatgatttagagcaaatcaggttaagaggtttgacatattggttcccaaactatgccttttaaggtggaaaagactgtcaaaaacaaaaacaaaaaagttcatttggtagttgaaaccaaagtcattggtaaagacaacatcaaaatttctataactcatcacaagtcatttggtttcaacacaaaaagtcatcaatcacgtaaactcacaaattaggatcaattcaatagaataatcttcctctttctctcttcacgtcaacaatgacatacttacgaagttaaaaaaacagagcagacaaagacatttcatttgacaaaagaggaaacaaaacgaaaaagaaaaagaaaaaaaaaagactgcccaaaaaagaaaagacatttgaattcttcttgtcttaataaatttgcaaacagcttcaatttaatatcccaaaaacctcttataaatattctgcaaaacctaccaaactaagaacaccaagtacgacaaaaagccaaattatagaaaacaaagagcaatggtttccttaattcccctatttgcttctcttacaccgtacttagtctcagcattacttctattccttgggctcgagcaacttttataccgtgtcaagaaacgtaacctccctggccctctctttgtctttccgataattggaaatgttgttgcacttatccgcgacccaacttccttctgggacaagcaatccgcgatggcggaaacttccgtgggcctctccgtcaactaccttattggaaaattcatcatatacattaaagacgcagagctctccaataaagtcttgtccaacattcgtcccgatgctttccaacttactggacatccattcggaaagaagctcttcggtgatcacagccttatctttannnnnnnnnnnnnnnnnnnatccgttcgccgtcaccttgctcctaacttcacccccaaggcactctccacttactctgatctccaacaaatagttatgctccgtcatctacgacagtgggaggaaagtttctccggcggaactaagccggtttctatgcgagaccttgtccgtgaactcaatcttgagacttctcaaacggttttcgttggaccctaccttgacaaggaagctaggaacacgttctgtactgattacaatctgttcaatctcggatctatggcgctcccgatcaacctgcccggctttgcgttcaacaaggctcgccgggcggtaatgaacctggagaagacgctctccgtctgtgcgggaaaatccaaaaagaggatggctacaggagaggagccaacatgcttaatcgatttttggatgcatgcattcgtcacggagatagaatccggtaatccaccgccgcttcactccgaagacgaagccatcggcggtttgctcttcgattttctctttgccgcacaagacgcgtcgacgtcatcactcctttgggcggtgacgtttctagaatctcatccgaaagtgctgagcaaagtgagggaggaagtggccaagatttggtcacctcagtctggccatctgatcacggccgatcagctcgcggagatgaagtatactcgcgctgtggcacgtgaggtggtgagatatcgaccaccggcaactatggtcccacacattgctactaatgatttccctcttacagaatcgtacactatcccaaaaggtacaatagtgtttccctcgctctccgacgcctcgtttctagggtatcatgaacaaaaccggttcgatccggaccggtttagtcagacaagc

SEQ ID NO: 34618 - DNA, 2482 bp, Arabidopsis thaliana landsberg
gacgcacgatccttgtcgagagcataagcaaaccgagcatcaacctcccagttcgacctgcatcattgtcaaacccataacaactatggacatagatgccgagacatccgacaagccggatattaaagtagacccgcagcctactaattggagagatcccatcaaactctacattgctgatggcgaaattccggcagatcggtgggaagctcgtcgcctaaaggcaaaggcgcgaccaaggcgttcctcacatgcgtaaacaaagaggaagccgccataatcatgaaggaaacgcacgacggggacggagggaatcattctggtggacgagctctagcgctcaaaatcaagaaggatggtcactactggccaactatgttggctgactgtgaggcctacgcggcgaagtgcgaacagtgtcagcgacatggcctgatgaagaatgttcctcccgaaatattgcactcgatcacaacgccataccctttcatatggtgggctatggacatcgtgggactaatgcccccgtcagggtctaaaagatttctgttagtcctaaccgattatttcaccaaatgggtcgaggcacaggcgtactacgaggttaaatcaactgatgtcgtcgcattcatttggaaaaatattagctgtcgacacgatcttccctatgagatcgttacgaataatgggaagcagttcgtcttactcatcaccaggaacttccttgctaggtggaacattcgcatgagcaattcgactccacggtatcctcaaggaaacagacaagccgagaccacaaataaaacaatcatagccgagatcaagaaaagactcggtcccaagaaaagaaatttggcaaactagctggaaggcgtgttttggtcataccgaactacccctcgacgacctacgtcattgtctcttttttccttagcttatggcatcgaggcaacggctccgagcgaagctggaattccaacgttacgcagatgcatgatgtcggaggaccctggactaaacaatcgactgctatgagatcacaacaacttcgccgaagaacatcgcgatcaagctatcatccggatccaaaactaccagaatgcggcgacaaagtactataatcgaaacattcgagaacgtcgcttcaacgtgggtgatctcgtacttcgagaagtcttcagtaacaccaaagaaaagaacgccgaaaagctccgagctcaatggaggggaccttacttgatttcaaaggtactttgataatagatttttagtcaattatcctaaaacaccaatcatgtcgttgtagtattttaggttgtcaatccaaatgggtgtgatgctaacaatcaagatgtgatcagaagtcactaagtcaagccaaacaataacaagtttttgggtgttctagcagtcctaagtgaacatttaggaaacagaaaatcaagcaaaaggtgtaaaacactcaaccaacacagctcgttgcagagcactgggtgtggtcgagtgacatgtcgagtaacagacagaaaatataacagggatactcgactgcacagtctgttggcagacaactgggtggtcaagtatcaggtcgattaataggagagaaatgcaaaaactaagcaacaggttattatgcagtaaacgatagtatagtaaacaataaaatcaatcagataaagaatttccgaggatatagggccccccattacgaattctgttcaggcattgacgagagctaacctaacaggcattacgaatcaacaagttaaagccaaaacgctccctgcaaccaataccttggtatagggccacaaatctctggaattagttgttcagacatttcatcgaacaccatttgggcgcggaaatgtctgggctcaaattccagttgatcagaaagcaataggcattaagaacaactaatccagaagggatctataaatcaaactcaaccatctagcatactgagaattttaaactactctaacccattgtgggttctgaaatccacactagagatttgtaattgaaattatgagaaaggagggctagaacttcactgaaaccttgagagttatattgctaagaacgaaatggactttttgtattgattatgatgtagcttttacaatgtgaaaggagattacaagtgtaaaagtatgtgcgtgaatgtgagctgaattgaatgtgtcttccaagtcgtccttgctcccttatataggtctacgcacgtggtagctccgtccgggatctgcggagattctcctgaatattcggcaggtcagttccgagatatcaggtccgctccgcgaatatctcctcatcagttcctaggttgttattcgcttatctcccttcatcaagtgaccgggcttatctggcccaagtacccattcgcgtatgtgggctcaacagctgcgtaggtcctctactcggtgggcttttgtgggctggcttggtatttttcagaatggattcc

SEQ ID NO: 34619 - DNA, 3766 bp, Arabidopsis thaliana landsberg
ctctggcgtatcacacactgataaaacaatcgtcaaagtcgcatgatcaaacccacctgacccaagcattcgtttaagcaatacaaaaccagactcagtctctctgtttctcagaaacccataaaacactatattctgcgaaataacgtctctcatgggcatttcgtcgaacaacttaatggcatcaactaacttcccacatttcacatacagagaaagcaaagagttccaaacaaccagagcgtttcgatggatatcagcatctacaggctcgaaaaattcaggatttttgataatggaggcgtggagacaaggacccagatgaggaaaccagccttctctgccgcagatggataagagaaggctcatatcgacatggttgaggagaaaggtcgagacttggtaatttgggctctgccggattaggattttcgaaggggacaaaacggtagataagcaagaaggaaggtgagaggtcagtttctgaatcacccatctcgaattcattcaccacaattccgaagctaaacacttaatttgtattttgtaatagaaatttgctttccactctagtagaatcgagtacttgaccgttaagttctcttccaagttgtacctctgtgtcgtctccatttttgttgttacagtggccgagctttttgttttcacagcgatgggtttgatgggtttacattggttttgaaattcaaattgatctcggttcggtttactttggtttagagaagaaaacaaaaaaaaataagacacgcgccgggtttttgagaatgaggtgcgtggatccaaaaatgaatgattttttttattcccaaaaaaaatcgtagacacgcgctcaacgcgacatgggtgagagtgactgtgaaatggcacgatcggtaaaagtggggtatgaagtggagctctctcattggctaaaaaactaaaaatagtagacatatagctcctatcctcctcctctccttttgtcatttttatattagcccctgctgagaatgaaattcagattttattcaatctgaaagttgtgtgtgttttagatacaattgaaaaaaaacttgaatctggactttgtgatactaaaaaatttcctcatcattttgttctgcaaccatttttacaggttggagcttataactgaaaacttgattcaaagaatcgcactaagggagttgaatatattctaaacatgtgaaatatataggtccaagtttgtccaatcattgtgctttcctgaaattggtacaagtttgtgaaattgtagagactctcttttttagcaatttaaaaatctcatctcttcaaatctatatataaaacagggggataacagaaaatgcaatggacttggtagtattaggctgagtctcaagtacaggtgtaagtagatagatacagaatgcaatgggatcttaagcccaagtgacagtcgttgcgacagttgtctctcaggagtttaacatcaagacctttggagggatctaatctaatctattgaaatctcctaactcgtgggagcatctctccaaaatgatttactaatagtatgatttccagattatgaatccttcttagggtagaacaaaatatggatacctgtcaaatatatatatcttctcttcgagtcacaatcactgctgtaacaatatcttggataatgctcctttctgcctcattactgactgccctttctccgcatccaccacatgtgttctggaaatagacaccaagatatttctactgatcagtctaacagggaccaagatgattcaagacaatctaataaagccaagtgactagtactaacaacacttacgctgcccatttcccttcactcatttgatgtagattttagactattcacagaccttcctaacacgtttaaagctgctacgcgctgcatctctctcgctgcaacagaggatcaacaacattatttctagcatgaacttgattccagatggttcctagctacaaacctaaaagcatgtgactaaagcctatatagttgtcagcagatatggaaaaaatggcttaagcagcagcatgaataatccacttatggatggtcaactagaactgtgccaaacagatatgattcagcaatggtaggaagtgagagagtgtaagtaaaggagtagagtaccttcctcgagagagaactgaatagacctcttttccaagtcaacagcatgcttgctaagctcggcggaggaaagtgaccaaagcactaataacagtggaaacatatatatataaaaaaaaacagaagcatcaaggttaggaattagagtgatactgggaggagcttactctgaacatgatcggtccgatcagattgattaagcttgttaagaagcatttgaagatgaaggtaacgctcttcccagtctaacttatggctggtaggggttggttcctgtgcgggtgatgaaggtatttgaagtggtgccttagtaggaggcgggttcggattagtagtgctagcagctgctttggatgtgtcaacctccactcttctccggacataaacaagtcgaccgcttgcagcattagtagtggctggagattccagtggaggtttctttgccccaattgatgacactgaatcttgttcgttggccttttctgaatcttttgatgtcccctccggaatctccatttcactgcgattaaggagaaactaagaagaagcttacaaataacaagttcaaagaggatctgcggtgcttcaacatcaaccaaacgaggactcaggattataattattagaatctgatcagtgaataatcaatcggaggagcgcgaagcaaaacaatttacctgtagaacggagatggtgatggagacggatcagacagaggataagagcagagcagagccgttccgctccgagagatggcgttttactcatctcgtcgctagctagagaggagagtaaagcaatgatgggccagtgtaaggcccattatgtgcattcacggggcagttttactcactgtacacactgtatatagacaaagcatcgcattctaaggcccatatgcttttcagtcacgttgataccaaaaaaacaagtgaagaacaacactccgagtgaaaagattgttcagtttcctttggtgagtttttctgagtttgagaaaaacaagagattctatttaattaatcgtcatgtgtgattgtctgctgattcctagtattatggtaaactgaaaacaatttttacttatttagtttcctttgagtgcttcatcatgtatactacctccaccatctcttcattcattcattgatgtcgcaccgtcggagataagggttgtcgtactcaacgtacttggaccagtacggtttgtacttggcgaatgctaaacccagccatggcttgtagttcccattgtaatgcactaccgctgcattctctattgctgtttggtttagcgctgggtcatatcccagccctagtacgtgccagctcctctccattgcatacgtcaggttgtaaaatgttatcagccccggtggcaacgatcccagcttccacagtgttctgtcttcattctgcatcaatcatatattaattgacacatccattcatcatccaaaaatatttatatgtatttcttttgagaaatttccaatgccttaccaagtcttgccgatagtgatatatccctgtaatcccccgcctcctccactctttcaggtcaaaagaattcaaccaaatgccacccacaagcccagcgtcaaa

SEQ ID NO: 34620 - DNA, 5461 bp, Arabidopsis thaliana landsberg
ccatattttggtttaaattaatatatattgatttttgacatattattacttgcctataattatcgttatccacatagacgtatctaatttagtcaaataaatatttaaagaacatataatcggttcaaatcttttagctaattacctaaaggaatctaattggttcgaaccttttagctaattaccatactgttaaacctaaggcaaacatacaataattttgatactgttaaaccttcaatttagggtaatatgctaatttcaaacctcaggcaaacatacaataatgttgatatttcaaacctcagacaaagtttttagccaaatttcttaacataattctaaaaatatttataaatgttgcattacaaatccaagatcatgtggataaactcccatggattcaaaaagttaataacataaacaagatagcaaactgatacgtaaatgagacaaagattccattaaagaagcttaaaattctcgcccaatttacattagtagcaatccaaaaaaaaacattcaagaacaattccctaaaaacaacattcaagaacaattccccagcattctgacttcatcctcaaacccttactcagtacaagtgctcaacctgtgcccaaccttcttacatctacgacaccttggcctaccaactctgttcggctgataaggtggctgcaccacgcacacttaatttcattcaagtcgagcaaaccaccattgcgtttaccattgcacaccttccaacggcatctcattgaaagtaccctgtagtcgattcataagccagccctttatgattctctacagacttcgcatgaagattattcgcgtcaagacacttcttgaagaaagtgtagtattttgaatgaggcatggaccaccacatgaaatgatggtttttgtcaattcgtacggaagctaatgttttctcagaaagaaccgcatctctcccctctctcccagctagcaagaagttcttcaacgcatcaacaccatcttctccaaccgtgcttacgatgatctccatcaacggctgaggaatgtgaaattctgacattgaaatcaccttcaaaattaaaagtaagttaatagttaaaaaatcatcttatcactatattcatataaacggtttaaaataccttcataagaacatttgaacccttgctttctccacaactttcttctacaccaccacatgaagaaagtgtagtattttgaatgaggcatggaccaccacatgaaatgatggtttttgtcaattcgtacggaagctaatattttctcagaaagaaccgcatcgctccctcttttccagctagcatttaagttcatcaacgcatcagcaccattttctgcgaccttgcttacgatgatctccatcaacggctgaggaatgtgaaattcttacattgaaatcaccttcaaaattaaaagtaagttaataattaagaaatcatcttatcactagattcatataaacggtttaaaatacctccataagaacatttgaacccttgttttctccacaactttcttctacaccacacattgttatgctctcttgtgagtcttccattaaaagagaaatttatatagttaatctaagtttatgttacggtttatataagagatatatagtgtttattcattaaaccaatatcctatttttaacctaattttggatagatggcaaatttccgcttaggtttataatttttgtttttaattatatacatattagacacttggatatgtcagtgtggatttgtaaaatattataaattctttattattttttttaattcaacttcattaatgagataagacaatgatgttaccttcacttttcataaccttggtatatgttgccaatatacagactgcgtcaaaaccttaaattacttccatatgaacattgctacatattgggctatacatagatgtatatttttcagtattcccaccacttgatgatctattgatttggcggcaaatttccctctcaaacttaaacagcaaacgttggtcaaatagcttcttttttcttacataaaatatacatatttttacacaatttgtataaaccaatggattattagttgtgttctaatatattattgtcatggataagtgtgatagatatagatgggtttaaacaaaaacaaagctaagaactatccacgtgacaatgggaactattcttataccagatcctactgccatcacgtcggactatatttaagacaaaaacataattactctttcgtttaattaaggaacaagagaacaatgggaaataatccataaaataatttaacaacatgtctaagtacctatcattcatcattagtaacttaagacattttcataatatctctagacaagtagaagtatatacaatctatacaccgctctacaatgtatggtccgccattgtattcatctagaaactgatgtaattccccacacattggacttttggtgaaacaccacgtctcactatactttccaaaccgctttggaggcaacgtttttatgtggaacttcaacgtttcacaaaatccctctgcttcttcgtaattgtatctctttttaaatttcgagtaaattcttcgcgatcctcttttccagctaaactcttcaacataatgtataataattctgccactgggtagacttctttagcatatgcggcgagctcaattgcgtcttctatgtcaaaaaataggaaagcagaaactaggtttcgaacatacaatgtgctaagtgtacatttttcctgttttgagcatccatttgtcatcactttatcatcatatcatcactgttttatatcatttctcatcatttgtcatcactttgtatgtttaggatagttttgcatgcatgttgcatatttgtgttgttttcagatgatttggagctgttgacgacctaaatggaagaagcagacctgatcatgtcaaagcactcgacccccaggtcgaatagacgctttacgacctcaacagaccactctaccaacatggccgagtatcaccattatcattcactcgaccaatcactctaccacatggtcgagtaccttcatcaccttcactcgatcactctaccaccaagctgagtctcaccatcatcattcactcgaccaatcactccaccaacatggccgagtatcaccattatcattcactcgaccaatcactctaccaacatggccgagaatcaccatcatcattcactcgaccaatcactctaccactaagtcgagtactaccaccaccatccactcgaccaatccctctaccacatggtcgagtcccttatcatcattcactcgacgtccttactcgactgccagcttcagagtcttctccattccgcactcaaccagacactcgagcacaaggaagaaaagatgactccagcttatcactcgatcaccctactctaccacagggtcgagtacagttcttaatccgtcccaatactgcgtcgttttgagtattagggtttcagaaaattttgctataagtagcatgtactttacattttcgatgaaagagttttattctgcagacactgtgttcttgatgtttttgtaatccgtatttctcttaatctattcagtattcagtttttgcttttgatttcgtttactgttgttcatcctgttatcatcatgctataactctgttgatatcatgttttcatcctattcaacgtttatgctttctgctatgatgtctgagtagtgactagatttctgaggaagggttagagtagtttagaattctcagaatgctaggtggttgagtttgatttatagatcccttctggattagttgttcttaatgcctattgctttctgatcaactggaatttgagcccagacatttctacgcccaaaaggtgttcgataaaatgcccgaacccctaattccagagattcgtgaccctgtaccaaggtattggttgcagggagcgttttggctttaacttgttgattcttatatgcttgttaggttagctctcggcaatggtgagtgagtctgggactaggttaacttgagagtctctgttgcggtggcacttagatttggttaatgaacttgttgtctagggttaatttattgagcatgtcaatcacctgtaaactgaggaaacgaaactactcaattaccccatcctcggaaattctttatctgattgaattttttttttactctactgttgtttactgcatcttgttatctgtcgcttaatttctgcggttctttcttgttactcaacctcatactcgaccaccaaattgtctggcaacagactgtgcagtcgagtatctgtgttttattttctgtctgttactcctcacctagtgctctgcaaagagctatgttggtcgagtgttttactgcttctgcttgaatttctattttctgcatgttcacttagaattgctagaacacaccacaacctgttattgcttggcttgacttagtgacttctgatcacatcttgattgttagcatcacacccatttggatcgacaaccttcagtactacaacgacatgatagtcgctgtaggtttaatcgactgaaaaatctattatcaatatggcgcctttgccaattgggtgtttgtttgttacatttgacatttcagacttgcttagatcaagttcttttttcaattttcttttcggatactaactatgtgtttttcttgttgtcttcttgatccaggtacacttctgctgtatgtgaactcgatcaacaggcaatcagatgatctttttcgacgacaacatcaaccgcatagctcgcgaactcagaaaaaggagaaccacagtcaaccctgtacctcaggaaccactcgaaatggctgaagaacagaatcaacaaaatggccctgccaacattggtgctggagatgcaccacgtgatcaccgtcagaggaagggaattgcacctcctgctatccagaacaacaacttcgagatgaagagtggtctcatctcgatgattcaggggaacaaattccatggtctgccaatggaggatccactcgagcaccttgatgaattcgatagctctgcaacctaacgaagatcaatggtgtcagtgaagacggattcaagctccgtttgtttccattctccttgggagagaaagcacacatctgggagaagaatctgccccatgactcaatcaccacctgggatgattgcaagaaggcttttctatcaaagttcttctccaatgctagaactgcaagactcagaaatgagatttctggtttctcacagaagactggtgaaagcttctgtgaagcatgggagcgtttcaagggttaccccaaccccatgcactctttacagaggagtactactaaacatcagaatgcttctggataccgccagcaataggaatttccagaacgaggatgctaag

SEQ ID NO: 34621 - DNA, 1862 bp, Arabidopsis thaliana landsberg
  unsure (1)..(1862): unsure at all n locations
tcgctaaaggactcagagctagccgattcaaagctttcagcggggaattcgaagtcaagagcggaagtatgtggggttatctctcgctggtccgcaaactttcnnnnnnnnnnnnnnnnnnnnnnnnnnncaaaattcctcgaaacgataactcagcagcagacgcactagccgcactggccttaagcgccaaccccgatttaaggcgaataatccctgtcgaaagcatagcaagaccgagcatcgagccaccaaattcgacgtacgtgatcgtagaccccgtaacggccatggacatagacgacaacgcaatcaacgcgccgggtatagaagaggatccggaaccatccgattggcgactccccatcaaaatgtacattgccgacggcatagttccaacagatcgataggaagctcgccgactaaaaaccaaagcggcgaactacatgatgctagatggcgaactttacagaccaagtgcgacaaaagctttcctcacttgcgtggatcaaaaagaagccctgacactcatgaaggagacgcatcacggagacggtggtaatcattttggcgggcgagctctctgccttaaaataaaaaaagatggtcattactggcccactatgctggcggattgcgaggtctacgcggcgaagtgcgagccgtgtcagaggcacggcccgatgaagaacgtccctcccgagatactgcgttcggtcacggcgccatatccattcatgcgatgggccatggatatcgtgggaccgatgcctccttccggctccaaaaaaattatgttagtcctaactgattacttcaccaaatgggttaaggcacaggcgtacctcaaggtcaagtcacgcgatgtggtcgcattcatctggaagaacattatttgccggcgcggtcttccttatgagatcgttacagacaatgggaagcagttcgtctcgctcattactagaaacttcctcgccaaatagaacattcgcatgagcaactcgactccaagatccccacaagggaacggtctagccgaagccacaaacaaaacgatcatcgccgggattaagaaaagactaggccttaaaaaggggaactgggcaaacgagctggatagcgtactctggtcatacaaaactacgccacggcgacctacatcgttatcccctttctccctggcttacagcatcgaggcaatggctccaaacgaagccggagttccgactttacgaagatgcatgatgtcaaacgaccactaactgaacgatcagcttttaggcgaccacaatgatttcgccgaagaacttcgcgatcaagccgccgtccggatcaagaattaccagaatgcagcggcgagatactataatcgaaacgtccgagaacgtcgcttcaacgtaggcgatccaggagtctatctgctgatgacaccgacgagaagaacgccggaaaactcggagctcgatgggacggaccttatttgatctcgaagatacttcatccaggagtctatctgctgatgaccatgaagctgaaagaggtggaaaattcgtggaatgcagtccacctcaaaaggtactattattaggttaaaaattagctacgtagaanaaaaaacaaaaaaaaaaaaaatattcatatatttatattctaagtacgcagatcgcctgtcgatctcatttatgtaatacgaactacgaatggcttgatcccttcattgggtacgtaggcagtcctcaaggatgcagctataatacttaaataaaattaaagtttgcattctcaatacggagttcgctttaagatctatgtcaaactctcggcgccctggccaggtgttcgatgcgcgtctcacatggatg

SEQ ID NO: 34622 - DNA, 491 bp, Arabidopsis thaliana landsberg
  unsure (1)..(491): unsure at all n locations
gaccttttacaagaacattgatgttatcaagattcttgagatactttgagctaaacatccggtaagaatctggctaggggtgttggttttggtgtttgattggaagctcatttgtttttctcatgattgttgacacatttgtatgttttcagatggctccaatgcacgttaagactgctcgtgaagtccctgagtatgaaataaatcctagtgagcttgatttcactcaaagcaaagagataacaaaggtaaaaaacatgtttcatctgtaatggatcttgtatctataagtttgagtcttttttgtcttaacagtgtgaagattcttgtttcagggaacttactgtatggcaatgtggcgtggtattcaagttnnnnnnnnnnnnnnnnnnnnnnnnnnnntgagcgatgactatcaagtgtaagtaaatatcctgtagacggttctaacttctaaggttttggattccaattccttaccataatctttt

SEQ ID NO: 34623 - DNA, 1310 bp, Arabidopsis thaliana landsberg
catgatgttccaaaccttcagatgatcaaggagttggcactttctccacgagcttcagtcatatgccaactcgtatatatttgctgagtacttgaactgaatcatataatgttttcatttaccttggctctcgtagcttgtctggtcaatgaagtccctaatagtgcaacgcttgacgatactcgagcaatgcattgagagagatatcaatgaaagctatacaaaaaaacaatatgtaatacgtatttgttaatttttacttgtactaaacaccaacgaggcaacgaccaatggaaaagtgtaacgtaaattaaatgaaaaaatgtaaaaataaaataaaaaacgtcaatttagaaaacaaaaatgaagaaagagttccatatgaagcctggcccactaaaggtttcgatcattagggtttatgtgtgtgcagagaaggaaatcaagtttacattggactctacaggtttttcttctagggttttgttttgttcctatgtcaatggctgtgtttccttttattactacttcgtttacttggcttagttaagacatatcctttgagtcttatagtgtgttttctctcttttctttcttcttctttgtcagtaagagtaacctgaatttgtaaaatagggacaacatcaatggattgcctgatgacttgctgcttaagatattatcgtttgtcccaacatatgttgctgtatccacttgcgttttgtctaagcgatgggagtttatatggatgtggttgcctaatctcgagttcaaatctgtgtggaacccatggcctggaattgtggattttatcaacaagaagttgccaatacatagagctcccgttatagaaagattgtgtatccacataacttctaatgcacacattaaacctgaatatatcaaaaggtggattgaaatcgcagtttctcactatgtacgtgaactgcaaatcgattattattcgaagactgaaatcttatttccaagtagcttgtttacctgcgaatcgctcgtgaccttgaagctcaaccccgtgactctcaaggatgttccctctagggtttgtcttccctccctgaaaactttgcaacttgaagctgagtcgtttttcatagatggaaaatatcttcaacagcttatatctggttgtcctgttcttgaagatctatctctacgattttgttgtaatgcaatttaagagagtcctgtaatcatcccgtctttgcaaagccctcaccttttattggtaattcgaatttaaaaggtataagatagatactccttcattaagtatttaaacttagggt

SEQ ID NO: 34624 - DNA, 1024 bp, Arabidopsis thaliana landsberg
atggccatacgcagcggttttctggaacctgaagttacctcccctcttaaggtcaaggttaatggccatcattcccggcctgaagtcaaatgcttccttgatcaacacaaggatatccttgtctgggatggtcccggtcttgtaggtgtcaacaaacactgagagcggctcagggacaccaatggcgtatgatacctgcacgatacaacggcgtgcgagtcctgctgctaccacgctctttgcagcctgcctcacgatataggcaccgcttctgtcaaccttggttgggtcctttcctgagaaggcacctccaccatgagcaccccaaccaccataagtgtcaatgatgatcttcctccctgtaagtccagcatcaccatgaggccctccgatgacaaaacgaccagatgggttcaagtgaaagatggtgttatcgtcaaggtacttagcagggataacaggcttgatcacatgctccttcaagtcagcagcaatctcatcgttggtgacagtttcgtcatgttgagttgagataagaacagtgtggactctaatcggaatcatagctccaccatcgttcttgtactccactgtgacttgtgtcttaccatcaggcctcaaccatgggcaagtcttgttcttcctcacttcagtaagcttagcaccaagcttggtggctaggacatgagtcaacggcatgagctcaggagtctcatcagtagcatacccaaacatatgtccctgatcaccagcaccaatatcttcaggcttcttggtcaaatgaccatgaacaccctgagcaatgtcagggctctgttgctcaatgttaaccaaaacattgcatttgtcagcgtcaagaccaacatcagcagagataaaaccaatctccctggcagtggatctaacaatcttctcatagtcaactgtcgcagcggtaggtgatctcaccaaacaccatcaccatgttggtcttggtgcatgtctcacacgccactttgctttcaggatcttgctctaagcaagc

SEQ ID NO: 34625 - DNA, 26 bp, Arabidopsis thaliana landsberg
cgcggtcttgagattgctggtcagaa

SEQ ID NO: 34626 - DNA, 1309 bp, Arabidopsis thaliana landsberg
tgcaaaatgggctacaactgtgtattcactgaaataggtgttattgtctttagaagaagtgatgattcaatagcatttaagggagtgtttgagggtcagctatatttagttgattttaatgataacaaagctgaacttgacacttgcttaattgctaagataaatatgggttggctctggcatcgccgacttgtccatgttgggatgaagaatcttcacaagcttctaaagggagagcacattttagaactaaccaatgttcattttgagaaagacacggtttgtagcgcatgtcaagcagggaagcaagttggagtccaccatccacacaagaacataatgacgacggacagaccgctcgagctacttcacatggacatattcggcctgatcgcttacataagcatcagggggagaaagtactgtctagttattgtggatgattattctcgcttcacttgggtgttctttttgcaggaaaaatctcatacccaagatactttaaagggattcttgagacgagctcaaaacgagttcggcttaaggatcaagaaaattagaagcgacaacggaacagagttcaagaactctcaaattgaaggcttccttgaggaggagggcatcaagcatgagttctcttctctttacacgccacaacaaaatggtgtaatggagaggaagaatcgaactctattggacatggcaagaaccatgcttgatgagtacaagacttcggatcggttttgggccaaggcggtcaacaccgcttgctacgccatcaaccggttatatctacaccaaatcctcaagaagacatcctatgaactcctcaccggtaaaaagccaaacatttcatattttagagtttttggtagcaaatgttttattcttgttaagagaggtagaaaatctaaatttgctcctaaaactgtagaaggctttttactaggatatgattcaaacacaagggcatatagagtctttaacaagtcctcaggactagttgaagtttcttgtgatgttgtgtttgatgagactaacggctctcaagtagagcaagttgatcttgatgagataggtaatgaagaggctccatgcatcgcgctaaggaacatgtccattggggatgtgtgtcccaaggaatccgaagagcctccacatgcacaagatcaaccgtcctcctccacgcaagcatctccaccaactcaaaatgaggatgaggctcaagttgatgaagaagaagatcaatcaaatgagccacctcaagatgacggcatagatcaagggggagatgcaaatgatcaagaca

SEQ ID NO: 34627 - DNA, 1211 bp, Arabidopsis thaliana landsberg
gaaagaaattgatcgagaaatgttttaaagagttaccgagaagtaattagcaaaagtggtcaagatcagattccgcgaagaaaaaaaggaacgtgaagtccgatgagttcctttgtaaagagtcgacaaaattcgaagcagagacatttggttttttttcttcctcaagttttgtcagacgcgaagaatccttaaaccctcgagtatagtgaagttgctcaccaggtgttcgacgaaattactttcaaatcatttggttcggttcttcattggtccaaattaacctgaaccgaaataactaaaattgattttaactatattttcaaactttaataaaatatattaatccaagctaaatgttcaatcagtgattctaaattatgcattagaattagtgttcaacaaaacgctaggtgctaaacgggtggtgaccttctgcttagtgcctagaacgcttagtcggaacctaaacattttaaacggttttagaataaaataatatctatttatatactactacatgaaatattaaaaaaaaacattacaaaaagcataaacgaatttaaatttaacattttaaaataagataaataaataataaaagtatagttatctttatatataatttgaaatatttatttttaaaaattaaaaaaatattaatatacatttagatccacctatcctgccccgcaaaccagattagttttcatttttgttgttatcttatatgaatcaaaatgcaaaaaaaaaaaaaacaaattctggatcttaagtggtgaatgcatgcattagtaaataaatcagcccttttaagataatgtttattcataaataatacacagaaatgttttcaataggatgtgaagtaaataaaaagcagaataagcagagcaaatctttgacttatcctaagacattgcttgatagagaacacaaactttgaatcttgcaagaaacacaaatttgagtgacattcaagattttttcttgatctgatgatcatcaaggattccagaggatggtggtctctgcaatcatggaagtaacaatgtaaggatccatgttcgaagctggcctcctgtcctcaaagtatcctttcccttctttctccgtatcacgtcctactcggccccatgctccacggttcgcaacaccctacaaaaaacattccaacacacaaaagaatcacaaaatgtatcgtaattcgg

SEQ ID NO: 34628 - DNA, 707 bp, Arabidopsis thaliana landsberg
gaaaaaccacagaaacaccatcttatttcctttcaaacaaaccattacctttagtatgggcacatataaactcgactctggatcaacaaacaccaactcataaaacctaacaccatcattccaaacattcaccaatcctttctcgattgaaatgataataacatgcacacctgctatattaaactcataacaacaaccacaactcctgaaaactaaactaacaacccttacattcaccagaataatcctatctacaatgttcactaacctatacaattccccaaaaggagcgcaagaacgtttaggattcttagcattcgcaatgtcaccaacattctacacatgtcagaagcaatcccagtctttctacaagaacgttacatattcatgagagaagcagcttcacacgcttaccgaagatcctcctacgtcctctctcaatccataatctcaatcccggccttaatcgtcctctccgcaagcttcgccgccacaacattctgggccgttggtctcgacggaggcgccaatggtttcttcttcttctacttcacaatcctagcctcattttgggcaggaagctccttcgtaacgttcctctccggcgttataccaaacgtaatgctcggacccaccgtcgtagtagcgatcctcgcttacttccataatcatctccggattcttcatctctcgagatcgaattcctg

SEQ ID NO: 34629 - DNA, 1183 bp, Arabidopsis thaliana landsberg
gattaattttgtaaatttcagtttcgccatattcacccccctctaggcgactttcaattggtatcagaggccggtgcttcattaagagcctaaccgctcgaagtgatgtcgggagatcacgccaagagggagatggagaccggcgacaagcccaccggcgacaagcccactataagtcacgggaaggcttcatcggaagagtcccgcaataaaaagaaagggaaggaaaagaaatcctcttcccacaagtcgcatcggaaaggcgacaagcacaagaggatgaggaaggtggtctactacgagaccgacacttcatcaacatccacctccgactccgatgcaccgtccgtaacttctaagcgccaagagcgcaagaagtttagtaagatccccttacactatccccgtacatctagacatactccattactttccgttccattaggcaaaccgccaacttttgatggtgaagattatgctaggtggagtgatttaatgaaatttcatctaacctcactccacaaaagtatatggaatgttgttgagtttggagcacaggtaccttctgtaggggatgaggattatgatacggacgaagtggcccaaatcgagcacttcaactcccaagccacaaccatactggtagtgtgtgtaagttgagaggagtataataaggtgcaagggttgaagagtgcgaaagagatttggcatgtgctcaaaaccgcgcacgagggagacgagctcactaagatcaccaagcgggaaacgatcgagggggagctcggtcggttccggcttcgcaaaggggaggagccacaacacatgtacaaccggctcaagaccttagtgaatcaagtgcgcaacctcggcagcgtaaagtggcatgaccacgagatggttaaggttattctaagatgtcttattttccttaaccctactcaagttcaattgatccgtggtaatcctagatatactccaatgacccccgaggaagtgataggaaaatttgtgagctttgaattgatgatcaaaggctccaagaaaatcatcgagtaaggcgccccctccacacccgaggtgtaaccggtcgcattcaaggcgacgcagcagaaaaaggaagaatgtacatcaagtagacttcccatagacccctccaagctcgacaacaaggaaatggcgctaa

SEQ ID NO: 34630 - DNA, 1307 bp, Arabidopsis thaliana landsberg
aaaagggaagagcgagaaaaatagaaaacgcggcgagagaaaattatcgattgatggggaaatttgattactgatttgattacggaaaatttcacaaaagtagaagagaggcttatcttgttgaattagacaaaaaggtcaacaactactaatagttgcgtacttatttgtataaactgtgaagtctcttcccacatgctaatttatgtaaattaagctttaccttatctttttttcatttggcattattattagaagaaaacatcttagtcaagtcaccatataataatacaacaacaaataaaaacaataggtcccatcattagttatattaaattcttgtataaattacatattaaactttcgaattggatgccttttacttctgtaccatctatattttaaaatagtatatactatatagagaataatttgtttttcttactttttgtcggcatttattaaaatttcacagttttcccaattattcaaaaaaaaaaaaatagttaatcaaatagataaccacatttgtaaacattctttaaatggtcatagaaataaatcaataatattgatccttttctcattttgagaacaaactaatgtcgaagtttattttttgttgaactaatcaacatctaaattgaatttgtcaatagttatcttcttctattaattatgaaattatccaaaagtctatgctttttaaatttataatctgttttactttttcttcaataattaaacatattatgccgacaccaaagttaacattctaaccaaacacattatagccaacacataataccacatatcctaaagagttgaaaacgtaaatgctaaaaagaggtaagacttaagataagatcagtcataatacataagaaacatcgaaacagaaaaattaaagaatatttcaagaaagtaagaaacaatgaataattttagtattttatataataatgctttatgtcgtacaaatcaactacaaaaatcaaaataaaactatataaaaactttgtgggataaaacaatttctttctctttgcttttgatatgttttttactcgctgtccctaaggctttcactggtgagccaaagtttcttctggacaatgaaaacgacattgttctcaccatcttcactgtcttggtcgagttctgaacttgtatttaccttctctgatgccacagtctcccaatgcagagcctgcaaatacttgttgattgactcaacaacactctgcttatctctgatgataacgaatccccgatgtctaagaatccgatccatctcgatagtagat

SEQ ID NO: 34631 - DNA, 1198 bp, Arabidopsis thaliana landsberg
gtaatgttatatgtgactaacgtgtgttttgcagagacaaatggtaagttaggtcgcattacaggtagatgtgctacacaggtgaaaaaaatctcgaagataagaactcgaagcgacggctaaagcgacgaaacaaagagtgaaggtctacgtagtccgagtgtcaaggagttgtggacactcgtgatttagttaggtcttttattttgttttagtcgtactataaagaggggttgtcgatgagtagtttgaccaagagagttctagtgtagtgttgttgcatattcactcacatatagtgctaggtgacactctagaacacactcacaagttagaacgaaaaccgatttgaaaatcagcagaaaatagaagttagggtttctggcctttgggaccggactgtccggtggccctctgccaggtggggctaggttggccggggaagggttttcccgcgcagaaacccgagagcgcatggttcacgagatgaattttagtggcgcaccggacagtgcacccgacagtgcaccggactgtccggtgtgccatgagtccaacggctagctgtcagaactagccgttggaaacgaccgttggcgcaccggtggcgcaccggactgtccggtgcgccattgcgcagtgaggtgcctataacggctagttggtgggtgagggctatttataccccttccacccaccatattcaatgtcttgcactccacatttattccagcaccttggtagagcattgcaagcaccaaaagcctagtgaggagattagagaatcataatccgcgcttgttcctcattagcgctagtgagagccacctagagcacacaccacttgcattaggcttctcttggtcaagcgaaagtctatggcttgttactcttggtgatcggcatcacctagacggcttggtggcgttgggagctcggtgatcaccgtgaagatcttgttggtgacccgactcaagtttgtaagcggtctcgagggatccaccgcgccggagtggcaaaggatcatctcatagtgagcacttggttcttgcgaggaccaagggggagcgatacccttgcgcgggtgctccaatgaggactagtggagagtgccgactcttcgatacctcgggaaaaattggaggagtcttctaaactttgctttacattccgcacttaattcaagccctttacattg

SEQ ID NO: 34632 - DNA, 1757 bp, Arabidopsis thaliana landsberg
gaacgtgttataaaatagttcggtttatactttttattaaatactcctgtagagaaagataacaccgaaatttgtcttatcttatcggaagagtttcattgtatttattaaactatgttctcaacgaccttcaacaaaagaaaacaaagcaacttcaactaatttttttttagtatttttttagccgtacttgtttctttcttcacacgtagtttactttacttgtttttaaaagtgtttacacactttttactaaattaattggattgcaaatatgaagtggatacgttacgaagtcgaccaagacgccaagaccgactcttcaccagtattgagccacgtgtcttctgccaattgttttgcgaggatactttttggcatcggactggtgcatctacatgacgtggcctcttgtttaatcgtcacctggctttccaatttccaaataaaatctactaagctcttgctattttaagctttttatctgctaccatatgtttcaagttttgatattatcttcaaaaatatgggaaaataaatacagaaaaataaaaaaaaataactgtgagtatgaaaaatatggggcgattattggatgataaaaagaaggtatgaaatttctgaattgaaaaaaatacatagaaaggcccttagaagaggggataaattggtgaggtaaattttgaatcaaacattaaattaacaaaaatgtagtaaaatagggggaaaaaaaagttttttttttttttttggaaatgtgtatgggctagtagcccaaaaacaaggaaaacacaaactattggactggactgatcaaaatagttaatgagcggttttggtttatgtaaaaaagagaatgggccttttagatagactctttaaatagaatttgacaatctcttaagttatctatttatggataaataagtgatccaactttaactaggtgaatttgacaatcttaaactagtagggagtctcactcatgaacattttacatatttatttttaaaatactacactttcttgaatacacagctttttttttgggtgatataataaggtatcttcaaaaatttatatatgaaatcagatcctaatatcttgcttttactgaaaccaaaaattgtgtttacaaaacggctcacatatcggattggcactcaaaagtcaaatcacatattttgccacggattttatataacttcaaatatatggagaatggaatttttgtatttttcaattagaaaaaaatactatagggaaaacagagatgggcaggtctggcacagggcgtgtgagacgtggtcggattgaggcaacctgaattttgcatcttatctaaaattcagatttgaccatcccactcactgtataaaccactccacattatcttttttatttatttcattattactcttttgtgtacccaaaaatgtgagacttattggtgaccatacaagtcataatttattcttgtcgaaattaatttatatataaatgtatgtgtatgtgtgttgtagatacgaatatgtgtcaacgttgctgacacttatctaattatcattattgtgaacaaagagaggcttaagagtgttcgattgaagtagatatttaatactatttgtttggataaggtagtgttaattcaatgcagtgcgcggccaaccaaaaaataaaaagatcaattgcaacgtgtatccagttatgggtatgattgggagcgatagaacttttacataaacatacacaaatca

SEQ ID NO: 34633 - DNA, 1036 bp, Arabidopsis thaliana landsberg
ccggttcaaaaatcagaacatcagtcctcagcactattcacgcgtctcactgacacgttacattaaggtcctctattttctatttcttctctagaacagaccttggccacaacgcgcatgccgtcgaccaccctgttgctcggaccggccatgaccggcggtggctgcccaaattaactaatgggcaagcatcactgacccgagatgaacctagaacaagatttaattgggttattatggccatggcttagcccgaccacggcgacggtgaataccgaaaacaaattcaagcgttccggatgattgagtgtggtcaagcataaagggttgatctgatgagtatcacgagtatgcatgggtgctaaaacatgatcaaggagagcaggagcagacctgggaacggctggccacggtgcgcggagaattctcactcgcctgtgactgagaaggggaaaacgatgtcgcgacgggctctggtggaatgaggaggtcatgttggggctatacggcaaagggctactgattcaccgtgcacaaccaattttgggagaggtggagaggatttcggaaatttgtgcttcaaccgagttcactgctgaagatgtgaatacctcgtcgtgggtggtggggcaatttaaaggcgcggtggtccggctaatgatccacggccgcggattacaccattcgtgcatggttaccacgtaaaaagggacacattgagcgaggagcgaggcatggatgacacgacggcggaaatgaccgagccacggcgaccgccggtgaattatctccgactaggatcaggctaggtccacgaggtcgcgacacgtccaaagttacctccctgcgaatatccatggtgtgccaggcacgaatcacggcgaccggcgcgaatccgggcgcgcggatcgctgacggcgagggggactgaaccctaggatatttcagtgcactgtaccattggaagcttcattagttgttctgaccgaggatcttcagaggcatttttcttgaggggatcctctagagtcgacct

SEQ ID NO: 34634 - DNA, 3005 bp, Arabidopsis thaliana landsberg
  unsure (1)..(3005): unsure at all n locations
gccttcaaatcagcaaattccctttaacatttattaagcaagagtcatggatcatactacacaatgcatattaatctcatttggctaagggcaaagggtcaagagacaaagatggtcccttaaagaataggctttagtgactagggatctctcaaaaaaaatgattaagctctagtagaatgctaaaggtaagtcccaagctatgcttacaaagataagatcccatctacccaaagtatgatcaatgaagacctaatggcaatcccatctcccatcctaattaagaacttgactctacccttttgcattcataatcttttgaactctttcttaacccattcttttctttttctcttaactctaggaagaagcttttcttttctctttgatacttctagcgggtttggctttctttagtactagnggtctgttttttgatatctattaagcttagggctttttacccttctttatttgctaacaataacccaatctctttctttaacaatctcaaaccctttactagactttttctaacttctcctagaattcttttcccttttcttgtaaacaatgaactcaaccctttttctcttttaaactcttcccaacccatagaacaagtacccacctagtcctatctagtccggataacgcgaactagaactacatgagatactatctttgtcgttacaaacctaacactttctaccaagcttaatcgaaaataaacctcacaaacactcacaagtgatatatggcttgaaagaaggcttaggttagggtatggggaaactgctctaaagatgagagacagctatttggatcaacaagagtggtgaaatgaataagaagatccaaatattttaagggtgaccatgagtttaacaaacaatgcatagtatgataattacaagtcaaattatggttcaaattgatagggaatagcttcaaatcacagcgagtttcgactaaggaagatcaagtgtatgaattcaaaagatggtgcggttttacttcaagttcattcagttaagcactagacaactaacaacaagggcattgaaactatctagtgaacattgcaaaattacaaggctatgatcatcattatcccctatgcaagtgcaaaatgcaacaacctatatgataacattctaagaacagccctaataatgcaaacgcaaactacatgacactctatttttttttttggaatcattttcaaaaattttcaaatttttatgggttttctatgccttagatgatgcaaaaatttgaataagaaaacatgaaacaatgttagatacatcttgaaccctcccccaaacttaaattacacagtcccttgtgtaataaaaattcaaagaagaattcaagagaaataaccacacaaagcaagaaataaaagaaatgcaataatatgtacagtgaaatggattgataccgcagtttttagctgaagtatatgcgggcgaactcgtccatgctctcttgagtgtaggaaggagcgtttgatggaggcgggttgtactcgtttggtacgtcgagttgctcggccgagtacctctccgaagtgctctgctcggcctggggagcgttccttctcttggtcttcaccttcttccggtgcttagtggtggatgcctcccgtggctcataagaggaggctcggctgggctcaaatgacggtccttggctaggctcaaccgggttctcactttgctcaaatctatccgccatgctcgtagaatcgcttcgacggacaactcggtcgttttcacttgaagggggaggagacttgtgcttcctttggagttctttgatttggagtcccatctccttcaccgcgtgcgcgagagattccactttcttggtgaggcttttagcaaccttcccttgtaactttgccaacccttgaagcaatccgaccctttggtgagctgctctctcgctccttgattgcctagtggcgacgtatgggtcaaagtggaaccgctccgggaagtactcgctagcttcatcttgcggttgctcatcggtctcgttgtaaccggggtgtagaggctcttggcgaggtggcggtatgttctccggagcatcatagagtgcatggataggagggtagaaattaatgttctcaccgttcctaatggtggtgtagttggcgcaaggtaggagcagcctagagctcccctcatcggggtggttgaacaagtaggtatgcacactggagggggctgtcttgtccaagatgttcttcttcctcaaataggcaatgtcaatccatgccgacgatctatctggtcctcctaagtcaatacccacagctactaacataggtgtaatcatacctccaatcccgattgatcccttgcgtttcatcttgtggagctgagccgcatagtcctttaaccccatcaagtagtccaagaacaacaccgtaagagacgtgttagcccgatctccttccatcactctcccgttttttgttttccttagaaccaacttgacagcttcatccatcatttggagcacgctatcgttgataggacccgtcaccttcttcgcgtaaaaagtatgagctatgcattggtggaagtaccttagcaccgggctgcgaatggatgaactcttgcaccgtgatgagttgaaatcgcccggagccgctattgtgttccaaaactgcgtaagctcaagcttgtcaaaatcttgttcaagaccctccttggacgggaaaccgtagaggttgtctaactccttgatggtgagagagtagtctcgtcctcccacggtgaaagtagcgtaaccgaaacctctacccgcctgttcttctccttgagctgaaaagaaatgaacctccaaggttgctaggagctcgcatgtgtagtcttggtagctctcgaaagcataggtcatgtatcttgtcaagccgcacatatcaaacaagaactccacgtcttctcggattcccaaaacatccatagtctcgccatgcggatgct

SEQ ID NO: 34635 - DNA, 587 bp, Arabidopsis thaliana landsberg
gaaaacaatctctttggtcaacaaaaaaaaaaaaacaatcactcaagcgacgaggaatggtaaaacagtgagcatgaagttctcgtaattgaaagtagctgagcctgataacgccgtatccttctccttgaacttctcggtgagcccctgcgattattttttatcaaaacataagatacattagacacattgtaaaggaacaatcttgaatatttcaaatggtagaattgcatgagaatgtgacgacccaagccatgaaaatagcatacctttacagtcaagcaacacctgcatcaatggaaaataaaccagaatcagtgatgaattatacttgttacagagtaggataaggtacgggggttgaaaggattgaccatactcgatgaaattgccatattcgatagccctgttcctgcctccgcttttgtcaaactttgaaaccagcagaaccaaaaccacaggagaaaccgaaaacccaaggctcaaaagcgcacctctcagctcattcacatctatccttccacccctgtccctagcagaccccccaaaaatggactgaaccaataccaaaacaaaccaaaccacaa

SEQ ID NO: 34636 - DNA, 610 bp, Arabidopsis thaliana landsberg
tcaagatcaagctgaaatgactcgacgatgcgctgacttcgaggaaaagtattctcaaagtcagatcgagttgagtcaggtctctgcggctttggatgatgctaacgctctgagttcttctcttcatgtccagcttaactctgagaaggtagcttacgaacctgtgcttcgccttatcatgctcttggattctgaatgagtttgatttttgcttgtaggaagaaaaacgtatccttgctgcttctcgcgacaacttggacagattgtaccgggattccagtagctcgctgaccatcttggagaggagccaccgctttacgatggaggagcttgacaatcagcgccgtcaactgcaagaatcttcggacgaagtggcccgccttacacagttgctatcagcaaaggatgcctccatcaaggaactccgagcttccaagaaaaccattgcccgggagttagaaaccgctcagcaggctgttaaagttgctgaagaagctgctgttactttcaaagcccagcgcgataaggcctggacaaggccattcggccgggacgaatcttgatgagaagacctggcgtggttgtcccgaggatataagagccgatgtgg

SEQ ID NO: 34637 - DNA, 606 bp, Arabidopsis thaliana landsberg
gcatctctaagagcaaacacctaccataccaatgccaacaacaacaattccacaagcaagacttaaagtttgctcattttcagtaacccaacaaagaaagattgaatttttgttacctcagcatgaggctgaccagctttgggatgaaacccttggccaacaatgtcaccatctttgacaatgacacaacctaccataggattaggacttgtacacccaattgctctttttgctagctccacacactttctcatataaaacgaatcatcgacttcaacatcttcttctcttctcatggcagccaaaactggattgctgaaaccagtctgagatttatgtaatcttttgaagaaacagtgatttgggctctgaagtgaagtgaggttgaaaatgcggcgaggatttgaggagagtgatggtaagagtggaattgaggttcgaggagtgatcgaaggaatcgaaattgggagacatgagatctgcatatcactattgaatcttgttcttcactaaaatcgaacctcgaagattaaattgcggattccggccgtctccgtcagcagcggtgagaatacagccgaaaccctaacatcaacggtggtagag

SEQ ID NO: 34638 - DNA, 1056 bp, Arabidopsis thaliana landsberg
tttagcccgcgaattttgtttgtgattatattgaattacatttaatatttatgtaacacatactgttttcttattttaaaaatgttttatttgtcggcacatataagtggcattgcattaaaaatttgatatgaatagatgaaaacttgctaattaagaagcactctattgatcgatttaaggttttatttgtgagcattacttttacgtaattcacgacaagactgcttcatttgcaaaggtaacgtgtcaattcagcttaaaatatctttttcttattttgttaagaagaagttgctataatttttggtaaaattgttaacatgtgacacaaactaatttttcgtttatatttttcgttaaactaattgttcaggttatttttctatttttattattagtcgctgcacgttttaggtcaatatatatagttttaaaggttattgtttactttttaccaagtctttttctaagcctcttgagaagcaacttgttccagagcactttcataagctatgcatcccctgttttcagagtttcatcagagatttcaataacattgaagaaatcttttctaactcttttctctattaatctgtttatgctttcttactcatacatgttgtttgtgtcatccttcatgtctgagtagtctgcttgttagggttagggtttctcattagggattcatatgatttagtagattgcccccatcctaggtataatctgtaggattcttcatctttggttgttcttaatgctagttctagagtaattaactagaacttgatcttaggtaataggtatacccaccataggtacatgttactggaactactatttgatgagccaatgtttataggcgtctcgaataagattggtctatctacttaggtgaacttatcaatttcgtttagaatgcatgtttaggtataggatttcacggcacatcaccgagaatcttagctctaggcatagtgagtagcacggcaaatcactggttactcaataattacggttttagttcaagaacggttcgataacaacctggcgatt

SEQ ID NO: 34639 - DNA, 646 bp, Arabidopsis thaliana landsberg
tattagcagaaaaaagagagagttagaggcaatcgaatggttggtaaagtaatttaatgttagccacaacttgagcgacgcttttgtcaatgcattgcgaaattaagttaaaaaagcatgtgaaatcatcaacacgttttcatctataagtgaacacaaaatagaaaccttgaaatgacactttactattaaaatctgattaatcaatgtgattatgatatacgtatatagtgatcttaaaaagagagaaagaagtataacaaaagctgtatatatgtatatttatgacctagctttggtcctttggaagtaatttggttataggatgtctaaaaattaaatgtcattggtaatattgtcagaccaattattgttatcatgtagtcatttttgagttacggccaaaatatgaaattatagaaagtagttttcattccactaatagccgagagagctggtttgattatgtaacttctaagagcatctccaatggtgtaaaaatggagctctcttcatacgttctctgttttcaaattgaaactctcttcaaagagatttttgaaaacgaagagagactattacgtgtcacgttatgattggccggaatttttggcaaaacaagaagaaaagaaaaacgattctttga

SEQ ID NO: 34640 - DNA, 2523 bp, Arabidopsis thaliana landsberg
ctctttccaaaagtctgaaatttgagagacaaaagattgaagatgtgtatacattgaatttcaggtaagtattatgtaacgccccgaccgttcctaccagtgggcctcacgtcctctctcgggtccatgggtccactcctgactaacgtccggtgcgtcatgtctggaaggctttaaagacttgttaccatccctacaaatcactacatgatcttaccccatgctttatcctcactcgcatggttctgacaatcactttccggaaggttacccatcctaaaactactccagccgaagcacgcttaactgtggagttctctcaggacgtttgaccgaaaagataagtgcactttagtgataggtggccaaatcaattcttttaaacctctccgcatacaccaccatatttttgaaatcgggatgttacatattatatttatttttttcctttaaacttccatgtattaatttttccgtaccctattacaggatacagttttgagaatgtcacatgaacaattacaacagagcagcacaaaaagaaattacaaataaaaacagaaagtaagagataggtacatcatcaattcaattcagggagaaaaaaaaggcatttgtaggtgagaactggacgaatctaaaccatttagagaggtaattctcaccaagtaaaggtgaagacgctgaaggtgtcctttaccttaacatcataaattaattatcccgtatttagtacgggtgagaatactagtaccctataagacgaaaccaacaaaggaaattttgggactaattctagttagagtcttgtagaagacgaatataccaccacgggatattgtgcttactaagagtttcattattctgaatatggatagttttatatagtagccgcccatcggtggcattccaagtagttcatatagtatatatgctttaacatttggattttcttaatgcagaatttgatattatttgcatacactattactaagttgcatatattttcatgagcagacaatttacattccaagtgtggattaatgatacttagtcgagaaggacacattattatttatttagagaaagacaagtagaagggatatacaatctaggatcaaaaactctcatgacacattggcaaaccggaaacaacttattaaacagtactagcaccatagtctagcatttttttttacaacatacatcgatagacgacaattattccatgaaaacagtcacgccactctgaatgatgaccacccttcacttttaaatatacttgtttaggcacttttaactgcggcggtagatcctccggtgcagacagaagaacatgccttggtgcattgttcaaccgcttcactcaatactttacttgcgtctagtcatggaaacaaaacaatattactttgaattattcctttatcttaaaaaatgttaataataataacaaaaaaaaagaaaaaaataataatgtatagtgaacttgttttaccaaagttttggagagtggtcaaggcaccacacacagaggatgcacaccctagcttgcaatattcattgacagcatcacctaaggcaaaaatcaagatacatgcaattagttgcatacacaaatgaaatttccatccatcttataacaaatataacttaatagaaaaaatagatttataccataattttcgagaatgtcattagtatatcccggaggacatatcgactgagatgtatttttgcatttactctttaatagacaataaaattgggatgacacggaaagcatgcatacaaaatacacagatctatcatccttggtaggacagcagatttttgcttttacttgaatctgtgctaagacaagactcattatgagcagacttgagatcacagttttgccttccatcttttgattgattacttggttgaacacaaaatgtacgtaaacaaaactcttagtgataactataagcttatcttgatgaatttgtgatgaagcaacactccgttaaatactagttcttctacaatttgcatccacgaatttcattgatttaatgctctattaagtctactcagtggctaccacatatagatgaatctttaatggtgttcgtcaggggagatggccatgcaacaagattggcttaaatactagttgttcgacaaatttgcatccacaaaattcatttatttaaagctctattatctctactcagtggctatcacatatactgcgcccactcccatgtcagtttctagggggtgtgggggaggtgggggcaaaagccattgccagggtgcatggcaaattttttaaaaaaaacctttaagtaaaagagtcagaaaaaaaaatgagaaaaatcgtgtgaaaaggatatgtaaatttagttttacctagggtctaaaaacatattgagacgggactccaccataataaatctttaaaactaatggcgtttgtctagggagatggccatggaacaagattagcttaaatatactagttgtattagacttgcc

SEQ ID NO: 34641 - DNA, 2871 bp, Arabidopsis thaliana landsberg
ttttttaacataaggaacattttacaaaatcaaaattgtcgacatccactttgcaattccgtttagccgccgttgcaattccgtcgtgaccggtgctgttccaaaccgtcgtcgttccaaaccgccggcgttccaaattgtaagtgtagattggaacggtttttgatttttgagtgttttcgttgtgttgatttgaacggtttccttgattgttgagtggttttgcaaggtaatcatgggtcgtgtaaggttagtcactcctagttcgagtgaaagtgaagacgagagggtcacgatcatccgtgaagcggatatgaaccgtgaagaagtggcagaggaaaacaaatttgaagacgaaaactgtgaacaagagcctccggaaaaccttaacgaaccggaagaagaaaatatttctgaggtatatacaaatttatgaaaattttgtgtgaatattgatatagtgtttagggacaactagaaaacaatgagtacaagttaatagtataggtctgtgtaattgatgcatggatatacgtgattaatcatacattgggttgcattagaaaattgaattctgagaaaagttgataatgttgttctgagataactagtacaagtagtacagcaaaatattaattttatggttgtgtatgaattttcaggaagttgatgatgaggaaccaatgcagtctcaggccatggaagaaaaccctgaagaagagcaaaaagaaggagaagaagaagaagaatctgaggtaaatggttatttctgtaaattgtgtttgaatattgaaagtagtgtataggaaaatcaaaaccctaatttcttttcaatccaacccaaaacttaccagagaatttggatctggcgggattagattcggcgtcggcggaggttcgtcgtgttgttcgtcggcagaggttcgtcgtcagagaagagagaaggagagaagaaaagtttttgagagaaaaaaggagaagaaggaaataaagaaagagagagaaaattttgtaatttaatgagaaagattctttgaattaaaattgaaatacatagtgtgaacgcatagtgtgaacacacaatagttattatggtaataaaagtggaatgcgggcccagacaaaatactgcgcagccgtagttgtgccataagttattcagttgtccggtactcaatttatttgtactttgtggaagttttagtatttagagttggacttcattaagggaattaacttatagttggacaaatgatataatatgtttaataataagatataatgttatagttatataatttgtacaaatatatgcgttttgccatgtttatgtcaagatggtccaacatgatacaatgcataccatataatgtaagaagtgttttctgaattgatgagtataatatgttcaattgttttttagattgtatgataattagtataagtgattaataaatgttccagaacaatgtatagaaagattttccaagtatgataactttttctttataattatgagaaaaattaaaaaattatctcctttttaataatatcatattttagtagataaaataaataaactgtatttgtctcataaatagtaaaaattaataattaagattttgaatttagtttattcctttttctcctacaaaattttgaataaatattaatatcgtatttaatatgaatatattaaaaatacagctttttaaaaattgttatttaatatattagaaattatctacatatatatttttacagatattttataaaataaatcttgaagttaggacttatttacaatgattgccactggattttaatatttgtttttgataattagaaaaaaaattttgaattaaatatttgacatttaacaatcttcctaaaatctctcgacattaactacacgattggttactaaaataaaactttcaaaatatttaatatcatttaattactacaaaattatcattattgatattgtttttctgcatgactattacaattcgattataatcatcaaaccgcagagatatctgatagcatttaaatgatacttgattattttatgaaataaattgattgataaataacttaatttaaaggtataatcacttatagaaattttcatgaatgactagtttaatgtatcttaagaagacatcataattttgatggtcaaagttttttcaagaacttaaattatcaccaaaagttgagaaaataaatatggtaagaaataagtaaaatttctaacttttaacgatgaaataatctagtatatcaagtagtataaaatcttattaaaaggctctagaagagaatatacactgttttttgtgggaatacaaaattaatatcattgatggggcatagttctccaaatctcaaagttaatatgatgagatataaaatacataacctaaaattctgattctagagtggaattcaatacgagatggatgaacttgaagtttcatcctctcgaggaggagaagtaatgaatctcacatggataataagtgacatatctagaagattatgttcaatctttgactactaaagatctaaaagttgtataaagcaattcttatacgaatgtgttagataaaataagttataattagttattactaaaacttcatgacttgaagtctctttgtgaatataactcacattgttaagagaatatctctaatgcagagatggtaaaacagacgcttaaacttttacgcaggtattgttgtcctgtagacacataattttgaagaaattttaggaccaataatgaccttaatctagtggttttccaaggccttagaaatttatgaggtaatgatggtaaggaataagggtaggttggaa

SEQ ID NO: 34642 - DNA, 752 bp, Arabidopsis thaliana landsberg
gacaaaaacttcaggatgctcaacagacagaacccactattcttcttccggaaaatagtgtcaatcatagagcaaataggaaggagagtaaaatgtttcaagtaatataatatgatatctcaataaaagaaccagcgacattaataccagtctgtgtgatataaattttctagactgcttacctttctgttgtcttcaatataagacctaagaaaatatctataatacttctccttttcgtcttcagaagccaacttatcgatcatatcatgaccaacagcagcaggacaagatgggtcgggacattttagcatcaaacatcctgggccatcattgatggttgtgcttatataacctacaaaagtgctcagtataaaacgaaaggtatcagaaaagagatgttttagtaggaaaaacagtatataaaacttagatctacgcattccagacatgaaggaaactaaagcttaacaattaaattcataggcaaatatcttttaaaatgtgtaaaccgaaatgctaactaaataaacactcagataaatccaaggaaagtaataaatcaacaatcgctgtttctgaagaagctacagatgtaagcatctaacgataatggagggaaaaaacatacctgtccaacatgtagcgcagaaaggatgaccacaagaaaccgatacaatttcctcaagagtgtaggaatcaaagcatattccacatgtaaactaaacatcaaatcatgcgtcagtgaaaca

SEQ ID NO: 34643 - DNA, 3700 bp, Arabidopsis thaliana landsberg
ctgagaagttggaggagctccataccctgcctgaccagtactaccttgagcaggcggctgttgaccagttgtaccatacccagcctgtccagactgagctgacgatggtggagcggcttgagatgcatcttcctcttgacttggattagtggtgctgccgtaaccaccctgttgatcatacccagcagcttgaccatatcccgattgctgcgaggcattgtaagctccatacccatcttgctggtatccctgaccagcttggccataaccagaagcatgctggtagtaattgtaccctgtggtatctgttggtggagctgagctaccaccactgcttggttgctgagactgttgctgaccgtaataatcatactcaccttgcgcgctctgctgggatggtggcacagaggactgatcatagtaaccagctgaagtttgttgagggtaacttccgtaaggtgattgaccatactgaggtggacctggatatgctcctggttgcatgtaaccaccataaccaggttgtgctggcggaccaccaggtggtgcccagcttgagggtgggcgggcttgataaccaccttgttgtggatagcctccacccattgctgagtttctcatacggttctgcataaaccaaatcgttagaataaatagcttaggtcactttttaacaggaaaataaaacaatgacacagcatataaacacatataacacagaggcagagacaaataaagcggataacaaagactaaattgagatgcatacaaggatacgctatttaccaatatcagtccaaatcggatcaaccaagatcatatcatattctagaagggtaatggtgatgcctacataccgtactgattggtgaaattattgggttactcctgcagaagcccatccctttccctattcgagataaatgggtgcaagcaaaaccaacgaatactatagaagcttttgcagtcaggagcatcatatatactcacatggaacctattttctcaaagggttgtgcagcaaaataacctaataccaactaaagagtctagtgttcaacaatgtcaatactcatggaagtatattaccagaatataatggtgaaggtaaagaaaaacggatttaagaaaaattggggaaagtaccaaggcagaataataacagttactcggttagcaaattattgacacaacacaacggctaataggtcttcaaatgtcagtcgcccacctttggtggtaccttgatgattgaaactagaagtactagctgaacggaagttatgttgacccaagaaatgatgaacacaatgtaacaaaaacagtattgtataaaacagtttagaaacactgtcacagcaggttggactgaaactagtcagcagcctcacaaaggcatcccaaacctatgtaggattggccaccttggctgtgaccagaagcgatgagaaatgtaaagcatatatactccaaaaatagacaacaagatttctactatgaaaatagcatttgaaaagtgaatatgctaagaatatttcttggtagcaatgggagttatgaagaatcatgctaagcacactgtaaattggatattgaaaaagatgaaaagtagatataagcgaatgcccataaaaactgccacaataagatagtaacagaaacatgaaactcgtgtaggaaggtagcggcaacaaaatgagcatgagcagaggaagaagaagcaacatataatcttacaatgcaataacaaagtaagatatatcaagatggaatattttttgtaagttaagaaaatcacaaaaaatatcttcacgtggtttaaaataaaataaagaaccttcccctgcaaataagcggaagagaagaacaatgcaatccaatgcagatgcaattatcgtggagcaaatatcaaaggaaatgaaggcataagaagagtatataggttttagcagctaatatattgactaagtgaaactagtataacctacatcacctattatctgaataatagagtatgacgtatactagatagacctaaagctaatgacaactaaataatgtaatcacaacacaatatcaaattcatgtataaaaatagatacagcagaagcctgtcataatctataaacaaacacaacaatcaaacatacctcgccactgatgatttcattaactaattgtttagcatgttcaatctgttcggttatcccatcaatctgcaaagtccgttctggcgttgggtctccagggggcaaatgtaaaggaataacctgcagacaaataaccacgggatgaataaacattttaccagctggagacaaacagaacctaaacataattgacaagaacacatacctgaattctagctccagtcttagcttgcatagatttgattgtttcacctcctttaccaattatcaaaccaacctagaacagtttacatattacatacaagacacatattaccaaaaattggtcaatctccagagcattaagtaccttgttattcggaattttcataacaaattgatcagcccctgcttgtccacccatcctacggccgcctcctccacctgaaccagctgtattgcctgcctcagcctaaaccaaaataatcatacacaccattagtaaatctacatcaatcacctaaattcactatcattagcaacaaagactaagactactacctcttgaaggacgtcagtgatcaactgttcagcctttgagatctgatcaggggtaccagttaggtcaacagtcctagtagcacaattagggtctgcatccatatctctagtaacctgaatcttagctccagactgaagctgaagatacttaatagtctctccacctttaccaatgataacaccaactctcatattcggaatatcaatcttcttagtagttccttgaaagctaccatacgaaaccggtatcgaagacggaaccgtccctgacatctgcttaccctctaaatcaagatcaaatcacaatcagtaagttttcaattccaaaccctaaattccataaacaaaagaagttaaaagagattttaaagaacgaaccagagggatatgagctaaatcctttgttgtcaccataatcataagaagcaccattgtcaacacgaggacgtttagcatcagcgctattaagaagacgagcagcgatttcttgtgctttttgtttagcaatctggatttcatccatcggaggaggaacgctgttgtaagaagaaggtggaagaccggtaggtgcggtgggatcaactgaagcagatgggatcggaccagaagagaagccggtaggtctgcgagttgatggaggaggagcggttggttcttcgtatttgcgtttgttggagtaagtatccgatgagtattgagattcgtccgccatggttgaagagctgatttgagagaaaccctagaaagaggcggagataaggaagaagaaggaaaacaactgagaggtgaacacacacgcgattatttatatatgcggacaaaaaccttgctggtatatatatattcagatatttttccctttttactttttatttttaccgcttttccatttttacttttgttaactttgtaacttttttttctctctacataattatgtttttttttaagaaaaaaatcgcttaattactacgagggtgtgatataatttatcactatattcatttttg

SEQ ID NO: 34644 - DNA, 1092 bp, Arabidopsis thaliana landsberg
  unsure (1)..(1092): unsure at all n locations
atcatgaataaaatgtatctccatacccataaccacataaaagcaatagcaggtactacgcaaaaagtgtagtggtaatcaaggtataaagatagtcagactggggcaacctattgggtcccatcaaaattaacctatgcagatcattatgattaatcagaacatgagtgggtaaaaagaagtgatcaagagcacaacttgcctgggacttgagattccaggtaccaggatgatcttcagaggactcgtaacctcacgctagtcgtagcaatacaaacaaacatggtataggcaaaattaacattacaccaaacataagaatacactgcgtaataataataatctatgcgctgctacgagatcgtgggaacgataatcactaaattcggagttacggttatgaagttatgaatttccgaaattatttagtgtttagaatagattaatcctaatgaacaatttcgattcaagtttcatggctaaacagtgttactagttgatagacaatattaatacaagattattgcaactggaataaattaatttagagctaaaatgaattaaatatgaatcatacaaattctagatttatttttgtattaagaatcgttttctataattatttatctggttttcccccaaactagactgcgcgcataaaaccagtgaaactcaggggctaaaccgaaacattctcaagactcatactacagtcacatggacggcgggttgtttagtaataagttcaggggctcttatgcaagatgcgctggccgaaggggtatccttggatctcggccgcccaattacggacagacgccagattagatcacaccctcaccgcagggaccgccatcggatcaagatccgacgaccaggatttaatgagatctaaaccgttctccaccccccccactcgatcgatgatctacggcacgtattcgacgaacgaaagagtacgcgccgacctaatcctaaccataccccannnnnnnnnnnnnnnnnnngagagttctgttgttgcgtttgggtatgattcccctgttgtcatttgtactagaattatgaatcgacctaacatgcntagggtgg

SEQ ID NO: 34645 - DNA, 4834 bp, Arabidopsis thaliana landsberg
agaaattaaaactatagtttaaattcaaaaataaacctttcaacttcaaaagccacaaaaattgtctcttatttttagtgggtttggtcttgaatcatcaaaatggattatatgaagtgaaaacataagcctcattaaaaaccttcctttggaaaacccggcgggacaaaaccaaacgcaaaaaaaaagagcactcatgaatcacttatccatcttgatgaggtccttgagcttgaatcaaaaccaaaagggtagtgacttggctcaagtcatttggtcggtcccaaatgttgttaagcatcccgcaaatggcttggttgaatagcttagctctagaacgagtcattggaacaatcggtgtgacaagaacatcctctgctacaagcttctcctcagctacaagctcatcctcagctacaagcttagctccttcctcggctacaagctcacattcaagcttcggttcattctccctattcttaatgttgtccatgatcatatcacaatcggtttacagggaaccagagttcatcgaactacactccaaagccggcctttctaaagtcatttcctcagagcaacttccagaggagaccgaccaaagagagtagaatgaaatctatgcttgagcagattcttgagagctaaacaaagcttgttgtggagtgtaatgacaagtttgatgctgtctacccagatcttaatgggaggatcgacaatcttagctctcacttgaagaagttggatgtacaggtagctcaaacagcacaattcattaagagacaagagggctttcttcctagtaatcatgatgctaacccaaggaagagctgtaatgccatcttgatcaaagaaggagattatgtgtgggaagaattggacattaaaggtgagttggagctcgctactgtagagttggtgtcgaccaacacctactagtgtcgatcaacaccatatggaacattgttttcagaatggttcctcacgagggtgtcgatcgatacacctctagtgtcgacactgaatccggactgcaccttgtgaggtgcgaatcccgatgcagccaagactgaagtacactcctcctgtcccttatccgaggaagacgtcgttctaagcaggagattcatgctgccaaatgcacaaccataatggagaagatcctccatactcttcctaaggatgcttcttagacatcttccgcttcactcaacaggtatgtcaagcgactggttgacaatggaattagctcagatgaagctaagctgcttaccagagacatcagtgcaatcatgctgtctaaggccaagaaggaaaaggcacagagagtagactcagctgagtacatccgcaccattactcctagacagaccactgagaagcttccagatcgaggtagttttgttcttgattgctctatctcctcaagcaggttcagccgctctttgtgtgatctgggatcaagtatcaacctcatgcctaagtttgtttctgagagactaggcatgactaactacaggccgactcgaatcactctcctcttcgcggatcgttccaaatgaatccttgaaggaattcttgaagatgttcctgttaaggttggtaactccctaatccctgctacttttgtggtcctggactagaagaaggaacccaaggatcctcttatccttggaagagcattcctagctacaggtggtgctaggattgatgtgaagagaggtaggatctctctcaaagtttgggatttggagatggagtttggcatggattgttcagcgttcactaagcctatcagtagtattgcctctagcacagatacacctcctctgactgctcaaaatcccaaaacatagccacacacatcgctcccatccgctcagctcgcccatgagagttgcagagaattggtgtcgatcgagaccatccctccagtcgatcgacaccctcggaatccacagacagaggattatgcacattctcttcagcccacacctctcgaagccctctgtgataagttctcctctatctcttctcctgctttaccttcgattaattccttggattattcgaagactgcttcacaagataacaagcctagagtccctcgaagcttgtttcttctgttgtttttgcagatgacgagaagagtgtcgatcgacacaccactgagtgtcgatcgacaccagtagctgctctaaccagattcgtttacacaccgccttggaaggcaaggatgcagcaacaatccaccccaccactccatccacatcctaaactccgccaagtcaagctactaactccaaacaagcgcttagtgggaggcaacccattggttttatttctcttttccctttcttttgttttcttttattttttatttatttttcccgctttctctggatttgaatgccactggggactgtgtcgtttaagtctgggagaggttcttactaatgatgcttttatttttgtttcttatcatttttcgttttgcagttcatttggttatttagtttatttcccaaaaaaaaaaaaaaaaaaaaaaaaaaaaaaaaaaaaccgttttctttagtctagttaggaatcatgaggtttatttctcttgtttattgcctgattgattaatgctgcaggttcgagtcaatccgactattggaaaatccagatgataaaccaacagacttgaggatatcctagtttccaactcaatccactaaggctggagctaatctcattgctcttccttttacctcgtcaaaacggttactcttcatagaactttactccttgttcataccagatactgagaccaatgtgaaaaagaaaagtattcctctccccttataaaaaaagaagcaagagattgatatgattttcggtagtatataggggtagaaatgtttacaatgaccccattattatacattattaggaatgattaattacaaaggttggaaatatgcctagggtgtcgatccagtatgcgagttcccctttgtttactcttaaaaaaaaataagtctaggagagaaagaatacgaaagaaaaaaataatatacaaagaatggtcgatttatcaaggtatagtaaaggaatgagtttagaaggttcttgaatattagtttgcttgatgagacccagcgatgaaagcctggtggatatagttgtggaatttaggttaggtatctagaatgttgggtaagcttgcggagaagtacatgttagttaggatttgattagaactgctaagcatatggatttgattagaatgatctaggcaatagactagagaatgttgtgagttcctttgtttttcaaacctcttccacgggttcggcttttgtgttttacttgagagcaagcaaaagctaagtttgggtgagttgatataaacctatcttttactgcttttagctaagatttaggtattagttttagagtttatttgttatttctaaagtcttttctactccttttcaggttattacatgtttgggattcatttggagataatggagcattctagaggaaagaagagaatatatgttgttgaagaaatccggagactaaaaaccgcgtaggtgtcgaacgacatcacccctggtgtcgagcgacaccaatacctgacggcaatttgaagacgcaacttattgatgttttgaagatttccaaattctgcctagaactttctcctatttataatcaaggcccaatacgtttttaagacatatatatatatagcttttagccacttcaaaaaccaatataaaaaactttgatctcgataaaactacacgtactttcagatttgttctaaaacctacgcctccaattgaaccgaccagttaaccgataattatacatcttgaattttatgataagtatgatgatatggtcacaattgtgtttgcttgacaaaaaaaaaaggtcacaattgtgtttattttgttacttttgatcgccaataaagggtttggaggatctaaaggaacacttcaagagctcgaaatttccatgcgaggctgagctatacctgccggtggtcttctcgcctccacgagatgggaagcagttaacagaacctgtctccatcaacataaccatcaacggctgcaccagacttaatcataatcattttgagcaaatagtcggtcaagatcactttctgagtggatcatgttccgccagtgaccatgataacagtcatgaagaaaaatataccggcagtagcgtagactgtggccggagtatcaccgtggaaggagaaacatctttctaggtgttatctgtaatgtgtatcatcatcataagatataacaaagtgtaagtagacatcattttggttagaatttgtatctttttttttttgttgtttttgtatgtctgaatctaaagttctttttggttatcaacatgaattaaacgactcctgcaaagttctaaaaggtcacatctgtataactctttttcttttcttttgacataatgaaagtgtagtaatatttagatttatgttcttactttttaaatacggatataaaattgataggagaccgaaattgggttgacctagggtaagagttctttttcaggccataccatctttgttctagtgttagctgtcttattcagtgacctgtgaaagggacaatagaggactctgtgctagtgatgatcacattctgtatctccctctgattcatggggcactgacacgtggtctgatatccaccttacttggtgcatggcagtgttgatagtgatggttgactacaactttaatcttctgatgttagagatatcttaagttttttaaaaatggttcttcatt

SEQ ID NO: 34646 - DNA, 953 bp, Arabidopsis thaliana landsberg
gaaccgctctaggtaaggctctgcttaaattgaatgttgtttctgcaactccatacgcttgtgatgctcaccgtggcgcccgactactcaacccggccccggttgagcggaaacatttgcccatgatcacggtttccgccgtgcacatggacaagccgttatcagggtgttcgtgtcaaattggttgggtgttccgaggtccctgtagatcgctaatgccttcccgatcgctagtcgtagtagccaacacccgccatgaccagtacgggttgaacaagggttgatctgtgtgcacgcaatggccagggtgtactcgtggggaagaaaagaaagtagagggacctttccgtaagttgtcagtgaccctggacaatagtaaagaaaccggattccagttagtgaaaacctgagggctttttcgcaaatccgccagagcgcacgcgggcgcgcatgggcgcccctcccgctgttcgctgtgctgttggaccgactgggctagattcagcccaacactattgaatattttcctttttcttttacaggaaaactttagaaatatgtagaaaaatgtagaaaaatgctaaaattgtgaaactaattttcctaggcttgttattttccctagaatttagtaaaaatagttttgtgatttttagtggaaataagaaattttagggtatttaaagtggttaaaagtattagttatagatttttagaaaataattggtaagtccaaaaatgcccaaaccttttataggaacttaaagcaatatttagaagccttgggtagggtttgagttgatttggaccatgtttgataactagaaaccaaaaccaccccctgccctatgaactcctttaccgactccggaaaccctaagttctcggagtaccgtgaaggaaagttgtactcaagacatagataataagtttatattatctttgcatcctca

SEQ ID NO: 34647 - DNA, 1297 bp, Arabidopsis thaliana landsberg
cacaaaacattaacgcagagaaaccttaaatgattgtaagagttgtcacttaaataacttcgtgtcttatatgatccacgtgtttcttaaatctcatttttagagagtagtgtgtaaacgaatcgaacacatttgtcacctacttgtccaagtcagtcatatatgcttagatctaattagcacgtacaatgccacttgttggttcgaattcgtccacttgtccctccatccataatattcaggttatagctaacacatttttagttaattaattggaaaaaaacacaaggaaaaaagaggcgcgtggggacgcgtaaggagaagaaaaatgttgaagatccaatgtgaggaagagagagacatggagaatcctttggattggcaaagacaaaccccaaggtttagtgcagtgttcttctccattgagccaagtgaccaataatctcatttaaatgattatatacacacatatatatatatatacatgtttatgtgtgtcgattaaaacgacaattaagtaattacaaggaaatttagacaaactgaatcttgcttggccttcatcgataaacacaaatttatgtgtatacttaagattaatttgtttcttgtattcacgttttccaaccatatgattattagcttaactaattaataacgttagcatttgaaatactcattaaatttcacctgtccaataaccactttcgtttgctaataatggagccttctttttttttcttttttttactatagagataattttgtacacggtaaaatagaaagaagaaacaaacgacgaaggattaatttcatgaattattcgatagtacttaaactgacgattagtgattggttgttagcaatgagtgattatccaaagaacaacaacgatttggtacctatatatatatatatattgaactctaaattccacccaattatgcaaaatatctattccattgtttagactaattgaaattggtagaaaagttcacttacatagttgcagagagtttgagggagatggtgaagactacaagaaaacacgccagttgcgagggaagaaaccgtagctaatccctcgcaaacgagcagttaacgagggaatcgcgatgaatttaagttcctcgctaaacgtgcgtcgcaaaatcaaatccttagcaagttcgtagtaaaatttgcgacgaataaattacctcgcaaagcacacgcaatttgcgagggacgtaatccgtagcaaattcacggcaaattacgggtctcgcaagtttctcgctagttgcgacggagcacc

SEQ ID NO: 34648 - DNA, 406 bp, Arabidopsis thaliana landsberg
  unsure (1)..(406): unsure at all n locations
tatgtatgtgtagttccctctgtatgttactgttatgtcctgtctacctatacctatgttgttctgttgtgctgtacttctctatactgtgtgttctctattgtttgttctgtcttctcttgtctnttttgctctactctgttctattctgttatatgtgtgttatattgtcttattttctatttatttgtatttatgtcttttctactgttcttgttcgttttatttatcattgttattaatattttgttgctacactattattattggtctatgttatttgtgctgtttaatattctttatattctttattatgtattattgacttccattgcatatgtttgatatttgatttttggctgttatatatgtacaaattgttatatgacctgctttcgtatagaat

SEQ ID NO: 34649 - DNA, 750 bp, Arabidopsis thaliana landsberg
aatatctgacaaatgctcagattttcatgcacctgccaccagtgttaatagctccgttggcgatattatctaccgatatatcaactccacaaggtcctctttgatattcttgggtatgatactatactacaagtgtgttcacagctaagtaactctttgtttttgcttttctcagatcagcgtcggctgtgattcagaaaactcggcaagtgacaatccctgctccatttgttgcttctttttcatcaagaggtcccaatccgggatcaatacgtcttctcaaggtatatatgacttgatcaatgtcatctgtttattgatagatgatgatcttatgtttctgccatttttgcggattgtagcctgatatcgctgcacccgggattgatatattggcggccttcactctaaagagatcactgactgggttagatggtgacacccagttctcaaaattcaccatcctgtctggcacctcaatggcctgccctcatgttgctggtgtagctgcgtacgtcaagtcttttcatccggattggacccctgctgccatcaaatccgccatcattacctcaggtaactcacgtcaagttctcgtgaaactaaaagcagagaaagcagtaattatttatctgtttgttacgcagcaaaaccgataagccggagagtgaacaaggacgcagagtttgcttatggaggaggccaaatatacccacgacgagccgcaagccctgcttagtctacgacatg

SEQ ID NO: 34650 - DNA, 1954 bp, Arabidopsis thaliana landsberg
cattaaacaagtcattgcagattcgtaataaacaaaacaatcatcccagaagaagaatcagttattcccaaattgatcaagctaagctaagactttgttgtaagaatctaaacactattgtgacattgagtttgaggtttacacagacataatctttgaaacgagtgaacataacacgcaatgatcttgaagaacatgacaacattgcaaatgcagagatgaatcagatcacacaaataatcccaaaatttccaaataatacgaagcaaattatataatccaataccatagattaaaagatctctgattccaaaatccaacaaagctgagttcaataacatgaaataaattaaaaagagactgaattgaaaaaaaaaactaagcagtgagaacaacagcaccaccagcttccttaatcttcttctcagcagtcttagagataagcttagccttcacaacgaaaggtttgttctcaggcaaatgacctttccccaaaaccttgaagaaaccatgctgcgtcacatcgatcaacggaacattgtccttggttgatttcgccttcacatcttcagggacgagtgaccaaagcttgtccaggttcacgattgggcaaaagaacttgttcctcagcttgtggaaatacctcataccaactttcccgaagtaacctggatggtacttgtcgaagaggatcctgtggtgatgcatacctccagcgttaccacgacctccgggatgcttacggtgcttaccgatacgtccatgaccggcgctgacgtgacctctcttctttctgttcttcttcaacgccgtcgccattttagtgtcagatctagggttttgaacaagaaatgatctttaagggtttttatatagagaggatttagcagctagggttttcggagaaacagagatagagtgtgttgtctgttgggctttttaataatttggcccaattatacaacatgttatttatgttattaaattgggctttgaggcccattatatgaatccctaatatcaggtttagttaaccacttcacttttgagtttttcgacgtcagttgatcggcgccgtccttgacagcttctttttcttctctcataaaccctaaaatatctcccgaaagctaaaccctttagctgatttcaagcttcaccgggaaagatgcaacacgatgaggttatatggcaggtcatcaggcacaagcactgtagttacatggccaagtatgtattttttatcctcacttgttagctttcaattttcatttgtagctcaatttgttgatgggtttgttttgttctcttttgcttttgtagaatcgaaactggaatcttttgcagaaaccaatataatgtaacaggaatctgtaatcgaagctcttgccctcttgctaatagccgatacgccactatccgtgaccatgatggtaattttctttaaagagtcaatctttgagctgattctgtgtgttggaatagttaggattaggtgttgatttagttgatgtagtaaagatgtttcttttgagtttagtgttgtggtggtggtttcttacaaatgaattctcttttgtcgttattgtgtttttttttaattcaggagtgttttatttatatatgaagactattgagagagctcacatgccgaataaattgtgggagagagttaagctgcctgtaaactatgagaaggctcttgaaatgattgacaaacacttggtgagcttgagatttattgccacagtttatttctttactctttttcttcattagcaatgtcaatgtcttatgatttggtgggtattttcttcttgcgtgtggcagttatactggcccaagttgttgcagcataaggttaaacaaagactgactaaaatgactcagatgcgtattcgtatgaggaaacttgctctgaaaacaagggcttgtcctcttctggtttttgttt

SEQ ID NO: 34651 - DNA, 1053 bp, Arabidopsis thaliana landsberg
aaaaaacgaaaaataatacaaatgactgatgtgatatataaggtgaagttctacaatgcacgtttcttggtccccagatcctaatcttagtagttttgccttttgtgttcaaaacttcgggctaaggcccaaatagtatactcgggctagggccggtttgaaaaaaatcccctttctttctgccgacgtaattcagagaacgaaatcatgtcgccgtatcttagatgcgtcgtcgcgcagtacatccattattcagagtcagactgtatcacaattcatctactttttctctcttttttttcattgtttagaataattcagtactgtatttttttaaaaatgtattgactggtgtaaactggaaaaaaggtcatccagtgtgacacagaaaataatacaatgactgatgtgatatttaggtgacgttctagcatgcacgtttctacctttcattttgcgtccaggttcagtgactgatcagtcatgatatagcttttgccacttttcgtgaagggttaattaaatccaactaattatttcatttaatgcaattcatattttatttatatgtatataatgtttccgctgtctttgtttttatatatctatttatatactttccaaactatgacaaagcgtatgtcgtgttttgttttatttaaatttatgtaacattcattatggaaaaaatatagctaggatatatacgacaatgttcccaaggaaaaggtttacacatcaatcactatgaagagcaggttgtgtactttattatgtaaataatgtttgcaaagacactgccaatagatgtaaatgtgtatttaggttgtcccggtaagggatgcttgcaattcttcaagcgactgtcctttggtttccggcacgagcatccatataaaaagcaatgacaatccccccaccatcgcaaatatgtaaaaggttcctatttaattaacaaaaacaataaacaatacgtatgtttggattagtagatttttttctggattaaggtgagttttaatatctttttaagccttatgttcatattaactg

SEQ ID NO: 34652 - DNA, 1157 bp, Arabidopsis thaliana landsberg
attgcatgtgtgcaggaaaacagatcttacaatggctattttcattttcacgaacgaagaagatgatgcggggacggctttggatgcaatatctgtcttgaattggcaagagaaccgatcgtgactctatgtggtcatttgttctgttggccttgtctctacaagtggctccattaccattctaaatcaaatcattgtcctgtttgtaaagctttggttaaggaagatactctgcttcctttgtatggaatgggtaagccatcttctgatccgagatcgaaactcaatactggtgttactgcccctaatcgaccagctgcgactaggactgaaacagctcgacctcgtcttgaacaaagacatcatgggtctagtttctttggtgggcattcaagttttgctgccatgccaactggattacggctatcaaattgctcgttgcaatggaaagtatctttagatgaatctgagactgattttttgacaatgcttgtgaaactataatcatacattgtctacgatttttgttattttgacaattaatgtttagagctacatttacattcttataaaaaatttgcatctgcttgtaatatttgattctccaatcttccgctttgtgaaaaatcgtcataagcttgttctcgtgctacatctgcagattgatcaacatgaatgctgattatagtatatgatccttaatatatgattatcgcacagatgaatttaaagcttcacatttaatcgtgtaatttggagtagatggcaaaagaacatggaaattaactaaatgacaatgatgtgatgtaaatttttgttttgaccattttgtttttgttaacatatgtaacgaatctacacaagagtatttgtgttttcaagctccttgttaagcccaatgaaggtttttaatgggctctaatgggccgattcaataagttggaaagctcatgaagcgagagggaccgtgcctaatctcatcttcactctgcttcgttatcttcttcctttttacctgttcaacgaaactcctgagctcagcttcactttgctcgacgttatcttcttcgttcagcgacaatggcgttgattacgaacctcgcctcttctatctcttcactctcgttctcctcccaagtttctcaaagacctaacac

SEQ ID NO: 34653 - DNA, 433 bp, Arabidopsis thaliana landsberg
atgttcacatatagtgtaaataactcataaacaagaactctaaagaatacgatgcccagttgtactaaccactcgatttaagcgtgggtgggaagcagtgaggccgagaagacattatttttacgatgacgaagactctgcttcaaatcttgatttcttcttcaacgaaatgttcttcgaatctgaatcatcgtcccctgcttcatcatcatcatcatcactgtcgtagtcgccggagctagaagatgtacgtatctgtgagaaactgcgtccggaaggtgtgacgtggaaaaccatcttcacgtcgagtcggaaaaccaaaacgtcgtcgtctcgaagacagtgtgcggcggagaaatcatccgagcggccggcgaatctccggccgttcagtcgcacatcccagattctatccgaagcatcagaagtcggg

SEQ ID NO: 34654 - DNA, 531 bp, Arabidopsis thaliana landsberg
gctgcaaagttggatattacaaaagcttttgataagctcgagtggcatttctttgaggcagtaatggcgaatttgggattctctgacacttggcgtaaatggatgatggaatgcatcacaacagtcagataatatctgactcatcaatggtcagcccgttggcaatatttctcctcagagaggcatccgtcaaggtgaccctatatcgccatacttatatctgatatgtactgaaggtctatctggtttaatccaggcctctactagaaaaaaacagttacatggatttaaagctagcaggagtgggccagcaatctcacacttgctttttgtagatgactctttggtgttttgcaaggcaaatgaagaggaatgccactcagtgatcgatatccttcagcaatatgagcaagcttcaggtcatgctgtaaattttcagaaattagctgttctttatagccaaggaatagattatcaagtgcgcaaacaactcactacaatactgggaatttataaggcggaaggttttgg

SEQ ID NO: 34655 - DNA, 403 bp, Arabidopsis thaliana landsberg
cttatgtggcgctaacgatttaataactatatttgtagctccagaatgtttcagtttatgctcccacctattatatggatataccaggaaagatatacgatctaatgaggctactatgaaatatttactcatggatggagctggctctactatggtgggcgatggtgtctgtcggctatgtgggacattctatggagagaatgagctgcacgaaacaccgaaggggcttatgaatccagacatgggtaacgccgcaggagttgcaactgcgctgatattcataactgactgaatggcgtacaagatgtctctagccgctattgatcagtggactcctgccgtatacgatggagggctgctcgcctgagagatccctacgacaatatctatctatgagatggaa

SEQ ID NO: 34656 - DNA, 1456 bp, Arabidopsis thaliana landsberg
gtgaaactttagactcgatattttttaagatgttttaattgaaagataatcctcgaagtaatcgtcatttgtgttttatgaatctgttattttgatgattagatttgattttgtttcactgaattgagaatttcattacaaatgcagaggactaatgtcttgttagaactaaagagtgtttatgtctaatatattgtgttatgtcagcttttgcaatgaaactgttaatgatagaagaggtttatgatgaaaagaccgagtctttgtcaaaatcagaagatggggaagtcacagtagaagttcaggagagtgacagagaaatccctcagcaaccagatgtgaatgaaacaggtgaatttaggatgttttggattatgtttctgtatcactaaactagcattttttaggttttggataacaaacttgaagagtttactagttatggttgatgtaaaatggaatctcgttttgtttcaggaaatggaatgaagtctggggagtttagattcattcaaggtggtactttgagcaaagttccaaacgattccttacataaaggtgaacacttttgctaacatgactgtagagaacacacatgtggttcaactataattttttatggttatgaattattgatcaaactcatttcctcctacttagatacattaatgctggtggttttgattgctagttttgctacatgttcacaggaccaacatttagcaatcggattcatagtgataagctaaagtaccgaccaaagtcaagcatcaggcctataacgagaagctcaacattgatgaaacctactgctagcgttttagcaaaacaagataatgccaggtgattaggagaagatataattcttggtatatatgtcttttcgcaacttaattcaatgaacttaatacttggtttgttttgttgatctcctagactgcatatgcaagtggatgaaattaagtgtctttcatctgaaatccaatctgctaaaagacagaagctcgatggtggtctacttcgtaaggtggagtttctaatagccacgagtttcgttgtatcaaattccttttaagaattacatgattaaagcatttgaatagtggtagtaatagattttgcgcttatttatctaatcgtagaccttcaaatacttttgtttcaggttgctgaaccggctcaagaaacaaatttggtccataaggcactcaagaaggtttctatctgtttctttagttctccttccacctccttcaaccttcttgttgttaatcattcaattggttgttatatggttttgcaggatcttgataaagactctctacataccaggatgaagcatactatcccacaggagcctgattctgcgacagctaataaatcgtatacgacacatatagacactcctcctagaatagctgttaatgtgtatggcagaaatctctcttatatccat

SEQ ID NO: 34657 - DNA, 1442 bp, Arabidopsis thaliana landsberg
tccccatcccttcaagatcattatcccatgccaaaagatgcataagaagaacatgcagattcatcaacttttcagtagtataagctgagtctatctctagttttgtcaacatcctcaacatctcttgctcttcctcattcctactagacaaagcttcaaaatagtcctccctaatgatttcctccattcttggcctaaaaatcaaaagttcaaagcttagctaggaacaagaaaaaaaaactaatccaaaaaaatggatacttaggtgaaatgacactatctttctaatgcgaggtatcgcagttccaatcctagcactagtcataactcaattcttctatatgaaaccaatcattcatcaactgaaaccagaacatccaagcaaataattaaaaatgtaatccaagtacccaaaaacacattatagtaagtgcaactaaatcaaatccttagtttgaacaaaacctaagcaaagagaagtgaaatttgagaagaatccacttgtcaagaaagagaccaataagccaagtcagttaatgttacatacttgtaaagactcagcattttcaaagagatccaccagaaattcttactaatttaacaatttactacaacgagattcaaactttaccataaaaccagaacaaaaatatcaaaattcaacaagaacaaaactaaaacttggaaacagacaaaacagagtgttgaagattcaaagaggatctgaaaagatcaaaactttaccgatgaaaatctgtagttcgagtagatgaaaaaacagagagagcttttactccgtcaacgaactccaattttgcctttcaagaatggtacggtgttttctggcgtcagaaaaattgatgctaaaatgcgcggaatttgtttacaagtcatccaacgataaagaaagagccgcgcatgctatcgtttaggcttacgttatcgtgagtgttatgctgcggtggacgttgaattattggtaatgaagaagaacgactgcttaagctgctattattggatacagctaaaaaggcctaaatataactgtaatatagcaagcaattaatgtaatataacaaatgttttttttcacaactactgaggaagaattatactaactgtaatataggaagcaactatatttagtatatattatagaagataacatatatcaaatttatgttatctatatacatatatttgaacaaatatggctagtaggaatgaactcaagtcacacacataatgactgaattcatatacttacagatgaaacataaatatggatggatattagcagtttctcttgttagccaatatccataaacgatcggatgcacataccattataattccaaaacaaacctctctatttcccccaaaataaatgcatgtgaactctacaaattttggataactataaataaagtctgcaacgagat

SEQ ID NO: 34658 - DNA, 3668 bp, Arabidopsis thaliana landsberg
taattagatttttatgccctaaccgaaacaagaaagtgaaatttcataacaaaaatgacttatccaaaaaacaccaaaaccaaaccactgtttgaatcgttttaggtccaggttaactcataacacatgagtcatgtcatataggggtttgctctaaagagtttttgcattatgatatttttcatttttttttctctaatttgcgcagtgaacacttctcctcctctattttcttcgctgccattctcactctgtctcatgctgcttccaattttctcagcttctcttcttatcatcctcctttactgttatcgggaaatgaatttccggtttgctaatccaaaaatagaagatcatatcatcagcagttacttacagatgcaaaggaataaaactcgaaagctaacttggacaagaagacgacatgaagatagacttggaagattttaaatgcaggcactataaatggatacaaggatcaagaaaaattcaggtacctgcagccagaatatacaaatccgttttcctttgcgataaaaccatctaaagaaactgcaccacaaccattgatgtgtggaagagctgctttaacttgcttttgggtctcatatacctgtaaattcccaaagagattatagaacaaagtctctctaagcccgtatcctgagtaagtttgaacagtgagctcctctggagccaaatcaatcatgttcacggcatagcccttgaaacccggtatgggatctccatcgggcagctttgggtcatccatggctaatttcttctgaggatcgttctccaaaagtccatccttccaaggtctgcgtgtttggaaaaaccaccaaaaatcttttattattctgtcagaaacgattctaaggttcagctatctaaaagttgaaaaatacctgattgcatcaagacatagaacatgaaaccgatgattagattgaagcctgagatactcagcactattcggtccaatttgtgccgatttgcataccaaagcgagcatcatgtcttctcccaaatattcagataacaccctgcataccaaatgacttcagatacaaaagttttggccactatgatcagtagtaacactgtggctataaatttatgtcacctgctaagggaggtggaggcaactgaaccaagaagtgctacgaggccaaatactcctttctttgacagaaacagagactgtggaggcggtgactttctgtacaaacaacagaaaaccgatgctgcagtgtcatgatgcttctcttcaatctgtttcatcattgattctttggtggataggcattctgggaacatagcaccgagaggttctagagaagctgagataaaggtttaggcaacatgagcaggtaagcatcaatgcaaattcaatccccatcgtagttatcaaaacttcttcaaatgataatagttaccttgcaaggtacgcaactcttccttagcctggttttgttcagcttccaaacaatgtaggcgctcatctatttccactctgtgttcactgtatccaataagattttctttagagctctgcaggaaaattcaaaagttaactcggtaaacaaaagttagatcattcgagaaatcgttctgcttttcctaggcataaatgaaatgtagacatcaatatctgtggcttaaatggtgatggccatatacctcagtgaactgtgccacatccctcaggctcgggccagtttggctactgagagccggtgaatatgtggttgaagccatctttgatttaggtgttaaacccatccttgaataagatgtctcatctctttgaagtatttgagcaggtgtaagctgtttctgtaaatcaagaggacatgttatcaacaaccggcattttctactcattgtaaaaacatattgcaacttgtaagataactcagtccacaacattactacctttaagctcagatgaagctcgggaaatcgagaatggaaaaccttgaaagaaaagacaccctcgctctcaggtagagaaagagtaggaactttgcaggaaccatggacaaaggcatatctgatttcactctcatcgctgcttgaatcagtttcaatgctcattgtatggaaacatccagatttttcatcatgatggatactagtatccataacaccatctaactccgtcactttaaaaatgaggttcatgagatttgtaccagcaacacagcagtcgggcagctgatcaaaacaaacgatttcaggatcagaagtcagtagagagacaagttcctgacaaaagcttggtggcaagaaacaaaaccaaactgcaccaaaataatctttacctcggttacaagtcttagctgtcgttcatcaatttgtgactctttacagaagataacttcattaccagacattacagagagtgatactgtagagaaacaaagacgctagacaatcagcaaatcatcaaaaaggaatgtcaccggaaaaatatagaaattgaaaggatcacattaccagatttcccatagccttctgtgaccttaagaatgccagatagattaatgcagccacgactatcaacctatcatttaagaaacaaactgcgtcatccagatagtggtacaatggcgagaatacgatatactatatactcagtaagtcaaacagagattcctattcttgactaaaataagcttctcacaccttacggttgatgcccatccagtcttcaatacgataaccatcaatatgtatcagaacatcggtcccctcggcaacatggttattatatccatcgaacaactgcataaaaattatggtcaacttaattcggaggaaaagctgattcctgtttgacagcgtgcataggccgatatgatatacctccaggataaaatcttcgacagtagaatctggaagcaaattttccagagccttgggattattcacagcaactcgtttcagaggcccgggattaactgaaacaagaaaatttcgttagggaaaacaatttctacataatataaacattaattgttcattttgcatgtccttacgatgtcactttgacaaatagatacagactacactcccttattacataactatcagaaatcttcaactttctcagttctataaagagagcagaaattacagaaagctccctaagttaaagtaacataactgaacgatacactccggctctgatttcttttcgggtgtaagtacatctctgatgagttatttgtgaaacttaacaagggctttagcatatagacttataaagaccaatacaagaattaaagcttacctttacaaggaaccgagacagaaaaaggattgtccattgcacgtatctctaacgttgcttcataattaggtcggatctggtctaactcatcagtctcaacgagcatattctgcattagattcggaaaatcacaaaattatgtatgcttaccaaaaacgataaccatcgtgaatggaaatgttcaactgcctacactatggactgtatttagtatctgtcctcgcttgacattaacttaaatataatcataacgtcagtgcttataccatggaagtaacaacatacctcgattttaagaattaatccatcatttatcaggttggtctcaagtttgtcaattttgattaagaatccagggctagcttccaat

SEQ ID NO: 34659 - DNA, 702 bp, Arabidopsis thaliana landsberg
gctctaaagctttttcctctttattttatttttaacacatttctgacattccttctctcttgtatgtcggttaacaagatttctcctttgttccctcgggttagtgacaagatttctcctttctcccccgtgtcgtagataagctcatattttatcttatgaaatgaaatgcttcttttcttctcctttctgcatttcatcccttcctaaatgttctacacactgggtctatcacacactttattgactttgcatctctaaaccatgaagtgaaaactgttttgctagcaggctgtttaaataggaaatgctaagtcaggtcggttgatatgttaatataaaactaggatatgacccgcggtattgtaacgcccgtgaaccggaaaatcggttagggtttgtttttaaattatccggtttaattggttgggttaattggaaaccctagagtgtgcctataaaagaagaaaacttgaaattagggctttagttagccacttttcgttttataaaggcgaaaaagagagaaagggagaaggagcagaatcgctagggtttgggagaaaccagcttcgtcttatcaaatcgtggtaaaaggcaacaaaatttggtcgagttattcccaagtcgtttatcgttattctccagtttacagaactggattcgtattaatattggttgagttattcgcagtttcgtgag

SEQ ID NO: 34660 - DNA, 678 bp, Arabidopsis thaliana landsberg
gttaagctattggcatgcatagcgccgttgtaaagccatttgttcttcttcttcttcttcttcttctttttagccacttttggtttgttctcgcgtgccaatgaagtcggtatgtagatatgttgtagcaaacgatgggctaactataatcttatgtaatatgcaaagaccaaatacgttttagtaaccagttatggtgaacctgcagctaccattttgtgttttctaaaactaagtcttgactttttttaatttgggaaagatcagattagaaactcaaatcaacaccagtccactctctaggttagcaaaatactcatacctgttctgctgcgcttgttcttcacagatggatccgagttgcagagacctcaacctgatgatggtaacaaggcaaaaaatgtgctagagagagacagcatcaaactctacaattatgtatgttttattgatttagaactgaagagatggaattatatatgaaaactagattaaccaaagatagtcaagaggtacgtacgattttacgagtgctagatttgactcgcacagacttttaccaacgcctataatactactattaactaaagcacataaacgcatagatgacatgccctatggcaattttcttattccttgcctcatcgttttactctcttataatcttgtcttcttcgt

SEQ ID NO: 34661 - DNA, 980 bp, Arabidopsis thaliana landsberg
ctaacattttgtgaataaaaattaccaccatatattaaagttttgaggaagaagcttacactgaaaagatgacattgttgatgtaatgtgtaaacaagcaaaaaattattacaactaagatgtcatttttgttctttaaggtctaattaaatttatctttgaggtatggttactctcaaatctccaataatcaattcgatttttgtccctatatttttttgtttaagtgcatctattatctattttttttgttcaagagtttatttctgaactgaatgaaatcttagtataaggtaacatggaagaaaaaggtcaatggaagaagaatcttaaagaagagacattaaagatttttgagtttcttcctcaaaatattcaaggatcttatcagatttactaagcgtcattgtggattttaatcaataactaataatcatctgagtatgttttatactcccaataaaaaaatatttaatttttaaattctgaaaaacaaacaaacatagcttttacctttttatgcctcttcaacatatgaatcaagtatccatgtggaacattaaaaatcaaaaatgataactccatataacatattcttaaaaatctaaaatgactttaacctcaccagaattagcaaatggtgattttttaactcttttcatttttagtttcttaatgactcttctaaatagatgttcgtaaagcaaaaaattagcttccaaaacttataaaggttatatagatcttactaaacaaaaataaaaaaatgcattgtgtttccaatcacttttttaatgaatctttttgtctacatatatcatgaatacctacatacatcttaacaaaattatattaaaaagaaaaagccctacatacatcttaacaaaattatattaaaaagaaaaagcccgcgacttggcgcgggtttcgccctagtcactttaaaaacatgtaagagaaaaatttaaacatttactgag

SEQ ID NO: 34662 - DNA, 1169 bp, Arabidopsis thaliana landsberg
aataggccagaaacgacacacctcagaatcattttttaaagactcacaacacatgcatcaacagagggggaccttaaaaataagggaggggatggaaagaccaagaaatgacactgatatcatcatcattacgaccatctaaataaaacatagataatatagaattagcctgtcttgtgcagaatctattatgagacaatgaaaaaaaaaagtaaaagcaaacactctaacatggtcatcaactccaagctccagtttcttcatatccatggaccggggaaaagcattttccgatgttgatctcaccggaatgatctctcctccccggctactctcttgttagttttctttttcttttgcaaaataaacccaaaaaactgcctcctaaaccatcctcactgcttcgcctgctcaatgattgcaaagaacataggaagaacgttaatcaaaatattagaactagaacttgttcactaaagaacaaagtactagaggcaggtaaacaagaaatcagtttgtttgtttacctgtgagtagaggaaagtcccaaaaatcacaatggcagcaccgagagcattgaccggtttaacaggtttgggaagatgatgattgaggcaacgatgactgagatccgcttcattatgttttcaacgctaaatgtcaatggtgaaatctggtcgagggacatgtatgacacttgattatacaaatgctagaacacactttgtgccactatccacctgaattcaatcgtacgcgccaaagccacctgaacaatcaaaaccatcatcacacaattccaccaatactactacacacttaacctaaaaatgtttccctttcaagatcaaacacatctaaagcaaagcaatatatgaagcaacaagactaataaaagttagatcctttaccgagaccagagtttttcagaaatcgagatcgattttaggagcttctgcaattctagtgacccaagagacaagcatcatcaaagagccacaagcaagagagcgtcgaagttagccacatgtaggaaaagcattcaaaaccttcttgttgtagatattaaacacaacgttcaatgcccaccaagttgcaaaatagatcccaatcttaaccttctatcacgaatgttcgtcaggaacgtcgataccaatttcaatcggacg

SEQ ID NO: 34663 - DNA, 4940 bp, Arabidopsis thaliana landsberg
  unsure (1)..(4940): unsure at all n locations
agctcactcatatctagatgttaggttctacttcagattaaaaaaagaccttcactctgtttctacactgactttggttttataaaatggatgaacatggagtctctctttcatcaagctttagcgactcctcctgcatttctgatcttcttcgtcctccacttggtaagcttctcttcccttcgacttggtatgtttaacttttgttttgttatttcaaacaatttgtgggatgactttaggttttagatggattgttctggttctttttcatgaacaaaggagacaaggatacttctcgatgaataagataaacaatggctttcgcacactcagttcacgaggtttccttcgaaccagaggagaagccacactgcagcctatggaagacactcagtctgtatcgaagttccttattaatctcagatggtcggatcttttcgatctccctggtgaatatgtggtgatgaatgcggagacgcttaggacactgagtgatgggaacgaagaatggctggagaaattgagaagccttggaacaccactggcatgtctcaagaacgatcgaggagaatctgttcttcatcttgctgctacatgaagtcatctagaactagtgaagagcattatctctgaatggccatgccttttaattgagccaaacttgaaggatcagcttccgtctcatgtagcggctcgtgctggacgtctagctgttgttaaggctcttgttgcatcagtaacatttttttcagctagactggctgaagaagatagagagatactgaatccatatcttgtaaaggacataaatgaagatactgctctaaatttggccttgaaaggacgctataggaaggttgctctccgtttggtgaaggcgaacaaacaagcttcctttcttgcaagtaaagacggaatatctcccttgtatttggcagtagaagcaggggatgtgtcccttgtgaaagcaatgttgggaaatgatggtcctgaagggagaagttttaacttagaagggagacaagatcttgcacacgcagctttgaattccatgagtacaggtttgttttgttttttgaccaatttgcaggatcgtaaagtttaaacctgaatcttcttatgtatggtaattgatattcctacttgtttaagcagatatccttgatgttattcttaatgaatacccaagtcttgttgatgagcgagatgaagaaggaaattcctgtctttcgtttggagcatccatagggttttataaaggagtatgcaacctgttagaccgatcaacatcaagtgcctttgaatgcaacgatgatggatcatttccaatccatgtggcagtagagaaaggtcatattgaagttgtcaaagagattttaaaacgttgtccatactcaaagcacttgcttaacaaaaaaggtcagaacattcttcacattgcagctgaaagtgggaagttcgaaattctacgccacttgacgagatatgaacaaacaaaccttctagcttctgagcaagatgtggatgggaatacacctctgcatctagccaccatcaagtggcgccctcgagctgttagcaaccttactagttttacttccagaaaaatcctagaaatacagaacaatgatggcttgacagctatggatattgcagaagccagtctgcaatctagatatgtcttccgggaggtatatcaaatctctctatgtaccacaacattttatcaaatatcaaagcatttagagcttatcgctattttttgttgcactttctttggataaacagagaatgacgttgatggtcttactgtgtgcgtgctcacgaaggggttttcaagtgatacccactagtggaatgactctaagaagcagatcagagcatcatctaagtggtggtgacaaatataaagacaatgtcaatgctnnnnnnnnnnnnnnnnnnnnnnnnnnnnnnnnnnnnnnnnnnnnnnnnnnnnnnnnnccaggtggctttagcagctctcctccgaacttgggcatggccattttggccaatgagctcgacttttgctatttnnnnnnnnnnnnnnnnnnnnnnnngcaatgctcagttgtagcaatagttgctcttatctgggcacaattaggggatccagaactcattcacaaagcctttcacttggccttaccatctctctttgttgctctagcctccatgtcttcagcatttcttttcggcgtggttgctacaaggaggtctcaggatagctttcttttcaatgtcatcttcaacactataactgccatcttctttcatgtgatggttttgttgctgggcccttatgttatcccacagcttcctggcgttccttttcttcaacccgtaactggtctttatctccatctgctattgttgtttgttaatgaagacgatcatgtctttggctctggtcacacctgtgagaagaagagggtaaattctgagggatcctcaggcatggatcaagtgcaaaactcgaaggttacttaaaaagatatcttaagatatgtgtttatattagttcctcagttgtttcatgtcactatttgaatcattagaagacccgttggtcccatttacactaaaaagcagatgagagcataatacaaaaaccttggtctcttcttgtagacactgtccctttttctgcaggttttacactaccaggtgggtttaatagctctgcttcaaacatgaatatgtccattttggcttacaaattggattggtattcaacaccttggcgctgcaaagctctattgtagcataattgctgttatttgtgcacaattgagagatcatgcactcgttcaccgagcttttcaatttgatcttgcccgtctttgttcgttactataatctcaatgtcataggcagtctcttgtggtgttcttgctacgttacctaacaatggagggggtattaccttgccataggttcctttcaatcctttttctaagaggcttcactagggcttaccgcaatattcttgtgtcgatgagacgatgaccggtaacagttctgttgcgaaggtgtccatggaatcttcaggtgcagatcagactgaattcgttaaatgttgacggtctgggttgatcattgtatgcttgaagcgtggctgactggctgtagtaataagcaagaaataatcacactctaacgaagcttcaggaggctcacatagactctatannnnnnnnnnnnnnnnnnnnnnagctttgattggaaactgggccatctgtaaactttataggcccaatattacacaccttaaagagtgcgacttttgacttgtgtgagcctacaacgtcgttcaaatgaaatcgtcggtgtgacaaaacgcggcggagacggctaatcggccggagttatattccagatgtttcgacctccctcagtatcacaggtaaaatggtggaacaatcaatatcagaaaaagagaggcggaaacgcagaggtggaggattgaggacggctttgatagtgtgcactactcttagtctcataacagcgtcctgacagcgttaattggataatatctgatatggactaaccgacaagagatcggtcttgtcgccgtttgtttttctaattcgttgaccgaaaagtctgcgtttttgatagctaattagcctattattgcgtccgcttttcttcaagactttcgagagtaatggaatttttggatagtagcttggagagatgttgaattgggttaagatagttgacattagaagttgaagaaacccacaagtcgttggatttctatatattttagtatcccactgaatgctttcttcttttggaccatgacttgttttctctgtaataaacaaataaggtagacttgaaaaacccttacacattataaggtttgatctgatgaattattgataaacatatatacatgcaaaggcaacaaacggtatctcttttttttctgatgagaaaggaaaaacaaagaaggtacgcgtctgtttccttttagttgaccatttcttcttccttgatggacaatattaaaacctgaagacttctatttctgtagataccacttaccaatctatatctcaagcattgtggagttggttctgcaagcatttggaaatattgaagttgggaaaagccttccctgagccctccagcatcaagtcgttgcttcggctgacgaataaggtgagaaacctcaagcttactttttactctgttttcattgttttcttgcttggttattagttattactatgttttcattgttttctttctctttgagattctgttgtatgaagattcaggcaactatgttagtgcatgatatacaattaccttgcggttcaatcattaaatataaaacctttgagtctcaatgatttaagcatatttgtttctacttcatcaattcatcgtatgtagttttttttaaaaaatttattccttattgtttaggcgccaaattatcaatatgggaaggtctgatctggactttgaccgtcagaagaaagacgcaagctctaggatgttttatgcagacgaaaccgggcgtacgcactctctcgatttgtcaactctcttcaatgacacaagtgaaactgtgccaatgggtccaaagaccatcgccgctgtaagagcaggtgatgaaacttacctgagagatatgaaaattgatgttaacattgctttaagctcagtgaacgatcatgggaatacaatgcttcatcttgctgcagccgcgggtcacaccgacttagtgtgttatatactcaatgcgtacccaggtctgcttatgaagtcaaattccatgggggaagttgctctccatgttgcagcaggtgcaggccatctcgctgttgttgaggctctggttagttttctcaaagatatatcttgtaataagcctggtgttgccaaaaagatat

SEQ ID NO: 34664 - DNA, 727 bp, Arabidopsis thaliana landsberg
attagttattgctttcacatgtttagaagtaagcaattcggggagttattagagtccgagtcttgagtctgtcttttatcttaaaccttagaaacatcaattctacgtctgaataaaatattccagaaagttcccttcaacgtgtatgtgagatgaatatacgccgtcgccgatgataatatcgtatcgtagtctcataggtacaccaatgccatatcttattgcgagggggattcattttgacgtggtcatgtgaaaggaccatgagaccttaaattagtaatgggcttatggctttcaacatttcattacctcacctacgagtttgggagtttccacgtcgtaatcttgtctcctttgaccataatattttacggatacgtcttaagaaacaaaaatgttaagagtttatttagcattaaaagtagaaaaccagaaaagggaagctaatgataggtcgagagaaaaatctcaaaaaaaagatcgtgtgtgaacacaattaattagaagatggaagacttggtgggcaaggccattcctctgtattaattttaggtggagaagatgtgaacatgtaagggttttgttgcttctcgctaagaacatcctaattcatgtctctgcttctcagccggctctcgaagattgcccttgggaaacctgcgtccgaagatcttctcttggtcttattctctctaatggcttctcatcttccgcgctacaaacc

SEQ ID NO: 34665 - DNA, 4287 bp, Arabidopsis thaliana landsberg
cacttatttttttacagagcccagaactccctctttaaattatacataggcctactgggcataagccgagagacgtctcgcgcccagtacacgccgaatacttttatttacaaagccgagctcagtctcgcacttaacatctaacccgaacttagacagaaaaaatcggctgtgacgtcaggtgaaaaccagtccgcccgaaagccgagctcaaagcttgcagatggcttataatttagtcgatctaaaacctaatttcaagattgggaatccgatatggttaatacgtaatcaactgacggaggttcacaaaaaaataaaaataaaaaatgaacttgttcttaaggacaaaaacatttattcaaatataaaagtctgaaagataagagtggtcgacataagtcaaccgacctaaagccttcctagctcccagttcgtctgtagctttcctagctcgcagttcgtctagctagcagctcgtctacacttcgcctagctaacagctcgtctgcagcctttccatttccctgttcgtctgtagcttccctagctcgcagttcgtctagctagcacatcgtctgcagcctttctagctcccagttcgtctgtagctttcctagctagcagctcgtctgcacttcgcctaaataacagctcgtctgcagcttgcctagctccctgttcgtctgtagctttcctacctcgtagttcgtctagctagcacctagtctgcacttttcctagctattgcccgcctaacagctcgtttacagcttggagttcttcagcatgtagcctagcagcttccctagctcacaacttgtcaacagctaacattttgagctttttctacaagacaagtcaacaatgtggagtgctccaaagaagtttacaaagactccaaaattccagatctcaacttgagcagcatcgcatgtctccctccttcgttaaaagttctgaagcagcacaaagtaacctttgctttcgtcgtcatgaattctgatcgccaatggagcaacaaaacaactcggaaaattacgatattttctggaataatcagcaacagtcacacgaagccacagaaaaaagcggatcacgatttgaggttatggtttgagagttatgatcgtttttccaagacaattcagactgacaccacttgcaaacgaccaacttcgtgagcaattttccaacatcgtacgacgaaccaagagacgggaaacatatccacagattgcccagacagacagctctccatatagtccaatattgttccaatcgaagcgctgtgccgaaagttacatgcgcttctctccagcagatacagcaagacgaaacactgatcaaaagttacaaaaccagtcgactttgaaatcaatttccaggaagattccgacgaactgcgtggcgtgtaacctatccacggaatgccccgaaaagtagctttcaaaagaagccaatctcgcctcaatcagaaatttacactgaaggttatgactctttctttgcaacagatgcaaccagcgaaacgcagatcctcactgcacgatcaaccaaattagaaagcaaatttctagcaatccaaaagaatgttcatggcgatctgcatatcaattcgaagccccgaggctcagctttctagaaagaccaacctacaccttaacgtcgaattcgacaaagagttatcacagtatttctgtctctgctgcaaggtaatcactagttgataagaacgactcttcatagacgaacaatgcaactctacctttggaacaacaattctgagctcagcctctcgccatttcttctcccatcaagataagtattcgtgctttacattttttgattgttgaagtcaagctctaaattgagtcccgactcaaaaagcttagttcacctagtatcgagctacattcaaaagataaaaagtaattcttgcagttaatccgagctcaacgctcgcagtcacacataaattgagccgagctcaacgcttgctattatgtgaaaatgtttcacaaaaaccgagacctcgtcttgctttaagtcttcaaaacaggataagccgagagttcctcgcaccttaaaaaaaacaaaagagctcaaaagctcacgtatcttgctaacccaaaaaagagctcaaaagctcacgtatcttgctaacccaaaaaagagctcaaaagctcacgtatcttgctaacccaaatcaatgagacaatgtttcgtaaagagtttgtccataggtagacgaggatgtggaaagaattttgtcatttagttcgagagaatgtggaagactctaactcattcagaggttttcccctatgcatttctttgaagacaagttttcctaagaaaactcttttttatttttaatagctaatataatttacttttttctttttggttatttattttctctcgtcttctctccttattgtttttttttctctcatagtcgctctccctttgagaaatccctaactctttcctcttctcttcccggcgatctatctctccgatttgggtattgaaatggcaactcctatggttgaagatacgtcaagcttcgaagaggatcagcttgcttccatgtccaccgaagatatcactagagctactcgtctcctcgacaacgagattcgaattctcaaggttcgcccgctatatctctctcgatctcccttgcctttttatcgttctccatgattgtatcttagtacttcttaaattgggttcatcaatcgctttcattccagtaaggtcaggctcgaatctggtttcgatttttcgcgattacgggtttagggtttgagtttcgtgtaatccgtggaagcaggagatgaactagacctttaattttatgacccttcttgtgatttcttcgtgtgttttcaaagtttggatttttcaactcaattgagattgattgaattgaaaagctacgtctttcttgttgcaaattggatatgttgaaattgctcatcttgtgtttttctttgatggggatttaggaagacgcgcaaagaacaaatctagaatgtgattcttacaaggagaagattaaggagaatcaggagaagattaaactcaacaagcagctgccttacttggttggcaacattgtcgaggtattcaactagttttcttatcttatttttggtattttcctacagagtcttacctatttgatttgaattctaactgttgtgttaccatatcatgctattagattttggagatgaatccagaagatgatgctgaggaagatggtgcaaatattgatcttgactcgcaacggaaaggaaaatgtgttgtgttgaaaacgtctacacggcaggtgagacttccaaacccattctttagatatgttttctacatcttctcttccgtttcccgtttcatgtctgagcaaatacttttgttttcgttatgtggactgcagaccatctttctaccagttgttggactcgtggatcctgatagtttgaaacctggtgacttggttggagttaacaaagatagctacttgattttggataccttgccatccgagtatgactctagggttaaagccatggaggtcgatgaaaaaccaactgaagattacaatgacattggaggactagagaagcaggtatgtttataccattgtgttaatctgctgtattgactttgcttcgtagtgaaactaattgagtttatttctggaacagatccaagagcttgtagaggcaattgtgcttcccatgacgcacaaggaacgttttgagaagctgggtgttcgtccaccaaagggagtgctcttgtatggtcccccagggactggtaaaactttaatggctcgtgcctgcgcagcacagaccaatgccaccttccttaaattggcaggccctcaattggtccaggtatatatatatatatctatatatatatatatatgagtatcagattcaattctcatctcttagaactctttaccctgtctggatataagattttagtgttctggcaacaataattacatgtgacgagctacaatgatacttgattgtaatgacatgatgacatatccaatttatatacagatgttcattggagacggagcaaagcttgtccgtgatgcctttcaacttgccaaagagaaagctccgtgcattatcttcatagatgaaatcgatgccattggtacaaagcgtttcgacaggtacaaatctttttctgattccaattcatgtatttctgcactttctcagctatttgctcaaatcacattctttggtt

SEQ ID NO: 34666 - DNA, 641 bp, Arabidopsis thaliana landsberg
aatccgcttaggttttacttgttgtgaacttgtaaattatactttagttttatcgaaattgttgggtactcgtaaatttaatttgggattatgttttaaaaatgtgaactctaatattttctcatgttgattttatatatgcttagatctgcttagactcgagtagtatataccaaattgtgatttgcttagacttgcttaatttagaaattgtgatttcactcctacaatattttttttttgtcggtacaaagaaggtagttgaacaaacttgttctcaaaacaaaagtaatttccagaaagggttgtctagtttcagaaagacttatgctcaaaacataagtcaagtactattacaaacgtttaaactgcgattcgacctaactgtgagagaatctctgcagttgatggcattagaagagggtctacagacgtgattaaaattcctttgacagcgtacaccttgtgatccattttgaacacacattggatcactttgccatacccatcacgacctatgataacttcctatataaaatcgtcatgataccttgaaggcggtggacgaatagactctgttggagcgagtgcaaccatgcatgataaaagggattaggatttgtcgactccaacctgaacac

SEQ ID NO: 34667 - DNA, 558 bp, Arabidopsis thaliana landsberg
agtgcttttgaacgtttactaattgatatttggctaactacattcaatttatcaactattattttatttaatgttacagtgatattcaaggttaaaagactacagagaacatgcaggatagcattgattatagtaatatgacgaacatgaaaatctttcttatcataaagctgctatgtgtaagcaatctcatcgtacaaggacatagaagccgggacaaagtgtgagtgtgtgacagaccagaagtacagaacggatctaaattcttgatttcataacatgcatatggtgatgattagaaaattttataaagtataatgattagtgagaaccaatcatcattcatatatttggttgttggcaacaatttgtagagtggctcattcaaaaagaaaaaaacaatcttactttttggtttggttaatgagaatatgatagcaaaattaaagtttcacatgctaaaagcctaaaaattctgaattaaaggaagacaatgctatgaatatagaaaaaaaagcaacgcatgtgaataattgacagataagaaacgaaataaaa

SEQ ID NO: 34668 - DNA, 2893 bp, Arabidopsis thaliana landsberg
  unsure (1)..(2893): unsure at all n locations
aatcggaagagaagagatgaatttgagatttcagagagaaagtgttcttctttgcgaagtcagcgaatggagtttagtttttatagaacactgaagaaagcgatctagggttcagatttatttgacgtgtcgcgtgcaactgacgcgaccctacacgtgcggcgtttttttgttttttcttaaagaaataaaagtcagatcgtaaatcttacgcggcctctgagattctctatttaattaatcaactcttaaataatttgattattctactgtttattttaaagtcaaagcatatagttgactaaaaagtcaaaacaaagtttagagaacaagtagtataaagagacgtgagagatacaatcattacatgttggttgacacgagtcagttctgagatcaagctaaaacgtgctaccaaaaacacacaaaaaaataacaagatagatacaagtagacactgagattcaagaagcttacgaatctttcaaagcctgtgtatgaacacttgaggagcttcttccctgcaaaacatttggagatatattgatacaaatgttttaatgatgtattgtgagagtgtttgtgatgatgaaacgaattgagaagagtgtgggacttacttctctttagcatcttggtaagtgtggcttgatgcaatggccaagagttctccagtgtggtcaaatgctaaagacgcgatgctatttgagtaccttggcaacttttataaaaaacacaaattattatagaggagaataagaacaagaaggaatctagagagaacaagtcatgtttagtgtttgaacctcattgagtcttcttctgcttttagcattccatgagatcacgtatccttcattgtcacctgttacaaaagtccctgacccactgtggcaacaagaaaagagttagtttgatgatcaatcatgtgtaccattagatggtgaatgagagacatataccatggactgaattcgattgcatttatgcatacaccatcaagtcttccattcctactcttgggatggcatcggaaactgtatctgccatgaatttatggtacacatcttaagagaaaagattgaaaacaaaccagtggatagccaaatgataactttcatattgtggacttacttaatctcactggagcatgatgtattggggaaatccacagctactcgtccgtctactgacccaactgcatatcctgctcaataccaacaataaacatcttagaaaccaaaccaaacatgaaacctgatcaatgtaaaatataaatcttttctcagtggaaatgtaaactatggccaaataacaccaaagacagattcttgtaactatatatgtttacctctggaataaggtacagaggtgatacatctgattggcacctccacttgggatgcatacgattgaaaagcttcatctaagttacgtaaatcgtatatatgcatcgatgcgtccacacaaacaactaagttgtttccagatacagtgacacatcccactgctccaccagcatcagtcgaaaacacaagactttctctttgtcttgtatcccagaatttgatcttctcatcaaacccagtcgagataacttcacctgagccgcatcaaaccacttagagtttagtataagacagtatacataacgttaccaaagtcttagattcaaaactcaaaacctgataccaaatcaacttatgtaaaaacagtcatcaccacttacttaaaaatgtaaaaagctgacctttttcataagagtagacaatggatgttgaaatgtcatcatgccttccaattgtatcaactgttccagcgtttaaatcatacctaacaagcaaggtgttatcattctatacaagatcagatctttttcattgaaaaggtaaatttgctatcttcatacaatagaaaagcgaaaattgcaaaccttcggatgaatccatcagaaccagaggtaaatgaagttgattcattctcgaaacaacaatcaagaagagcagcttgagagtttaattcaagacttagcgaagagctctccacatcatacaatctcagatactacacatttacacaagcaagcaacaattcgtcactatctctgagcaccnnnnnnnnnnnnnnnnnagataaaagaatagaagagtaggcactcacataatcccaagaagcatccagtatattgtttgattgagggcattatttgaacctcgacctcgcatcctctatagggttttcaaattcaagtctatccccgctcagagtccaaacccagagagacgcagcaaaaccgcttcctcaagcaattttggagaagaccgttatctcaaatcaaacgccactctctagacagatgaagaaaactttccccaatttcgaattccgaatttcaaatttgtggactagagctttccccaatacctgagctctttcaaaattcacaaacgggttaatgggcttatggcccaatatctattgtacatactactttgaatgtttgtagtcgtagatgataaatccggatttttggttcgttttcggtttgtgttttgggatttagttaaagttataatttaattttaggcatgtccatttcggatcggttgcgtactgtatctgtaggtaaaaaatcttgttctataacagttcttgtttgaaaatatttattttagtctaacaggtaagagattcaatagtccatttctatttttgtgatgggaaccatagcaccatattttgattgagtttaacttatatagtttgtggtaaagtattgcaattgaatatgattaacttcacagaatgtgaaactaaaataggttgagccgaccagctcgtgtaaaacacagtaaaaaaacttataagaaaagagagttgcatatatatatat

SEQ ID NO: 34669 - DNA, 1108 bp, Arabidopsis thaliana landsberg
agccccggcgctgcatcccataccggagagattgtaagttttgacgtcggttttaagcttgtaccggtttacgatcatggacgagagagatgggttcgggttaaacaagctgcagtttacgatgaagattccgacttctctcggttcgattccggttttcttaaatagtgagttaagagctccgaagatgactaattcggattcatgtctcgcctcgtacattgatggagttggtggagaggttaacatgcaacgtggggagtacgtatcgtctcctaaaccggaccggtttagtatcctcgtcatgaattggattgtttcttcggtgtagagttgagcgcctttggccatgttgaagaacgtttcggatgagattttgcaagaatccgtgggttggtgacatgagaaatccactaggtaaaccggtttagaccgggtggttgagtaggcatagaagaagatggatatcaggagtaaaccgatcttgaccggaaaaggagagaagaagtcatggtgaaagtgaagtagatcaagttcaaagagagatagaaggatgagtataagcaaaagaagcttgaaatctgccattgcaatgaacatatgagaaaatattgggcattgggtgggttttaatttataagcaacgtaccttaccaatatttatgatatgaatagagatggcgttaagcgcgtttgtgccgcggaaaatgtggtctgcgttttaaggtttacctattcaaacaaaattcagagacatcgaaaatgaaaaatccttaatggttttttttgggctgcaaatcataatcggaatttatttaattgaagtacaagaactttgggccgggtgggtttgagtaacccggcccgacatgagtacccgtaaaacttgtttgaagcagaagaaaacatgtctttgactgtcaccatcaactcctccatggctctagttcagagacaacactcttatcttctccgttattttcgtctcatggcttctcgtcctcgtctcttctctcactctctatatccttcacttcaccgtcactcctcagctctcagctcttcaacacccaggtattgtattaattagctcatttcttcttttcac

SEQ ID NO: 34670 - DNA, 1808 bp, Arabidopsis thaliana landsberg
tcactcgaccacaacaggctaatgccagaagtaggatgtggtcgagtaacaggtcgagtaacatacatgatatgaaacagatatactcgactgcacagtctgttgccagacactgggtgtggtcgagtatactggtcatgtaacaaacaggaaatgagacagccgtactcaactgcacagtctgttgcaagacactgggtgtggtcgagtaagttgatcgagtaattgcaaaaacgaagaaacaagcaatgagaacgatttagcggtaacgataaaatagagaaatcagattgacgagagattcctaaggatggggtaatcgaatagagtggtatcctagcctattcgaatggtaaacaagcgcaatcaagctatccctagacaacaggttcaacaacagatcaattaactcccgtgaaagaaatcttcaagcaaagctagcccagactaattcccattaacggaatctaactatgcaggcaataagaacagactgataaagtcaataaacgctctaaacggccaatctcttgggatagagacgcatatctcaggaactagtagatcaagcattccatcgatcaccttctgggtgcgggaatgcttgggatcgaattccagttgatcagaaagaaataagcagtaaacgcaactagtcctaaggggattcaatcaattctaaatcttaaccattctacagactacggattccacaactactctatcccatccctaagaattctaagtcactactcacacaacatgctcaaagacataaacgcagataaacgataatattgcataagtaaagagataaggagtagagaaacaagatgacagatgaaatcaaatgcggattctgaataacttggaaaaatctcgaattacaggttgcagaaacaaaagcggcgcagtagggtaaaacagaaaaataaaactgaagtaaaaactcaatgtcgactggatgtctcaggacagaaccctaaaacatctatttataccaaacgaaataaaatgatagtagacgggccaataacctaatcgcccggcccatagagtgataatgggccgagatgggcttcgtgatccgatggaggtccaggccgcttccaaacactttgtcttctcctcttttctaccttgtgctcagcttgtctggttgagtgcggatttgagtagactgtgaagatgtgatcgagtgtccggtcgagtgatggtgatggtggtgagtgatgatactcgaccagggggtcgagtaacgtggttgagtgaacggccgagtgaggtcaggtggtgtggcgaagtgaaactccaccagggggtcgagtggcgtcatcgaatggcctgagctgtggttactcgaccaaggggtcgtgtagatgggaaaaatggctccaaagtcactcgaccagggagtcgagtattgtgctggatgtactcgacctgggggtcgagtatgtcctctggttatggctcgcttcttccaatttgctcgcaaacagctccaaatcacctgaaaacaactcagaaatgcaatatgtatgcaaagctatcctaatcatgcaaagcatgcaagaatgataagaaatgatataaaacagtgatgaatgatatgaaactagactcaaaatgatgattaatgaaccttgaaaacatgcaaattatagacatatcaactccctcaaacttagtctttgcttgccctcaagcaaataagaaaacatagttaaaggagaggtttgaaggtggggactcagaaccaaagcatcaggtagagcaaataaaatcaatgtccaagttggtagttc

SEQ ID NO: 34671 - DNA, 2644 bp, Arabidopsis thaliana landsberg
ctgtgctcaacataccaagtcctatgtaacatatttaaaaagatcgaatctataataaatgtgttcgaagaaaaagacagatgcaagtattacagggaaggggctaatggttgacttaactatgatgtgggagaaatcagatcgttgtttagcgatcgattactggcagattataatgtaaagacaaccaatgggcgggacaacgatgggaactattccagctgatacttacacacaatgtataacatggcaaagacgaagaatgtattgcttttttgccatgaatgtggagcttatacaatcacagaacgcaattgcttttgagcaattcgaagaagttagatggaatcagtaatgaaatgtgttgatacctttaacaaacccaaaagctgcaacggatccggatttgagatgattatcatccaagtctcttctgactgcatacctgaatgtgactccaaacaatgcacagcttgcaaacgctattcccaggggcagaacaagctgctccatgcttgcgacttgagaaagagcaaatgggagttccgcaatggtcccaaccgcagctgcgatcactgccgcttttgcagattctaacctctccttgtctttatcaatcgaataacctttctccgaacttccaattgtcgagttatctgctaatgacaaggagcgttctgcttcctcaaccattgatcttgctgcgtcaatctcctgctggcattctgcaatcttgaatcagatattgaataagattaacatgctctgtctacaaatacaaaaccaaactagagactttgttccaaaacacgagaaaacacaaaatgcaaccaaactcatgatttagttagtaaccttatctaatgaagtaccttcacacaaactaagagaaaccccatttccaggtttcaagcacaaaagcaacaccattgatattgattgatactttgaattacctatcctatcctaagcatacaatgcacaacttgagcttatcctggcatataaatatatactgcacaaattcactagtccattgtaatataaaccaatcattctcaatgcaaccttaatctatactctatagtagaacctcccaaaaacctcaaattccaaagagcaaaagaatcaaatgttcaatcattttcatatctaacaccatttcgagaacaagctctcacctcagcggctcttgattcgagctgattaatataatcctgtagcaatttcgcctcaatttcttgtctctctatatcttcgagctctctcttcgcaatctccactctcaacgaagctttttccagaccatcaagcaaacctttgttctcttctctgctcaatagctcctccacttgatttcccacaataccggacagagaattcttcaaatctccgccgtcactcgaaattgctacattatcttccgacgaacttctaattctccagtttcgagttctacgatactgagaactcgatgcagtcaattgcttgggattcaaaagataaatttcaggtaaagtcactgaatttggtttccatggaagcgattgcagagataaagattgcattttgataaagaaaaagaaaatcttcgagttcttatctggttgcgaagagtggccactaaaacggaatgaaaaacgacacgatttttaaaatgcaacgatgcatcagcattagcctttactggtactgaaatccacgaaacgacatgcattctaatatttcgaaacggcatgcatttcagttctccaaagaaatcaaagcaaactatttgagaagtgtttgacccgcataatcactttttctttagtaacaccagagctaaacactgttaatgcggctttaaattttctttcggataatgcgaatcttaacaagacttgctcaaaagtcaaaactaacaaagtagtagacataactaacaaagtagtagacataactaacaaagtagaagataatcatggggtacataaactcatcacttattacaaagcactctaattcccgttttattcagactctaatctaattccgacactacgctttaaaagcgttgacctcatcaaccacagccttcttgtacagcgacacatcggttgacccgagcaccacgtgatacccacgtgccttgagatcaccggttttgtcctgagccgtggccatccctgccaagtaagctccaccattcgccggatcagaggccaacaccgccgtctcagccaccctcatgaccgacttcactttcgggtttcctggatcgttaagtaaccccaaactcgcactcagatctctcggcccaataagtgatgatggacttgggctttctcgaagagagataacgtgttttttagtaaatctacgatgaatcactaatttgttggtgttaatgtaactagtttgagacaaggtgagacaaataattcagacctaggtgcaaagttgaaactagttgtatccgtgtatgtgaccaaggaaaacttgacagtgtgaaggtttagttaaaaggacatgaaaagactgcaaattaaaacatgatccggttctatatgagttgaccatctttgatcttcatgtgtttttcaatttctgttttattaatcttgttttcgttctagcaatgccattagtttgatagggggat

SEQ ID NO: 34672 - DNA, 3775 bp, Arabidopsis thaliana landsberg
  unsure (1)..(3775): unsure at all n locations
ctggtgtaagtatcaatgaacggaaaggagctctcatcaaattagacatggcgactgagatatactcggatagtgtcagtatagacgcagcgataacccttgtatttttctgtataacctagaaaaatgcacttgagagacctcagatcgaacttattacgagcatatgcacggagtgtggggaagcaggcacattcgaatgttctcaaggcagagtagtcatgtgcttttccaaatagaacctgataaggtgtagtagagctgtcaagagctgatgttggaagaagattgctgaggaagttggcagtaaagaatgcttcaacccaaaatctctgtggtgctttgctttgaaacattaatgtaagacccctttctgtaagttgtcgatgctttctttctgccaaaccattctgttgtggtgtgtgagggcaagagatataatgttgtataccagattcttgaagatgttgtaagaacctattacttgtgaattctcctgctccatcactctgaaaagttccaatttttgtttgcaagagattttcaacaaaactctaaaacttcatgaagattgaacaaaaatctgatttgtgctttaatggatagaaccaacagaatctggagtagttgtctacaaagataacataaaaactgaagccttgtactgactttactggtgcaggaccccatagatcacaatgtatcttttgaagaggccttgaagtagtagaacaagagcttgaaaaaggtaatcttgtgcttttaccaaactgacannnnnnnnnnnnnnnnnnnnnnnttttgttgatgttaacagatttattcttgtgcagatactgaagaatttcttggtttggatgtcctagtctcatatgccaaatgtcttcagaggcagtctgttgacaagagcaataaaaggcatgcactggtgaatccttcagaatatacaagccattactgttgtttccctgagccagaagcctctttgttgccttatcagtgacacggacataatcagagtcaaaatcaatggagcatggataatccctggtaagtttcgaaacagacaatagagattttccaatgttagggcaaaccaaaacatctttaagaggtaatttacctgagcttcctggtagagtagttgatccagtgtgagtgataggtagaaaatctccatttccaaccatgactgaatctgatcctccatatggctgtgattgctgcaggttgtgagtagagtttgtaacatgtgctgtcgctccactgtcaccaacccatttgttcccattatggtctgtcacatccgtgattctcattgcagtcaaggcagcaggtaactcttcatactgatagctgttattgaatctgtgccaacacttcaaagctggatgtcctggcttcccacagatctgacacacaactcgattctctgtgttgttgtaggaacctgaagtacttgaagagatttgttgaggaaaacccctgccttttgttgagtaattcccactctttccctgatttccaccaggaatgccatactgattacctttccctttaccagagcaatttgcatagaaagccaggtggggtgaaacttccatacccacattgtacctagcaagtctgacagagaaacttttaagcctagaagataccttctcaagagttggaccaggatacatatctatcattcctttcaatgtaactttgataggttcatactctcttcctagaccctttaacacagcaaatatcttcattttttcaggaactggactccctatagaagctaactgttcgcatatactcttaatatctcttaggtactcatccataggtctatcgaacttttctgccgtttgaagtttactttgtagttcaaccaatctagaagaagataccttattgaaatgtttggcaagagcaacccagagatctttggcagttgtagtgcctgtgacttctgcaaggatgtcttcagataaggagcctagtagccatgcccgaataatctggtctgccctgaaccactcgttatagtctggatttggaactgatagagcttgacctcctccaacttgtgggatttgcagagtagctaatggagcaggagttgaaccattcacgaacccaagcagatcttgaccagataagaatgactcaaactgtgatttccatgatatgtaatttttctgagtgagctttagagtaacacagtttgtgatgtttaatgcaggatatgaatatagatccatggattgattaaccatggctctgataccataaaagtagagagatttaaaggtaaagtatgaaggagattgaagtgttcttcatcttattactctcttactgttttcgattacaatagcctctcttatatagtcatagaggattaggttaacccctctaaacacttgaacctatttgtcaagataaggtcttgactgagacagctggagctattgagcatcttccttgaagcttccttaatcaccagctcatcacttttgtcttcttcttttgcagatgaccgttgctccttttggatcaagatgggctcttgttttaccttgggcttccaaaccatgtctttgggccttgtcttctgtattgggcttggagttgtgtccaaagctcttttgtcttcttcctgagttaggtttactttaccttttgtcgattgtacttcttcttcctcaatcgaactttctgatctcttagcttcttcactgatagtgcctacttcatctctatccatgactgttttatctttagttcccaagatttatgggaatgttaatgagtgaatatatataggaaaaaggagagaatattgtagccgtacttgagaagctgataatatattctccgaaattagtaatatttgcaaccgtttttggttagtattgattggttttcttctttttcgaagatttacatctattatctacagattctcattactttgctattaatttctgcatttatgatgctacaaatctcatataaattccaaacgacaaataaaaaaaaggagaagaaaaataacaagttactttgacgacttgataatttactacataacgctttcatatagaatcgttgaagaaaaaaactaaaaaaggtggggttttttttcatttggaattgtgtgtcatatgtattaagcaaagtagaaaatttagcaacatgaacaaccaacaaacaggttattttattattctaacaagaagaaaacaattatttaaaatgagaacaaaaactaaaatagtatacgttgtatgcatcattgctcgatgagagcaacctccttgcttccattgagctccgcatgcatagcaaaacttatagccacacctacacatcaaccacgaacattacagtagcccaaaacataatccaattccaaataggattcggaaatcataatgactatagaatttgattatagataatacctgcaagttacaggcatgcgttcttccgatagttttatcttgtgtaggcaacttctacattgacgccacactattgtaataggctcacgaccggaactcttgtgttccttgcacgacaagttactatgccacggaactttgcagttaatacaaaagtgtttgcggcatttatagcaacatctcctaactccatcttcttcagtagattcagtgagctccgtcttcgacatcaaagcccagcaccttggatttgggcaatgaaatctgtcacatacaggaattgactcctctttgatcctttgttcccacat

SEQ ID NO: 34673 - DNA, 2444 bp, Arabidopsis thaliana landsberg
ttgcacctagaagcaggcaagcaccaatgttgggggtggaaaaagcgactgtgtttgaagggtcgttgaagcgtttggttcgttgacgttctctattgagcgttttgatggccacctagctagggcttgtgaagtagggaagttcttgaaacaatagtggcacttgaatctttaatttcttctttgttattgtcgttgatgctttccatttttttttttggtcaaatcgttgatgctttcaagagtctcaactttgtgtagaaaaatgttacttctcttctgtttttttttttaacagcatttagtacaagttttcaggtggatccctaaagttaccttctcccctaatttctttgtttcctcatcagcacgattcttctttttagtttggattttgttttttccgtccagaagtacgctcttgtttaaaaaatgtcattaatgctgctctccatgacaaagtgaaacattgacgatagattctgttagtttatcattgtcatatttgttttcttttgattaattcactacaaagaatgaacgaagcttttgttaatgtactgtgcgataattaatgatcagttgatcacacaacgtaagagcaaaaaaaaagcatgaaattgctagttttgcgatacaaactttattggtctaaacttttatcaaacaaagaaaaaaaaacactaattggtctaaatgcggctcacatggatgatgcatgtatttattttgctccgtctaatatcgttactagaagaataatgtctattgccaataataatataaaaaacaagaaaaaaagagagtaagaaacagcataagcaactctaatgtaaatagatgcttcgcttttttttttttttatttgggatgaacgtggttgcccatgaggaaaaaacatggtcgtgaatcaaatgttgctcacacgaccgattcacatccagttgccttaacaaaagaagaaccagcttaagattaatgtaccatacaattcttcaacttataatccttaaaaattgagggttgcaaaagaatctagtataaattaattttcttcacgaatcactacttttccaaacatacaacttagcacgttctctaatgtacttagaagtgccacacacgaacgcaagttgagaacacaaagcaagactatataaagggtgttcatgttcaagtctaacataaccaaaacaaagaaataaaatagcataataggtgtaatgagatcctcaagaaccatgggaatagagaactgcatagtttatgttgtggttctaagtgctattgcggctacggtgacatcatacccttactcatctcctcaaaccccaagttacaattctcccagctatgaacacaaaggccctaagtacgcgccacatccaaaaccatatgttaaaagttccccaccaccacaatactactccccttcgcctaaggtaaactacaaatctccaccaccaccatacgtctacagctccccacctccaccgtactactctccttctcctaaggttgactacaaatctccaccaccaccatacgtctacagctccccaccaccaccgtactactctccttcgccaaaggttgactacaagcctccaccaccaccatacgtctacagctccccaccaccaccatactacagtccatctccaaaggttgactacaagtctccaccacccccatacgtctacagcttcccacccccaccatactacagtccatctccaaaggttgactacaagtctccaccacccgcatacgtctacagctctccacccccaccatactactctccttcaccaaaggttaactataagtctccaccaccaccatacgtctacagttctccaccaccaccgtactactctccttctccaaaagttgaatacaagtccccaccacccccatacatctatagttccccacctccaccatactacgctccttcaccaaaggttgactacaagtctctaccaccaccatacgtctatagctccccaccccaccatattactctccttctccaaaagttgactacaagtccccaccaccaccatatgtctacttctccccacctccaccgttctactccccttgtcctaaggtcgactacaaatcttctccaccacaatatgtctacagctcaccacccacactatactactctacttctcctaaagtcacttacaagtctcccccaccaccatatgtctactagatgccatactatggaatttgaattgtttcattaacaggaaacatgatcgtaatatttacattttatgattttttttcatttgattcttctggttttgttcttttgttcaactatcttcttatgttttcttaattaataaattttgtcgacctttataaatgtattccttagttgatatttgttggaattggttccagcacttttattatatgcc

SEQ ID NO: 34674 - DNA, 1123 bp, Arabidopsis thaliana landsberg
gttttaccaaatctccctctattttttttgactttcaagattaattgattatacatgcatattcattttcacaacaaaaaaaaatacattcttgaatattttaagttcttatatagtaaaatataccgttttcacaaaaaaaaaaaaatcagtttagtgcattgaacatttttaatcaactaaagtgtctttttaacacatcataataatttgtaaacatccaaattgaaattttatttaattttgagcgatatattaacaatttttaaataaattatatatataacttaacgtctttcaatatatttataagattttatatgacttattttttttgaaccgacatataagatctttagtcaagttagagagtttttcattgaaagttatcttaaatcataggcttgaaatttttaaatgtgaagaaggttcatctattgttttgactttcaagaaaattggtcatacatgcatttgcaattttacaaaaacaaatactgaataatttatgtttatttttttggaagaaaaacatactgtttcacaaaaaaataatttaaaattgagtgcataacttttaatcaactgaaatgtctttgtaaagaacatcttgtaaacatcaaaattgctataattaattattttgagcgatatattaacaattatagataagttttatatataattcaatataaatattattttatattcaaaattaaacccgaatatataatccacgcatcgcgtggacagcttctagtatacatatacttttaagaatcatatatctaaaaaatggtatgataaaaatcattatatccaaagtaccgacctttatgaaagtacggcaatctctacccaaattatcttctagtgtctcgctgcgctcttctagcacgctcccaccggcgaaaacagcgactacataatcaagactttgactcccaaatacagactgtaagtttctaagtgtgatctcttcctcttgagtaatacgagtccttgcacataaaactaagagcacagcatgatatccctccttgatgctagagtcagacatctaacaatcatctttactgatatactcagacgacactgacaagacaaacagacctgttccata

SEQ ID NO: 34675 - DNA, 580 bp, Arabidopsis thaliana landsberg
cttgatatagtttaaaacataaattagttggaagaaagatgatagcacaaatcttatcccagagtgcagatgcatatcaatcttacagagattctataaatagatttttctgcttgaaagctttaagagaaaagactaaaacctcaatttcaaactgctagactatattttgtggtggaatatgatagggaacggggaatgttgaaatttcactagagacggaggaatcagcaagataggcacttccgaattcgttgacatcatagaataggacgaagttaggcagtaggccgggaacggaactagcaggaacacaagtaggttgagcttctgagatgaaaatgaagagatctccgatgtcttgagtgtaaacagcgtttccttcttcgtctagcttgaagaccattatagcttttgtttttattgtggccctacctttgataaccttgccgacgatcttcttgtaccacttaaccaagaacgtttcccctgtggttgttgactccaccaagtcttctcttttgtagcaagaatccataagctttcgtttggtcttggtcagcttaggaaggtttcggaa

SEQ ID NO: 34676 - DNA, 2069 bp, Arabidopsis thaliana landsberg
cagaccatacattggactacttttttgagcaaaacgtggggatcctttctggactaacaatgctagagcaacaacaaatgctgcagatgctaccaatatataaatgataccaaagcacctaaaacgatatttcataaaatcaggcaaggagaagtcatatcacatggataacaagacaagctttgacgtatagcgatacagctaaactcacagtgtaagtatgggcataagggcacatataaccgagcaaactcgagatacatatcggggaggaggagtcattcctttagctatgcctttacttataacaagcttgaaatagtcgcgggaaccgatcaaaacagaacatgctaaagctacagagaaaacccatcctccagctaacacaacacatccaacaggtaaaccaatgccaataccaaagatcactcttttcttaagctggcttgttttcttctgcttatcttccacattctgcaagttatggattctatcaattccctaaaaaaaaagaataaaccaattgagaaatcagcgagggctcactgactagacaactaagctgattctcttccgtaaacactatcaagtcatttctcagtaaagctaaaaattgagtctttctatctcagctaaaacttgcttcttctaaagttacagattttgaggaggaggaagcataaagtgattacctttgagtggtcatcatcaccaagctggtctgattcagctcgagcaacggccgtgaggaaacgccggttaacagaaatccgaccaagtccggaacgaaacaatggtttggtatcaccgacgagacgtagaccagataaagggggacgaattatgggttttctagtgaatgaacggcaagggcatgtacagcgagaagtcgataaaacaagttcagcaaaagtcgccattgctctccaaatgccccaagaggcaaaaacaaaaagaggaaaaacagagttttcttgaaaaatcaaaatctctgaatcatcatcatgtctggggaagagtgtgttcgtatttgtcatttggttaatgtctcggcgagttttgttttgtagctacgaagatgtaccaggtagagttagaaccttccgacttatttagagtctttgtatcctcactaaaacaatgataaggcgacatgtttcatccctttattctatgagagatggagagaaaaagttaagatgagagaagacgaagaaacaaaagtgtttaagactacacaaagttgtaataagagagaggaaaaaggagattttatgacaattctaagtcttatggaaaccgtaatacaaatcctctaacgcactaagttcagattttaaccaaaggtgcatgacgacgataaggcagaagagaagattgtcctcctcacacaatttgatttctttccttttcaatgcttttttaagcactttgagacttttggagtattttgttgaagggatctgatcatgtcctcttcataatgtatcccaggattaaaccgattaggccgaccagaagaacgtacatgaaagggattccaccactcttacttctcttgctttcgcgcctcaactggtcctgcaatattaaatcttttgttatccgagaggtccttgttacgcaacaaaaaagaaaagcagggtacatagacttcattgagcttaaatctaactactcagataacaagaaaatggccgctactcctaaaaccgggtaactagttatgaaagtgttaatcatcaattcccatttcagacaaatagtttctttgattcttaaaccaacaaccggaaggaatagtttaaaagttgcttaccaattcttgttgaagcctgttgttcagttgaaccgcagagttcttttcctcggtgagttttgtgaccagagctcttgcctgatatcatacaaattgataggtgtcaaaattacattgtaatagaatgatcactcaggtctcgtaacttcaatgctaaaatgtgccaattcctagctagtagatatgttgcagcttagaccaataaaattgcatgcataatcagtaaaaagctaaaactacagcagaggaa

SEQ ID NO: 34677 - DNA, 1817 bp, Arabidopsis thaliana landsberg
tcgccacgcctatcaatcgacacaacttgggtgtcgctcgacaccaagaaaatttcagagcagatggtcgtcggatgactcttggtgactccaacagaccggatcttttctattccaatcggtctacaatccgaccacctacgtttgacagaagcgttttcgagataaacactgctttctatactcttgtgagtatgcacccttttcatggtgaaccacaagaacacccggtggatcacattgagcggtttgaagacttggtttcaagcattaaggcaaaaagtgtttcttatgactaccttccctgcaaggtcttcccatattctcttactggggaagcatctttttggcctaagtagttgaagcatggatgtttgacaacttggaaagaaataaaggtttcttttctaaacaacttctataatgatgcaaggtccgaggagctgagaatgaagatctctaccttctctcaagaagcagctgaagcatttaaagccgcttggatcagattcagaagatatcagagggactgcccacatcatggttttagtgacgttaagttgttaggtgtcttcttcagaggagttgattggcattatcagatggctttggatgcagctagtaacgggaattttatgtcaagatatccagaggatgcgacaatgtttattgaaagcttagcttcaagcagtagcaccaaaagcgctgacaatgaaaggaaaactcaagctgaaacatttgataaccaacagattcagtatgctgcacaggttgactgtttagtcactttagagaagatggatcaacagggatacatgagatacaatcataaatctacatatcagaagccggtttagcaatctacaagctttactccgacttatgcttcttcaacccaagcccactaagacgattgaatcgatgctcgaacagattctcagaggtcaagagaagcaaacgaaagagtttgatcacaaattgatgctttatccaaagatgtgaattggaagattcaagtattgaacaatcggatcaagcaattgactataaacatagcagatgttagtgttattaagttaaggagtggaaaacagctaaatccggttcttcaaaggaagcttcctgctgtcaaactcgtcaatttggaagagaatgatattgcagtttttgcagacaagacaccagtgtcgaccgacactactgggtgtcgatcgacaccaggctacgcagacactacagaactcgacagtgttgacaaacaccaacagggtgtcgatcgacaccaacccagtctagacctgcgaatcctccaaaacccgatttcagctgcaaaaaaggcaaccaaacccaagattcctttccccatgagtcctaggaagtccaaacaagagctagatgatgctagatgcaaagctatgatggataagctgattgttgagatgccacttatagatgttgtgaagtctttccctatgatcaagcattatgttaagagaatggttactaaggatttgaatagtgagcatggtgtgatgatgatctctgcacatgtaaccgactttattcagaacaagactccatagaaacaagaggataaaacgaagacaatggttatctcggaacagattgtagatctgaattgtagacagactatagatggtcgagttggaaaacgagtgtcgatcgacaccccttctagtatcgatcgacacccacaacatactgctccagaattgtttctcaagactgaaatcgatgttgtaagtccaggacgaattgtcaagtcaagcactacacctttactactcattcaacct

SEQ ID NO: 34678 - DNA, 949 bp, Arabidopsis thaliana landsberg
tggtcaaggataaagtgattgcggtagatgaaacgaattatcaacgattttcgtattggccttttagcaaaaagacacacaacaaattcttgtgagcggatcccaatacgtatcttcgatgaccaaaacttactgtcgtatctgtctagtttcctctctttcgtcactttcgcttaaacgataaacccatcactgaggcttttatttgtagtatttttggctttctcgtttattttaccaccattagggccgatttaaaaaaaaaaaaaaaaaaggaagaaagatttttggaacattctgttgtacgtatacagcataatatatatctccaatacttgatgtacacattcatcaacactgtatgatccaaagattaaaaatatgcggttgtacacacgaacagagaaacacctaatgtacgtaactagcgtatacaaccttgttaaattccttttatacatgtaacatgtgtttagacctaaagactctccagcttttttttggcgccagttcccaactatttctttagacttagtattcatttatttttctgaattagtcccatcgttaatcaaatttacatagtgttctgattttttaccataaaaccatatttgattctagaaatttggccacgcgatgggtaaatgatgcatttaattgttttgtatatagttaaattatatatgaaagtgtacatggtccaacaattaaggatactaactcttacccaaacaaacaaagataatacatgatccaacacatgcatgatgcacctaaggctaattaacaccgctacccggaacataataaaagaagacacaaacacttaagaacctatatgttctttccactctttctctggtctctcaaaatttcagacaaccttgtagtagctggtcatcaagaatttgggtatctaatgacattttattcataacttggagct

SEQ ID NO: 34679 - DNA, 1478 bp, Arabidopsis thaliana landsberg
tgtaaaagaaaaaaagggtttaaacccggattatatctaaccgaattatgttaaatatctaaccgaattatgttaaattttataatagcctaactagagactggaagcaatgatatcgagcttaaaggagtgttattgatttataaatttatatagaatttgaaaatctttattaattataaaattaaaatatatgaattttaaaataacatgtgtttatccatggatttgaatccttctattttctctttcaaatccatttaattttatttaaaacataatttggattctcaaatccaaaaacaaatgactaaacgaataacaaaggattttaactagtatttataaatcattgaatcaataacacatgatattaattaaaattttaaaatcaataattaaattacaaatgattttgttcggattttcaattcattataaatctataaaccaataacccttcctaaacaaaaaggtaatgaaaatatatttaaaaaaaaagcttattttacattcaaaatcttgttttaaaatctgtaagaaaaaaatgaaagcaacactaccaattgttccctacaacactttttaatcgatattaaaaaaaaaaaaagatagttagagcatcttcattggaagtatttcaatgaggatacccaacaaaaaaaaaataattgaaaaaaaaaaatatgagaggagggagaaaaaataggagagaaggagagttgagtttctcttccgagaaactgtgaaaaactattctcatccaatttggacaaatgtcatcatactattaattcaattattaaataataattaatatatttgttttagttaaaatattaatatatattttttttgagaaacttttcttgtttttagatagagatggtcttagaagccttcattttcaaaggttgattaaaaataaaataaaaatttggaatatccacttgcgattctttcttggaaaaataaaaaaaaatcatatgattgtgtctggccagacaagctagctatctcatttaatttcccaaaaagaaaatataaagcacgttcttcgtctcggattcagagaaactaatcttgaagatgagttcaagatctgacctcaaaatcaaacgagtttctttgataatcttcttgctaagtgttcttgttgagttttgctatggagggttcacaagtgaatatgtcagaggaagtgatttaccagatgacatgccactagacagcgatgtttttgaagttcctcctggtcctaattcacctcaacaggttcatgtaacgcaagggaaccatgaaggtaatggagtgatcatttcttgggtgactccggttaagcccggttctaagactgttcgatattggtgtgagaataagaaatcgaggaaacaagcagaagcaacagttaatacttaccggttctttaattacacgtctggttatattcaccattgccttatcgatgatttggaagt

SEQ ID NO: 34680 - DNA, 249 bp, Arabidopsis thaliana landsberg
aggattggtgattgggggttgttagaagttccattttatgtactctttgagaaatcaaaaaaagcaggtatacggatgctttttttatcaccaagtcaagatgaatattatatgatagcggcaggaaattctttggctcttaatcggggcattcaagaagaacaggctgttccagctcgataccgccaagaatttttgactatcgcatgggaagaggttatcttaaagcatttttccttttcgattttt

SEQ ID NO: 34681 - DNA, 566 bp, Arabidopsis thaliana landsberg
agttaaagatcttaaatgcaataaatgtgccacaatcataaatttttccttttcacttaattgaaaattttaatcattaataagaagaatgcatggagcacaattattttattttttattttttgctctcatatggtatgttaaattaattttcccttaatttaaattccccatatcaaataagtttttttttttttgagaaagacttgatttcataggagaaatatttgttaatattttcgacaaaacattttctctgtttgatgtatttccatcctcgtacaataaatactctagctattaaattcttagcccaaacgaaaataaagaaaaataaaagggtcctactaataaacaaaacaaaactagtggtcccaatttgaaatatataaaaatatataaaattcataaagctttgtggcttcagagcttccacttccatcgtcgacttctattttttcttctttcttcgatttcataccaaaacaagaactctctgttttcgacaaaaacgaaaccttgagatctattttgattgacttttaagaaagagagagatctttctt

SEQ ID NO: 34682 - DNA, 6361 bp, Arabidopsis thaliana landsberg
  unsure (1)..(6361): unsure at all n locations
ttttttggcgtagagttcctttgagggccattgcgatcatctccatatcagagttagtgacagtccctgtaatctctcaggagtagagtacgttggctacagaacgctggaagtacctgatgacagggctgcgtatctgattgctctttgacctggaagcattcaacggtacagagctgccgatggtgatccacaagtctttcaactcttctctttcatactttggcttagatcccgttccactgggaaaatcaaacaatccatccaatcgcttgattgataacctgtactcatgaccatacacagaaaatcgcaagaatcccaatccttcacaatccaactcatcagaggtcataccttggtagagctctacttgtagtgtggagaggaattgtattgtctcatcttcatatgctacatacggataagccatcagagtgtccagatgacaactttggtacaggtgctgaacatcttccaacaatccgagttgtgcaagtgaggtcgagcaaggatacctcgtgctatagaactcattcagcttgaaaagcctaacatattcctcaacaggcaatacgtcgggcttgtgcagaagtttggtagctctgcgagtctgttcaagcatgtacttgtcttccagatcttcgtctataagctcaaacctctctgtcatcgctctctttcctcgggctatctcagctttccttctgaagctttcatattctctctgttctctctctagccttgaagatgacgactctgtctcatccatgttgtagtcaggatcaacagaagaactgccactgtaattgctcatgattctcctgtagagatttagaactcaaagctcaaatgtcaataggttagtctcaaagatagcaatgaaaccaaaattattgtcaataggcaatgaaatagattgaattggtcgagtacaattctgtactcgagtaacctgagctgttcttgagcttagacgaattggatcgagtatcttctcagaggtcgagttggaatgctacagcaggtcgagtaaatcgtggaggtagagtgagtcgtgaaacctagaggtcgagtaacttctctgaagttggaaggctctgctgaattcacgaacaagaagccaagtaagttttgcagggctcgagtgctttctcgaggtcgagtagcttcttttgaaagagacggcggttgatgtggatgaattggtcaagtatatcaaaggaatcgagtgaagtggttttgtcgggtgatggaggggatgagctggtgacggcggcgcggcggtcgagtgaaattctcaggatcgagtagctctttggacggcgatttgtggtgtagagagattagagtgtcggcggtgaaatgaaaaaaggaaggtcgagtggatttggagtggtcgagtagcgctttaaaatgagtggtctaggttgagttttagattctctctccagcttatcctcagcgcgtggtccacacactgtggattgagaaaatttctttgcagaaaacctactgtaaactgtaggagatttctgcaggtctctgtagcttctgttggtcgagtaaaatgatgatttaaaaatttttgggttttaaacatcatatatgctcgaccaatgtacacgagtgcagggtctcaggtgcaacagaaaattttcaaaattttgtactccaacgggctgtacactcgatctccaggtcttcgacagagtaaaagttttaaatttttactctatctccgcgttgttctcttgtctctgaaaaccacaaacacaactaaaacaaatcaaaaatatcaagaaggtaaaaattatttacaaggatattcatgggacttcctcccaagtgagcttgtttaaagtcattagcttgactcctttactcctttaatcatcaagaagctcctggagatgaatcgatgtcacctctggaaggatttggtccgctaagtatttcttgagcctttgaccatttactgtaaaatctccactcttaccagctagagtgactgctccataaggacggacctcagtgatgcagaaggggccagaccatctggatttaagttttcctggaaagagtttcaagcgagagttgaatagcagcacctgatcaccaacctggaaatccttagtgatgatcttcttgtcatggaaaagcttggttctctccttgtagattttagaactctcataagcttctagatggatctcatcgaggtcactgagttggatcaatcgcttctcctnnnnnnnnnnnnnnnnnnnnnnnnnnnnttttaacgcccacattgctttgtactcgagctcaacaggtagatgacatgattttccatagagaagattgaaaggcgttgtaccaatgggggtcttgaaagctgtcctataagcccacagtgcgtcatctagctttgcagaccagtctttccttgtaatggcaacagtcttttccagaattgcttttatctccctgttggaaatctcaacctgcccgcttgaatgtggatgataaggagtggcgaccttgtgctttactccatgcttcttcagaaggttttcaaaacccttgttgatgaaatgctctccaccattacttattactaccctgggaactccaaatctcgggaagattatggtcttgaacagttttagcataacttttgcatcgttggtaggactggcaatagcttcgacccacttagatacataatctacggcgaccaatatatatttgttaccgtatgaaaataggaatggacccataaaatcaattcctcatacatcaaagatctcaacttccaagattgggttctgaggcatctcatttcttctgctgatattgccctttctctggcatgaatcacattttgaaacaaactcctgagcgtccttaaacattgttggccaccaaaagcctgcttgtagaatctttgacactgtcttaaatgtcgtgaagtggccaccatatgcagagcggtggcaatgtagcaggataccttctacttcatcttctgagacgcatctcctgtagatcttatctttacaaagagtgtaaaggtaaagctcatcctagtagtaatggtgtatgtccctgaaaaacttcttcctttcataactggtcaagttggggggatctactccgcatgccaaataattgacgtgattagcataccatggagatcttccctcaacagcattcagttggtggaactctttcccgctgtaactctcaccgaagaattctacaaccatgagctgctcttctggcattgaatcgtctatcggaagtggttcttcagttctcatccttgactgatggtccgctgcgccattttcaatgcctttcttatctactatctccatgtcaaactcttgcaataaaagtatccatctcaacagtcttggcttagtatccttcttggcatacaaatgcctcaaagctgcatggtctgtatagacagtgacatttgatccaaccaaatagcttctgaacttctcaaatgcgaatacaatagctagaagctccttctcagttgttgcatatcttccttgagcttcatccaacgttcggctggcgtaatatatgacatgaagcttcttgtctattttctggcctaaaacagctcctactgcgtaatccgatgcatcacacatgatctcaaatgggtagtcccaattaggcgctcgaacaacaggagcagataccaaagcatctttgatggtgtgaaaggatttgaggcagtcctcatcgaattcaaattcggtttccttgcacaatagtctggttaacggtctggctatcttggagaagtctttaataaatcttctgtagaacccagcatgaccaagggaaacttctgatgtccttcaccgtttttggttgctgcaactgcatcatcacttcaatttttcctttgtcaacctctatacccttctctgatatcttgtgacccaacactatgccttccttcaccatgaaatgacacttttcccaattgagaacaagatttgtctcttcgcacgtggtcaataccctgccaagattcaagaaacatgagaagaaagaggggccatagaccgaaaaattgtccatgaaaacctccaccatctcctcgattaaatctgaaaatatagaggtcatacacctctgaaatgttgcaggagcattgcataaaccaaatgacattctcttgtaagcgaaagttccgtagggacatgtgaaagtggttttttcttgatcattagggtgaattggtatttgaaagaaaccactatatccatcaagaaagcaatagtatgggtgattagctaagggtcaagcatttgatcaatgaatggtaaacgaaaatgatctttcctagatgcagcatttagctttctataatcaatgcacattctatgaccagttatagttctagtagggataagctcatccttttcatttttaacaacagtcattccgccctttttagggacgcaatgcactggagaaacccaagtactatcagagatagggtagatgacactagcctcaagcagtttcaaaatttcttttttcactaattctttcaaattgggatttgacctcctctatggttcaatgctagaataggattcgttttcaaggtggatcctatggttgcataaactaggtgaaattcctttaatgtcagataatgaataaccaattgctctcctatactttctaagctcagataatagtaggttcacttcatcatcatttaactcagcattaatgatcacagggtaagtagagtttggaccaaggaatgcgtaccttagatctttaggaagtggttttagatcaacttcggccccttgagttcagaccagtcatctgaagttgggatgattggctccctaaattcattggcagacaaggtcgagtggctggtcgagtatgtcctcgagtgtgcaggttgaactcgtgttgacccttcttcgctcattaccattacctctgttgctggtccattcaattcctcaaagggttctgattcttccattgctttgtgggagtctaacagcttctggtatcccaatgtttcttaatgcagaaatccatcttcatcacttttagtaaagcactgttaagatgatattcttctacaagctcttccagtaactcatcagctaactgatccatttcttcgatccaaaagagttgcccatctatggtatgcttcttcatcgcgtctttgacatcaaaggtcatcctaaagtctttgccaaggtttagatcaatcttcactttcttgacatcaatcatagctcctgcagttgctaagaaaggtcaccctagaatcaacgggtccttgggctcttcatccatctccaggactacaaagtcagttggtatctctacagctccgatcctgattgggaggttttcgagtaaaccatgagggatccttactgatctgtcagctaggatgagggatatattgcaagacttgtattgagtgaaccccaatcttttggcgacagagagcggcctgagactgactgatgctcctaaataacatagacatctattgaaagccaatggacctaaagagcatggtagagtgaatgaaccaggatcactaagcttcttaggaatgatcttcttctgcatgatagcgctgcattcatgactcaataccaccatcccttgcacttcttgaattctctccatgatcaagtcttttaaaaacttgtgagagtctgggatttacgctagagcgtcaacaagaggtattcgcaactcgacctccgtaatattcttggaaaacatagctctatacttgtctgctaacgctttcttgtgacgactaggaaatggaagctgcggtttgtagggaggagggacaaagaccttttctttgtttttgacagcaacgggttttggaggagttgatgatactgctgggaagataggtcaagtagcacggtcgagtggttgctcgagacttaaatcctccccatcttgatcttcactgtcctcagtgaccgtctttggttcctccctagttggaagtgcttttccactacgcagtgtgatagcatgagcatattcttttggattctgaactgctttgcctggtagttggcttgtttgttttggagctgaagaagatgcagaatgtccctctaagtatcggactttggtattcagtgtttccatcttgacattgagatcattgtagctacagtccagcttgttatgtaactcagatatcttctttgccatctccatggagctagaggcttgcccgtgaagcatttgttgtagcatttgtttcatatcagcctcaggagcagcaggaccttggttttgctgatgtgcaaacctaggc

SEQ ID NO: 34683 - DNA, 7637 bp, Arabidopsis thaliana landsberg
tcttagttaatgttacgtgtttcacacatggagtttcaactttattaaatttataaaacggctaatcaaatacctaattaaagtattcaaagatgttaaattaaaaaaaattaatatgacagtttcacatttcaatccatataaataagcaaggattttattgttattcatcaatcaaaaacaaacaaagcattaagcatatagttgctatactaagactttttactcaatttctcattatgtctatcaaaaatgtgtttttacttctagcggttctatgtatcatagtttctgtaaatgctcaattgcctcagtttccggctcaacttccttttccgtttctgttccaactgattcctggattacctgatataacaaaatgttggtcatccgtgatggatattcctggatgcattgcagagatttctcaatccattttcactggaaagttcggtaatttaggtccggcttgttgcgaagcatttttggatgccgataattgcataccgaaaattccattcattccattattccctccgatgctaaaggaacaatgttcaagagttgccggtacaactcctcccataccaaaatagtgttttaacttatttttaaaatagataactttttcaacttatttttttaaaattttagcttacgttacatgttataattataattacaaaaaaaaaaaagatatagtaataacatttgagaagttgcatttgggttcaatgtttactcattcttcaattctaatgaaataacaccttgaaacatggaatccacaattgaatatagtcttccaatgttacggaactttaaatggtttcaataaatctttaaaatatgtcgtaacacaaaatctgagagtggtttataattttattagataagactcgtctaaatatgctggtgtgagaaatgttgtgatgatataaaaattctaaatagtaatcagtatttttcaaaagaatatttcaattatatacattccatataccatgcctttactaattatatataatacgggatttctcaaagtataaaagaaagataagacaaggaaaacatacaacatctataaaagacgcaccagacagagcctctcattgaattttgtggtaaacgaatagaactctgtaattgagaaaaaaataaaatgaaataatattaagaaataaaaagagagacatatttaagttacaaaattagaaaatattaaatcacgtattaatatttttctaaaacaaaatagggaacttttacttctgttttgaatatataaacgatttttaatagaatttgttcaatattttaatatagtaaataaaaaatttgtatatatgaactattttttttacttgtgtatatatccgatggggttatgaaatttttctatattttgttttttaaaaatatagggttttgtgcaaaacacccatctaactcatctagttttgcaattttaccctatatctctaacaaacacatattaatcttatgaagtctaaaataatacgcaatatgacccttatacgtatattgtaaacttttttacacttccatagattagatttttaatatttcgaaggtcgatttgaacttttcgtcgagaaggcttcgattaaacatattaaatatcaatatcttacaaaatattgtcgtagaaaaatgacgaaaaggggttacattgcgtattattttagacttcatcggataattatgcattttttggaggtggagaataaagatgcaaaaatagatgagttagagggttttattttgcacaaaaccctaaaaataacaaaatttgatttgataagggtggatatttcactaataaatttgacacgtgtcatgatcacgtgagttaacaattttgaaagcccaactttatgtagatatttggcacatatattggattatgttcattgttttcatgccagatccgaactgctcttcccaaccgtttaacccgctatccagaaactcttctcctctaagattagtgttaacaagtcatggagaacctcattgtatagaagttttacaaaccaaacctttagattgattcaaataatttcacgaagaaaatattataaatcgatttatttgtttaaatttggagatataaaccgatgattgattaattatgtgaagccattttacttttattttctctttgtagtcaatatttcttagttaatgttacgtgtttcacacatggagtttcaactatattaaatttctaaaacggctaatcaaatacctaattaaagtattcaaagatgttaaattaaaaaaaattaatatgacagtttcacatttcaatccatataaataagcaaggattttattgttattcatcaatcaaaaacaaacaaagcattaagcatatagttgctatactaagactttttactcaatttctcattatgtctatcaaaaatgtgtttttacttctagcggttctatgtatcatagtttctgtaaatgctcaattgcctcagtttccggctcaacttccttttctgtttccgttccaactgattcctggattacctgatataacaaaatgtttctcatccgtgatggatattcctggatgcattgcagagatttctcaatccattttcactggaaagttcggtaatttaggtccgacttgttgcaaagcatttctggacgccgataattgcataccgaaaattccattcattccaccgatgctaaaggaacaatgttcaagagttgccggtgcaactcctcccataccaaaatagtgttttatcttatttttaaaatagataacttttcaaattatttttttaaaattttagcttacgttacatgttataataataattaaaaaaagaagaagatatagtaataacatttgagaagttgcatttgggttccatgtttatacattcttcacttctaatgaataacaccttgaaacatcgagtccataattgaatttagtcttacaatgttacagaccttcaaattgtttccataaatctttgaaatatgtcataacacaaaatctgagagtggtttataattttattagataagactcgtccaaatatgctggtgtgagaaatgttgtgatgatataaaaattctaaatagtaatcggtatttttcaaaagaatatttcaattatatacattccatataccatgcctttactaattatatataatacgggatttctcaaagtataaaagaaagataagacaaggaaaacatacaacatctataaaagacgcaccagacagagcctctcattgaattttgtggtaaacgaatagaactctgtaattgagaaaaaaataaaatgaaataatattaagaaataaaaagagagacatatttaagttacaaaattagaaaatattaaatcacgtattaatatttttctaaaacaaaatagggaacttttacttctgttttgaatatataaacgatttttaatagaatttgttcaatattttaatatagtaaataaaaaatttgtatatatgaactattttttttacttgtgtatatatccgatggggttatgaaatttttctatattttgttttttaaaaatatagggttttgtgcaaaacacccatctaactcatctagttttgcaattttaccctatatctctaacaaacacatattaatcttatgaagtctaaaataatacgcaatatgacccttatacgtatattgtaaacttttttacactcccatagattagatttttaatatttcgaaggtcgatttgaacttttcgtcgagaaggcttcgattaaacatattaaatatcaatatcttacaaaatattgtcgtagaaaaatgacgaaaaggggttacattgcgtattattttagacttcatcggataattattcattttttggaggtggagaataaagatgcaaaaatagatgagttagagggttttattttgcacaaaaccctaaaaataacaaaatttgatttgataagggtggatatttcactaataaatttgacacgtgtcatgatcacgtgagttaacaattttgaaagcccaactttatgtagatatttggcacatatattggattatgttcattgttttcatgccagatccgaactgctcttcccaaccgtttaacccgctatccagaaactcttctcctctaagattagtgttaacaagtcatggagaacctcattgtatagaagttttacaaactaaacctttagattgattcaaataatttcacgaagaaaatattataaatcgatttatttgtttaaatttggagatataaacagatgattgattaattatgtgaagccattttacttttattttctctttgtagtcaatatttcttagttaatgttacgtgtttcacacatggagtttcaactatattaaatttctaaaacggctaatcaaatacctaattaaagtattcaaagatgttaacttaaaaaaaattaatatgacagtttcacatttcaatccatataaataagcaaggattttattgttatttcatcaatcaaaaacaaacaaagcattaagcatattgttgctatactaagactttttactcaatttctcattaggtctatcaaaaatgtgttttcacttctagcggttctatgtatcatagtttctgtaaatgctcaattgcctcagtttccggctcagcttccttttctgtttccgttccaactgattcctggattacctgatataactaaatgtttctcatccgtgatggatattcctggatgcattgcagagatttctcaatccattttcactggaaagttcggtaatttaggtccggcttgttgcgaagcatttttggacgccgataattgcataccgaaaattccattaattccgttttttcctccgatgctaaaggaacaatgttcaagagttgccggtgcaactcctcccataccaaaatagtgttttaacttatttttaaaatagataactttttcaacttatttttttaaaattttagcttacgttacatgttataataataattaaaaaagaagaagatatagtaataacatttgagaagttgcatttgggttccatgtttatacattcttcacttctaatgaataacaccttgaaacatcgagttcataattgaatttagtcttacaatgttacagaccttcaaattgtttccataaatctttgaaatatgtcataacacaaaatctgagagtggtttataattttattagataagactcgtccaaatatgctggtgtgagaaatgttgtgatgatataaaaattctaaatagtaatcggtatttttcaaaagaatatttcaattatatacattccatataccatgactttactaattatatataatacgagatctctcgaagtataaagaaagataagacaagaaaaacatacaacatctataaaagacgcaccagacagagcctctcattgaattttgtggtaaacgaattgaactctgtaattgaggaaaaaatgaaatgacataaaattaagaaataaaaagagagacatatttaagttacgaaattagaaaatattaaatcacgtattaatatttttctaaacaaaatagggaacttttacttctgttttgaatctataaacgatttttaatagaatttgttcaatattttaatatagtgaataaaaaattgtatatatgaatgattttttttacttgtgtatatatccgatggggttatgaaatttttctatattttgttttttaaaaatatagggttttgtgcaaaacacccatctaactcatatagttttgcaattttaccatatatctctaacaaacacatattaatcctatgaagtctaaaataatacacaatatgacccttatatatatattgtaaatgtttttacactcataaagattagatttttaaaatttcgaaggtcgagttgaacttttcgtcgagaaggcttcaattaaatatattaaatatcaatatcttacaaaatgttgtcgtagaaaaaaacgacgaaaaaggggttacattgcgtattattttagagttcatcggataattatgcattttttggaggtggagaataaagatgcaaaaatagatgagttagagggtttttgtttgcacaaaattctaaaaataacaaaatttgatttgatatatgtggatatttcactaatatatttgacacatgtcatgatcacctgagttaacaattttgaaaacccaactttatgtagatatttagcacatatattggattatgttcattgttttcatacccgatccgaactgctctttccaaccgtttaacccgctatccagaaactcttctcatctaagtttagtgttaacaagtcatggagaacctcattgtatagaagtattacaaaccaaacctttagattgattcaaataatttcacgaagaaaatattataaatcgatttatttgtttaaatttggagatataaaccgatgattgattaattatgtgaagctattttacttttattttctctttgtagtcaatatttcttagttattgttacgtgtttcacacatggagtttcaactttattaaatttataaaacggctaatcaaatacctaattaaagtattcaaagatgttaaattaaaaaaattaatatgacagtttcatatttcaatccatataaataagctaggattttattgttattcatcaatcaaaaacaaacaaagcattaagcatatagttgctatactaagactttttactcaatttctcattatgtctatcaaaaatgtgtttttacttctagcggttctatgtatcatagtttctgtaaatgctcaattgcctcagtttccggctcaacttccttttctgtttccgttccaactgattcctggattacctgatataacaaaatgtttctcatccgtgatggatattcctggatgcattgcagagatttctcaatccattttcactggaaagttcggtaatttaggtccggcttgttgcaaagcatttttggacgccgataattgcataccgaaaattccattcattccattttttcctccgatgctaaaggaacaatgttcaagagttgccggtgcaactcctcccataccaaaatagtgttttatcttatttttaaaatagataactttttcaacttatttttttaaaattttagcttacgttacatgttataataataattaaaaaaagaagaagatatagtaataacatttgagaagttgcatttgggttccatgtttatacattcttcaattctaatgaataacaccttgaaacatcgagtccataattgaatttagtcttacaatgttacagaccttcacattgcctccataaatctttaaaatatgtcataacacaaaatctgagagtggtttataattttattagataagactcgtataaatatgctggtgtgagaaatgttgtgaagatataaaaattctaaatagtaatcggtatttttcaaaagaatatttcaattttatacattctatataccatgccttttctaattttttataatacaagatttctcaaagtttaaagaaagat

SEQ ID NO: 34684 - DNA, 3148 bp, Arabidopsis thaliana landsberg
gtgataattttcttgacagacctgaggcatctttatgcgggctcagtcacagaaacataaatcagcttaaggggggctatagcttgctctgcatgccctaactatgtatttcatactacatgggcgatgagaattgatgtatgggatggtgtccaattggaagggacccctgagatcacagaagacatttcaccattcaaggtggtgggtgataacttgatatgtcattttagccatgaagagcatcctttaaggctccacaaggacgacgtcattcatgatgagggcatacgatgtgcagcatgtattcatccagttggatttggctccatctacgtttgtgaagaagaggaatgttgctttgttctccatgaaaagtgtgctaatcttcctatgaagaaaagacttgtctttggcaccagaccatatacattaaagaaaggtaccagagttatagactgcaagctgtgtggaatgttatcttatggtttcgcatacatcacccaagactgctgtgatgtagatgtacattgtggttcccttaatgagccgctctaccatggtggctatgaatatcccttatattttgctaaaaaagagcatcaccgttgcgatggatgccaaaagattatagatgagcatatgcttcgttgtaattcttttgactttgatttgtgtttgtattgtgctactttgccagaagagatttggcatacgaacgatgggcaccctctcactttatgttatggggaaaaggaaaaagcgagcggtaaacattggtgcgacatttgtgagaaataattagatccaagtatatggttctatacatgttatgaatgtggagtccccttgcatgctcattgtgtactagaagatttctcacgtctcatgccaggatgcagttaccactttgggaacaaacaaatcaagtttgaggtggttcctaacaatcacaacactcggccattatgcatccagtgtcactctcgatgcaaggtctccgtcatcctaaaggagcataatgaagacaatcggtatatatgttcccgttcatgtttatcgagttatttaggtgaagaaatttgaacttatgtttactgataatgagcggtttcgttctatcatggttgtattatttcattagcttttgtttctcttttatttgcaagaactgatatgtaatagagagtgatttttgttttctaatggtaatgctggttattatatattatattgatagtcacatttttgttttctaatggtaatgctggttattatattttatactgatgaagtcacatatacttttatatattatactgtgagaaatgtctgccaaattctacatgcttcggcagaatcatccattatgtgataaattgttatgtagaatgaagactatctccataagaaaactctgaaccgtccctaaaccacttcaatcacaattcccaaattactgtgcttatatttggaaaaccaagaacacaacttctcgaaatttagcaagagaccatgttcttaatttcttttctgtgatgtttcagcgtgcagtcttcaatatgacaaacataagcgatttgcatgacgatttattgctgaagattttgtcattccttccgacaaaagacgttttggcgactgactgttttgtcaaaaacatggtgctgtcttaggaaacattggagacatcatgttgttgattatgtagatatttgtggtgaatgctctgaaagtggatgcttactcaatataaactcgacgtggaacctaaagatcctacgctgaagaaatttgattctctgctgtcaaaactcatagacaaatcgtgtattgagtgcaaacgaaaaattcatacacacaaaaaaacgactattttcatcttagattttggacccccaaatcaacatgctcttatatggaccaagttggaagagaagtaggagatgcagcttgagattgtgcttatgcacaggactctctcaaacttttgtctttcgcttatctgagttagttttgtggtttgatagttaatatcaactctagtttctttcttctccatctttggagtttgccaatttgcctttttgtcattgtcatgaatttgccttttttgccattttcatccttgtgatttgatatgaataaaggttacaatgctaaggatgatgtcattccacaactacttacctttttgcgaacaataaatatcacaaatctcatgagaccccaaacgcggctgcagctcttctggttagcagcagtcatgtgcagactctagctgaaggaatagcctttgctcgtgaggaggtccagtcatctggaaaagctgtcaagacacttgttaatccaaacctctgtgacagacttcacatttttatacattgttttttagaaaaatgaatgtaatggtccgtatatgtaaaataaaaatgaatgcaatggtccgattccacttcttgtatttgcttgtataataatcaaaggaaaaggtagtttaaattaccattaaagagatcttgtgttcttgttgtttttgggacttatcaactagacaaacttgcaatgaactaaacaccatcaacctccttattatttgagagcatgcatgaattaacttaaataaactgttctttcaaacataccgattttattgcaaaaatacttgagaaaaacactcatgtttctcatacacttgggatgagtactacaatctcaaaagcagagtaaatatcaagggttgaggtccgcacatctgttggcttgtcattcttcttgaaaccgataagacacaaagttcataaatacattgaattacacaaagaagacaataaaagttcctatatattgcaagacaaacactacttgcactctagctgtcgttgctttggctttagctttatttgcttcacgtttagccttgtaaggtatgatactgaagcttggaggtaatctgtgagaaatgtctgccaaattctacatgtttcggcagaatcatccacaatgtgataaattgttatgtagaatgaagacaatctccttggaaaactctaaaccatccctaaaccacttcaatcacaattcacaaattgctgtaattatattgggaaaaccaagaacacaacttctcgaaatgttagcattagtt

SEQ ID NO: 34685 - DNA, 1413 bp, Arabidopsis thaliana landsberg
tacataagcccaataatgtctcttcttttctcatcatcttttttttggaatcatcttagcccaatatatcataaaggttttggttttttttttttttttatcaaaaaggattttgatgtaaaatttgatcgctagcaacatacagagtggacatttttgtctccaccaaaatcacaactgtaatcatcttctcaaaaccaaaaataaaaaagtaaagtgttgcatgtatctatctttatctgttgatacattaggattgttattttcagttgcaagttaaaacaatcgtagaagctttttacatggttttgatgaaatgacaattgatttcggttcggttttgaaattacatgtgatttttgtttggtttagatggttttgaaatgaaaattaattttggttcggtttgcattagaattaatacggttttgagaaaaaaaaaaaaaaagtcactcgagactgttttggaagcaaagcgagtagatgtaaaatagtcatgattttgtgggtttacccctacagaaatcgacgacacgcgctcaacgcgaggttggtgcgagtgggcatggaatcgacgcgtggcgcgaggttggtgcgagtgggcgaagtccggagcgctctgattggctgaaaaaatagaaatagtattgatgtagctcctcctctcctcctttattattaattttttgtcattcttcagttctgaaagttgtgtagttttaagatgcaattgagtcttattatgaggtttttggttattttgaaatcattgattaatgtcaccaaaaaaaatagaatggattttgagatactaacaatttcattttcattttgttctgcagacattgaaaactatagattcagctgagcccctgaagaaatcaaagtgagttgaatatttttctaaaaatgtgaaaattggtaaaagtttgtcctcattttgctagaaaaaggattcactttaaagttaaaagaataagataaagcttctttggaaatctcagcattgcactaccgttgcttgcaaatctagaatctggattttaagatacttccggtgctcttgttcatgtttgcaccaatgggattgttttggtgacacatggaggttttgaaatgggtcaaggatttgcatacaaaggttgctgcaacggcctttaacattccccttagttcggtttttgtgtcagaaacaagcacatacaaggtacatctaactcaaatacatgcactcagtggacttttggccaagacaagattattattgttctctcttatcatttttgtggtctcttcataggttccaaatgcctcacaaactgttattgctctcttgtctttttgatattgctacgaagcttgtaagagagttagacgttgtgtggattagtgtaatttgtatggacagacttt

SEQ ID NO: 34686 - DNA, 8017 bp, Arabidopsis thaliana landsberg
  unsure (1)..(8017): unsure at all n locations
gcatcccagactcaagatctgtgtccatattcaccaacatatcaaacaaagtaagcacaaaaacaatatacaaagtttgaatttttaagtgtaccggagagagatggcaactgtggaagaggagactgagaggcatccatggattctgtcgattgctttgctggttaagagatggaagagaaactgccaaacaagggaagctcaatgaaaattcaaaaaccccattttcaaattatagggaaaaagaaaggcaaacgcatgaaatcagtgagagagattgatatatggcaattaatgggctttgaagaatttaccataaatgctgcaaatatccgacagggtgagagaaactagaaagcataaannnnnnnnnnnnnnnnnnnnnatttaaaatttgtaaatgttccactttaggcattttccacgcaaacctctaaatcaaaaccacatgtttacttgtgtgataacgtcaggattttagtcctgactacatataaagaattgtagtcaggattttagtcctggatctcaacgcttatacctacaatgtagtagtgtggtcgacaatacaaacaacctaaacatctctaaacacaaaatctcttgaataaagatttaagacgagttaaagaaaggatcaaagtctgttttgaataataaagtttagtagttgtcaaacaagagtcataaagcatctcatactcatagagaaagagtgatgaaatatccaaacacacgataagtcttagaaagcatacatgatattcttcattaatttaggtcataaagatagatagagggtgaatcaactcagcagtagaacatgacacgcttcacattctctttcagagctgggagtggcctcactgcagcattgacattaggcccgcgtgtgcttctaccagccattccacctccacgtgccatgctcccactagccattgagccactgtctgatgtctctggctccatgtagaatcgagccctaaaagctgctagatgtgcataatatgcagggggaactacaatatcccaaaacaaaaaaaaaaaacattgaatactaaatctctctcttctttatatcaaaatcaagatgacattaagggatgggaaacacaaaacttaccaattgaaactgagcgtgtgcatcttgcatacctgtacaaatcaaaaaggtagtttaaatgttactcttattttccttgcaatcttgcaaacacttgtaacaaggaatatgttacaaaggtaagaaatcttacgtgtaacataagttattggtcagagattgaagtccatctgcagtaaagttgttctcatcccaaagaacgtggtaatgagcaggtcgagaagtgccctgttaatggagttttgatttgttaaacacttcaaataaattctcacccacaaactcatttgagattgtaaattatacctgaataccagcatgactacagaggtaaaagtcaaactctgtagggtggcagattttagagtccacacagtgcctacaattaacaaaggggttaaaaaccaatgcaagggattttcagctgattaggtctacgcacaaaaagcttgacaaagatccaaacttgtctcaccaggtaaaatattcccacttctgtccaccgaatggcgatcattgtggttctgagcaaacagcctcgtgtgatgacgcttctgcaccaccacaaatgtcactggtggttgataacctgcttccagcgaagcacaggcctgaaatgagttgaaataataatcagattaaacagaagaaaacgagcacgcaacacaagccatttgttagaagtaactgttaccttgcggatggcatcaagttcatagagcaaaacttggtaaaattgtccctcactgactccatccctgtgcagaataaccatataatacatttcagaaagaaagacagaaagttatttagtcaagtaagtgccataagaagagttaatacctgtagaagatgatccttagtggtttatgcccagttgatctacggaaggctatgagcaactccctgttcaaaagtaaggggagaaacgtacagatctgttacttaagagcaagctaaagctaaaacccaatcacgaaaatattaaataacatccacacgtactttatcatgccaccagtcaccacacctttctgaggatccttccactctttgaacagatcctgaatgagctcctgcctatgcgcttgagcgcaaactaatccagcatatttagtgatttcaggccaatcctgagatgccacaacctgaaaacaaaaatttcgttgtcaacaaaacaagcacaatttgaaaaggttaaggccatgaaaataaacaaaagcatccatatacagaagtagatcttaaaggagaagctaacttacagcagcaatagatgggcttgaatcctctccagggtgagggtgggtaacatcagcaccaaatataatggtgggtcgatcactgactagaggaatccgcctagatagagcatcaacaagcactgtgtttcttcctccaaccttcacattaatcttcagcgcaacattagccatgtattgtttgctcatcttaaagacatgctttgtcaggcaacattgagagactatgccgagttcagtctcacatatgcgtttcaaatcacctgcaatggatattattaaggaaaataagttgagagtgtgttcctaagcagaagtagacaatgaaacatccgagaccatggctcataccgtataatgatccattattatcgggcagaatgacaataagcagatcaatttcttttccttgggagagttttgatgtggcatcatgatatctagtcttcaagaccttctctacttgctcagggcgagcactgactggtgggaggactggttccggattaaatgcctgcaggtaagaaataaaaaattaaagggaaggaatcagtgtaggaaaggttaataaactgatcaagtttgtgcttccaaagactcaccatgccagatacgtaacacatttgagcaagttcctgacaaaatgtacgcgctagattgtcctgcacttgcctagaaaagttgatgcagatccaattattcaccgttccaccattgatcattttctgcagagaagactcatattagccagacaacagaaaacgttgtgatcactttcaaaaaataacaaagacaaattcagtgtgtatctacatagctacatgaacaaaatactctctgcaactagtcaagtgccacacccatactcatatcaagagaatagcattttagagtaatatgtctcataacagacaaataaataaacaattttcttgccaattacctggaaatatacagctcagccatgatttacaaaatattcacataaaaatgacagcataggtatatataggtaacacaagcaagaaacatgtaagtgcatagttgaaaaccaggaacattttcgtctagttaccttattcatcatgttccattgaccaacttgtggcagacaagtcccttcccttccagactcgtggtacttaagctgcagaacattaaaatcagattggaaccctaatttgagtcattaagatacagagaaaaagtgtaatagcaaagagacaatgggaacgattactatacccatggaggaggcagtatacgagcctcaacagaagccagagaagtacttattttgatgccaaactcttgagcataattatctttagcataatcattgagttgcaccgtctagaaatcagaaaatattgtataatgttagcaataaacaattgagttttcaacaacagcagccagaagacacacgcgctgctaaattaagagcacaactctgaagatggtaatctgcctcactatttatgaagtaaaggcatcatctcaaggtaaatcactctcttcaagcaaacatatgcatccaagtaaagaagaaacaggtttttaagccattcattccataacatcctttcagccacaagtttatatgattaaaaacaagttagatatgaattgagaaaatcacttacttcaagtaaacacatgcaaccaagtaagaataaacagattttacaatgatctattccacaatgaggctttatcaccagcatacattatttaaaacgactatcaagataggcggacaaaaagatactcttgattcaagtgaaggaaaacaaagttatcgaaaataaagaaacatacctgtaagatatctttttctcgatctatcgggcgctgacaggtaaccttcagcaaagcaagtgatctgtctctcattcaatcttttggaataccgctggccttcaacaatcttgcatacctgtgcagcaacacattagaatcggaagtactggtgagctaataaaacctgatgacgtatttcaaagttacctccattggtaagtaattaggcctattagaattcccaacttgcaagcatggtagttgagtgtgctgaatgcgaaaaccatatgtttcgtggaagtattctacaacagatttctgagtatttctttcatctactgggaatctgaaaaggataaacagagagtaaaaattaatttcatcaagttcaacattcgcgaaataagagtagtaaatctaaaacaaatacgcacgtcaattcccgagtggccacagcagtcaaaccggaaatgcggtacttccggcgcatgtttcctcgatgagtcacttcaactttgacacctctaagagccttttttatctgttgacagaagaagattccaagtcactaagcaaagaagagtagattaatacaacatttcacttactacagaaaatgacaattgattcataccttaacacgatcagcatcagataaaggtcgagaagaaatatcccggttaagcaaatcacagacaaactgaatcacagggtttgcctctatgaaggctgtcgatgacatatctacaaaacagacaaaattgcagcacaaccatgagttaaacattcaaggagaaccagatatcaaaaattattgaatgtaatacagcaagccatcacaccaatattgagtgataagcccatctgtgtaggacgaatgctttggtagaatccacgccagctctccaagccatcccccaatgattgtttttttcctatatcaggggaataaaaggaccggcccaccggaatatacctgattctaacatgttagcaaaactaaaccagctgagacttacaagcatggtagtaaagaagcaaacatccataggatgagtaaccagtacctagaggtcggcagctcacgaagaacaatgtcaagaacctgcagagcttcctgtggggcatctgattgtttcccctccaaaaacattcctaggtgatgcagatcagcacgtgcaactagcttgatcacaactttaaattccctttctcgtctgtaaaataggaaagatgttattattctgaaacttccttattaaaaaaatcaacaagaaaccataagaactagacctttgacctccagcccctacttcttcgtcaagaagattgattctgaactccttggagttaaagggaagtggaccagcagtgtaaagactttttcgaccatcatacgctggaagacgacttccaaggtgagaatcacgataattatcaacaagttgtttcatcacagcacgattgacaccccttgatgtaacttccggagtaatggtaacctaacagaaagaacacagttggtcaggtaaatttataaatagacattagatgtatggtagctaatactaagggaacacaaaactcacatcataatgttttctatccttatcaggcagttcagcaaagagagggttagccttcacaatgcaacgctttccactctgtcctttaccaggcctcattggaaacttgaaagccttgctagaagaaggtataggctggattgcctgactgggagctccttgttcaacagagagttgttcaaattgctgagccagaacagtaggttctggtacctgggtaggactcacctcagacagtgtaggctgagaagacaccgcttgataagtaggtgaggtagcttgatgcagctcgggaactgattgtctctgcggtggtccagaagaaggtccacctccacggccaccgccataccctcctcgacctccttgatgaggaggtcctcctcttcctcttccttggtactcttgtggtcctccatactgttgttgctgttgtggtggttgcccatatccacgaccaccacgacctccctgttgaggttgaggagtataaccccttccaccttggtgttgtcctcctccctgctggaaaccacctcgctgtgaaccacgtccaccacctgagactggaccagcttcacgagacccagagccttcacctccttcagatggagcatccgttcttctctttctcaccatgatgattcctgtgaaaataacacaaccacccaaaaacagtgggtcattttaaaattatccttgaaaataagaagcaaacattgaaaacaagcacaaaactatcgaaatatagaagcaacagaagaaaaccctaactagcttcaaaaacaaacgactcagaagcacgaaaaccagtgattagctagagagatagaaaaccaaattcaacagcccaaagcaaacatagaaaacctagtaagaaacaatcaaagacctaaacagaaaacgaagtaagaaaacaagcacgaaacagtaagaaatttgaagcaacaaaaaaaaaaaacctaaatatcttcgaagacgaacacacacaccaaaacagctacgaagctaatagatccgaaatcgcaaagatcaactaaacatacaacactatcagtgaaccataacaccaaaacgaagcggatccacccaatcgagtggaaaaatcgagttcatacgcagatcgaacacagattaagtgaagaacaaacaccaaaaccgccgccatttttacctgaaaagcaatctctcgccggagaaactaagattgaccgagaaaatccgtacgaaacaccaaccctacgtcgctctcgcctctctgtgttctctctatatctttctctctctctctaactccgaacaaacgagataactcaaagaaatgagattttactgctacactttaaattcaagggttctgtggttagagtaagttacggaattaccctcttcattaatagctggcatatgtcgacgtggcgagtcagggttgggtctttggaatgctgacccaaggtcgtgtgtagtctttcattgtttgtaatgcgctgatgacgtggaattgcataatgtttttttaatccggaaaaagaagcttctcgaaaacaacaagacgaaaaacatttttgtcgtttatctaccaaatcttttttaatttattttactaacagtatatgtattatccgattaaatatgattagtgtgatgcgttacctcgattaatcttcaagagttagttgcattaatttaaatatttgttttagactataatatacctcgattaatcttgtaaagttagttgcattaatttactatttcaacgagagataatgcatgcacaagtgttcaaaattagtagaccggccgttattaatcttattattaatctgtagtaactgattagatcataatttttggcttacgttacgtataaaggatgttatacagttaagtacaacagtttaaaattggtacttgtgtgtgaagataaaacagtggctagagaaaatgtcgtgagtcaaggcgactgatcgagtagtactaacgaattgtacattgtcaaggaggatttttcatgcaacgaaaggcaaaatcatgcgaattacgtttagttttatagactatatataagataaagtgaatgattatagtatagaggtgaatagaagaactatttattaactgagatgggtcatgggtggtggggcaaatatgaatatagccatttactatatagataactctctttcgttttcatagaaatttgacctgcgatttcggggaagtgatgcttttttaca

SEQ ID NO: 34687 - DNA, 745 bp, Arabidopsis thaliana landsberg
tttttttttacccaaaggccgccaaatcctggtccgttttggtccttccagaaccggtttctaaatcgttgtttttctcggctaggtccttgaggatccacgtcagaacactcgccgtcgggtctctagcggcgaaaattactccgattatgttatcggcgatctgttcgtcggttagctcttctttgtctcccatgaatgatccgagaagatcgttgtgtgaggaaccgttctgtcttctctctgataagattctagcgaggatctgtgagagttccttccgagctttcattgatttgtggaaaagtgttccagggagattcactggcatcgaattgtaacctttctcgagaatgtagtagcatcgttttagatcttctctgtataaaacctcgtcttttccgaagatcgatagcaacgcaacgttgaaggtgtactgatcaaacaaaaaaagatcaaaacagaggaaagtaacgttatgctctgttttcaaaaacaggggaattatgtgtgtagctctgtttctagcagaggaaaaacaatacagaggagcttactgttttcatttcttggtaagtgttgatcattgttcccttccaactttcggagagagtcttgagcgatggattcaatatcaggaaccatgttttctgatagaatcaggcattaaagcaccaagaacaggctttctgagtttagcgtgataatcaccctggtggaagaagaaggtttgtttccccaacat

SEQ ID NO: 34688 - DNA, 281 bp, Arabidopsis thaliana landsberg
tttgggggtcatggatgaggaaatacaaaaacagtcatcatatttaagcgggaacttgacatggatcgctgcagccgcgagagtggacgagggctccgccatcacccgattgccctatcagggaggagcttgctctatacaccatctatacacacacctcagactcaccatctactctatcattattctcggacgcaacaagtttccactcccgcgaagaactttcttgtcgaatctgcacattctttagaacatctataacctatgccagactagatttt

SEQ ID NO: 34689 - DNA, 2082 bp, Arabidopsis thaliana landsberg
  unsure (1)..(2082): unsure at all n locations
aaaagaacatccttcccataaattagaatatataatattgtattacttagcttattaatagttttttttttttacatatcagttaatatgtttttgtcatataaattgctatatgaaataacatggagttagcagtttgcaacggtcgatttaacgaactaaatcgtgtcatttttaaattttttgaaagagatagttttttaaaaaatattagttttacacataataacaattataaatagttatattttaaagtagataaattttagattatacaaagccagttggtacataatgcacacaaatttattattttggtagacaaaatgtataaaatcaccatggttagaaaaacaaccatattttcataggagttatatataacacatcatttaaacaaaaatctagtcaaatttgaaatatattaattaaattggtgtattttaacacatgaagtatcatattagaaaacagaaagaacaaagtcaaaaaaattagagccacaagtatttcatttaatacataacaatggattcaatgtagatttactgttacaattaatgctttttgccattggagatttcataccttaacatgtgcaacacactaattaaatctctcaataaatagcatacgtctccggagataagagacatcactcacttctaatacttctcagcaaagttttacaaaacaatgaagaaccaatttatgtcttcttcaagctcctccacctccccacaaaaacctgatcaaaaactcaaaagtgctgttgtgaccgtggaggagaaggagacaatgaacaatccggaacaaaggtcttctcaagcggtcgtgtgtgaaaacacgatccctcccagggatagagataacgtgctaatatttcctcccagggataaccatatccatccccgtcttttcttcaaggagttccaaagccggtatgccctagccgggcagcaaatcgtccacagaagagaccaagacttggaggtcaagcagccgatgataatcgattcgatgctctcgggtggtacttctctttcgcctttccaaagctttccattgctttttcataacaagatctacacctgtcgtctgtgcaagaccgatttcaaaagccgtagagcgctaggcggtcacatgaagttccacaaaaaggaaagagatacctcagtaatagatcctcataacaagaccagccacacctgtcgtttctgcaagaaagatttcgaaagccgtcaagccctaggcggtcacatgaattgccacaaaaaggaacgagaattggagaagcagcgaaagatgatcgaggaatggatgctttctggtggtactcatcttatacctttccaaacctggcaaaggctaactcttggcccttgtaagtctgaccaaggcagtagctcacatgctttatcaactgatggtattaatcttgatctaactcttggtccatccaagtccacaggaggcagcaacaatagcactaataacaacactaactcatcgttccatgggaatctaatgactcccgtgggtccttgtgtctctagagacagttttgtgctggaaaccaggttgattcaagaaatatatctattcctcctaatcaaaccaccgatctttgttatgacttttttgctttacaagagggatctaaggggaaaaacaaagtcatggtgcctgaagatgataaggtcgttgaccaaggaaaaagatcaagaggagagtagtaatttatttatgtccctttgagtgatcagttatctattgaggcttatgttcacctctctttattttcatgcaattgtttttctcattttgtttattcatcatctttcaaatgttctccttttgatgatttcaatgtttcgattaattcatcaaatcccttttttcaattcctatatctctcatgattgttcttaaatttattttttcaaaggtttaaagagattctgaattttgcttaaaaatcatttgttaaagagacaggatcttatatttaacttttcattggttgttaacctgtaaagatagatgntaccatttaaaaggaacataaaggtctttccgatc

SEQ ID NO: 34690 - DNA, 3480 bp, Arabidopsis thaliana landsberg
taatgtgcacgccgcatgaagctgatcgatacagaattcatccggagagctcaagataagataggcgatgatttcgcaggcagaaaaaaaacacagaggaaagaaaaaaaattgttttgtctcttaccttacccaatggtaacccgccacgtatacgcacctaaaacatcacaaaatacctaagctaaggtgcgtaccttgattaatttcatttttctgatttaattttggcttctttttgtaaggattcagtactagaaactcttaaggaccctccaatggaggtggtctcacatcctcagtcatagagttccactgttcaacaccgaactttgcaacctacaatagcacagtttagtaaatcacataaacactaaacatagtagtcaaagcatagcaatgagcaaagttaaaagtcatacatccttaatgagagtaccaagataatcttgtctaaaagatttacggaaaccattcctgcaaagtgaaagagcaacatccatcagcatcatccctaaagagtatacaacttatatcaacaaaaagtaagtatgaaacgatgaacattacatgaagatacagaaggcggtaagaggtggcttggcctttctacgcctcattggttcatgttcatcagattctgtctcaacatctgaagcttatgaacaacaaacacaacaaccaaatccacagagattatgataacactgaaaacacaaaatacagtacggaggggaaacaacaaaagagatgatgattacctggatccactccgaacaaaaaatcaaggctacacatgtgaatgcttataagctctacatgaactttctggttacatttttcactgaattttcaacccaaaaaaaaagttgtgagaagccttggaaatcccaatcggtaaaccctaaaccgaacaaaaattcgactgaaaatagatccaaagaagaagaaatcaccagcgagtgaagatagcactgccatctttagaggtgttgctgctactttccgtttcgcctgacatatcttacttttctctgtcttctgagagaattctgactccagcaagggttaggaattttattcgatgacaagggttttatagactctggtggaaggaaaaaaaaaagtaaatttgttgaaattaaaaaagatttgcgtaatgcgtgggctacaagaaagtggtataaaatagttgtgactccgaaatattcgttaactgtatggttgtgaaccgactaaatatgggcgataaaatgtgtgcttggatgtgggtgtggatgctagatgtgtttttctgtcaagatcctatggagactccgaaatatcatgttgttactcatcacagatatgggaagtgatatctcaaagcatcttagctcatcgatatacacatgttcagtgtaattctctccttaatctacgactctacatacagccacacacctcgttttcttttgaggtatgtatatccatgtaaatcataagctctagcctgttctataaccgtcaaattggctttagctgcttcagttctttttaatgctaaggtagagttgaattacgcagctgcttcttgccagatagagtcaacgttaggcaaaaattcatccattgatgggtagccattagtaaacttgaaagtgatagacctacatccacacctgctgtcaatcagacaatgcaaagaagggaagatctgcatctgaatcgtcattaatataggaatattttatacccaaccagcaaaacacgcaagtcacaagcaaaggattagaaaccaaacgtgacttttaagtctacagcattaataaaacgaaaaacatagcttcattacttgtttaaacaaaaggcattaccgtttcagtgaactacaaaaaacccacttgctcacgacttaacttcaaataaactactttcactaataaaggcttcatttacaatgcatcgcaacgattagagataaaccaaattcagtaagactagaaccacaaaaacgagcatatcatttctagtagtcatccaaaatctcttcttcctcctcttctttaccttcagcttctttcttgtcatcatctgtgttctcaatttctttctcctcaacttcatcatcatcgtcaacttgtttctcctcagcatcatcaacatcatcagattgcttctcctcatcttcctcctgaaaaagtcatcgaatcatcttaacactaaagatttcatttagtaagtgaaacactgcccattaattatgaaacacatacttcctcatcagcatcattactttccagtgacttgttatactctgccttaagttcagcagctttatccagataaactttcttctcctaaatgatcaaagaacacaaaccagagtaagaacacagtaaacaaatcaccatgacactaatgaagaaacacgaaaataaaacaactcacttcctcagtcaaagacttccacttctcaccaccgatctttgcagcctacaatcatatatatacatagcccagattagtaaatctcataaacactaaacatagtactcaaatcatagtaatgagctcggttcaagtcttacatccttagctaacgaaccattatgctctgacttaaacgttttacggaagtcactcctgtaaagtaaaaggttaacatcagcatcaaccctagagactatataacaatctaaaaaaagcaagtatgaacaaaaaacattacatgaagataaagaaagcggtaagaggtcgcttgggcttgtttgaagtagacgagctcttcttctcatcattggttttcttaagtctctttggcttaggtccatcagatgttgtcttcttcctggaacaaaaacaaacattcaaataattcaatatcacatacagaaactatacaaacaagtcttgacgagtcttacttctctgcaggcttcttcttagcctctgcttgtgtctccacaacttgtgcttctgaacaacaacaacaacaaccaaatacacagagactatgagacgatgaaacacacaatacaataagaaggggggaaaaccaaagagatgattaccgagattcactctgatcttagcatcgagactgcaattgtgcatgcttataagcgctacagctacactcttgttacatccttcactgtaatcgattcaatccacagaaaacttatgagaaacccaatcgttaaagctgtaaaaccctaataaatctgaaataaaaacctagatctctaaattcgaaacagaatattccgtcgattcaacagattaagcaagtagaactcaccagagagcgaaagcgcttccgtctttagcgcgacgtaaggtagtagaagtgttgctgctagtctcggcttcgactcgcttcctctgctttggtgcgtttgaagttgtcgatggtccagccatttcttcctttttctcggttaagatcgaaaatatctgtgaatatatttcgtgttcgagaattcgattcgatgagaa

SEQ ID NO: 34691 - DNA, 3773 bp, Arabidopsis thaliana landsberg
caggtcgactctagaggatcccctgtacagagccctgctcactttaacgacagctggagttagattccaccacagagacccttgtcagaagagagagtgaccaccacactcttctttacatcaatgcctggtttttccatcaagtaacgctagaaatcagaaacacatccacaataacaacaagagatagcaagaggatggatatctcagactatagtaagagcaacagattgttcgtcgtcatcaatattcaataccgatgcaagcccggagtgatactagaacaaagttattaagaaaaacaactctatatagccaaccatactgggattatctcctagaagtgcagtaaatggctgccaaagtccacgggagttctcagctcggccttgaactgctctaagcttggaagcagcaaccatcttcattgcctttgtgatcttttggatgttcttaacactcttcatgcggttacgactgcacagagaatacatgtaaagcaattcataaagattagaacatcacagatttcttagaacacaatcctaactaggtaaaccaatctccaattatcagctttgacttacccacttgagttgagatagatcgaactccaagaagtccttcctccctacaaatcaaatacaagtttagtcctcatcatcctaaatatcacaaagttttgcaggtaaaagctgattaaatctgacgagcttagacaacatatcacaaagtctcttctacgaggaaaatcaaattggtcttgcaataggaaattcaacgaaacgagcttaacaggacatttccgagtctcaaaactccaaatagacgaacaaaaacacctcactcattagcagctcccgagtcaaacaacacaatttccataaattttcgtcgattcgaatttcaaggaaatgaaaacatcaacgactcaattaaatcaaacgatttcaaattcagaaaagcatcacagaggaacagcgaaatgtgtgtttatacgcaaggataagatgaatgagaaagagatctcactggtcagaagagagaggagatcggatagcagcgattgggcgagcggcgattgaagggaggagacgcctcccttcgcgacggaaaacagccattgccattgattaaaggattgatcggtaaacaacaaaacctagctccggcgaaatttctcagatcggattatagagagagattcgagagagatgactgcaatgggcaaaatcaagggcttctttatttctcagtctacacagtagttttgtcacgacgtcgtttccactttattaccaaaatttcccctgaaattaatcgggccgaatagaggctaatactattactttttcggcccatcttataaggcccaaaggtatctcctcagattatcaatcacgtcgtcatacacgtcttgtttccttttacatttttgagttttgaccatgacttcttctttctccaatctataaccaaattaatgcgagttgtttcataacgcaacatactcataataaatgaaaattaaaaaaatatcaagagaaggtaacatttcgccaacctattaattattgaaaggcccacttaatttatttttctgtatctgtaaacaataagatactattaaacagaattgtcatcatcgttacgtcatattaatgtgcgttcatttgatccaatgagagtaaattgctgagtgttgatttcctcttgttgctaaattttgaagccaattttaacagtcaactataactcccagttatatagtcagagatgtccacgtggaatttacttcatgaacaaatgtgactcgtagatatttcacgtgacatttaaaccccacatatttagtaaaggcggcttaaaataacatatatatagcaaatctttgatatgtctttttttgggttcaataatttcctcaacttgttggttcaatcacaaacaccatgcgtttgcatttttgctcgctactcttactctactgtatcgtcttcgtttcaagcttcttgacgaccgacgctcttgcttgtcttcctgaccagatccaagctctaatccaattcaagaatgagtttgaatctgacggctgcaaccgcagtgactacttaaacggagtccagtgtgataacacgactggtgcggtcacgaagcttcagctcccaagtggttgcttcactggaactctcaaaccaaacagtagtctctttgagttgcatcagcttcgttaccttaatctctctcacaacaacttcacttcctcttcactcccttctgaattcagcaatctcaccagattagaggttttgtctcttgcctctagtagctttactggtcaagttccttcctcaattagtaaccttatcttgcttacccatttaaacctttcccataatgagctcactggtagtttcccacctgtaagaaacctaacaaagctttcctttttagacctttcttacaatcaattctcaggagccataccttttgatttactacccactttgcctttcttgtcttatcttgatctgaaaaagaatcatctcactggttctattgatgtcccaaactcttcttcttcatctaagctagttcgtttgtcccttgggtttaaccaatttgaaggaaaaatcatagagcctatctcaaagctcataaacctcaaccatcttgaacttgcttccctaaacataagtcacccaattgacttacgcgtcttcgctcctctcaaatctttgttggtctttgatattcgtcaaaataggttattaccagccagtttaagttcagattcagagtttccattgagcttaataagcttgattttgatccagtgcgacattatcgagtttccaaacatctttaagacccttcaaaacttggagcatatagacatttccaacaatctaatcaaagggaaagtacctgagtggttttggaagcttcctcgtcttagcatagcaaatcttgttaacaattctttgactggtttcgaaggttcttcagaagttttacttaactcatcagtgcagttactagattttgcctataactccatgacaggagcgtttcctactccaccactcggttcgatctacttgtctgcgtggaacaatagtttcacagggaacatacctctctcaatctgcaaccgaagctctctcatcgtccttgatctatcctacaacaaattcaccggtccaattcctcaatgtctgagtaacttaaaagtagtaaacctcaggaagaacagcttggaaggaagtatacctgacgagttccatagcggtgctaagacacagacgcttgacgttggctataatcgactaaccgggaagcttccaaaatcacttttgaattgctcctctctgaggtttctgagtgttgacaacaacagaattgaagacacgtttcctttctggctgaaggcgctacccaatttgcatgtcttgactctccgttcaaacagattcttcggccatctctctcctcctgatcgaggtcctctcgcgtttcccgagctgcggatacttgaattgtcagataacagctttactggaagcttgccaccaaatttctttgttaactggaaagcatcatcacccaaaataaatgaagatgggcgtatttatatgggagactacaagaatgcttattatatctatgaagatacaatggatttgcaatacaaaggtctattcatggagcaggggaaagtccttactttctacagcaccattgatttctctggaaacaaacttaaggacaga

SEQ ID NO: 34692 - DNA, 1295 bp, Arabidopsis thaliana landsberg
ttgttcaataatttatgcatcaattcaattagtattcaattatttgatcaagcgtgcggactaaatgagagaatgatatgtgaaatctgaaatgttatacccggtttaggaattattcatagattgagttccgagacagaatcaaattattcgtgtataggtgacaactacgtgcgattagaaaaaataaaaataagggatcattggagaagacaatggatgacgtaagccgatgagaatctgaagatcctctacgacccgagtccattttagatcctaacccggtgtgacccgtttacctggtttcctctcaccaccaagttttgcttctaaaattttctggtagatctgagtccacaatcatcagaaatcaactttgtgaattgaaggccgatcactcctttgactttgttcttagggttcatcctcagaggtaatcaatttatatggattacgcaattttcttaacgaaattgattaacttgcaattacctgaacccccaaaatcgtaaattgtagggttctctggtgatttgatgtgccttaaagttatgaattttagatacggagtttgtattattgcctgatttccgatacacatttctgtgtgctttttaaggtgtttaatgagctcttagaagctatgggaatggcgtccatgagctctggtactgaaagccttcgtctttgcgtgtttgacttaagaagaggccaacacgaaggacaggaactggacaagatcttgttcttctatcctcctgatctaaccttctccactcagctatcggttataggtctcagtgaagggcttatcacgttcacgaggttagctactagagattttccttctttacacagatttttcaagctcatggattgattgatgttgtctcatgttcacataaattttgagcgttattagcttttcctgtattgttgggtgttcctgagacgtggtttatggaatataaacacagacttttctccccggaggcagcttgtgaggtaattgaagcagagagacattcccatgttttctatgaggccgagcccgatatctggatggtcatggtacaacattatcaactctttcacttgttttagcaattgatttgcactttgttcatatgcatcaaaagaacaaaatttgatttagactttggtagattgtagagaaaaataaggagattgaagctgtatggaggattgatgcattgcggagagtgctaaaaaaagtgcactctctctttgttatgtttcaagggtcaattagggcattgcttagaaagaaccaa

SEQ ID NO: 34693 - DNA, 351 bp, Arabidopsis thaliana landsberg
cgcagcatagtttcaataaacacaaggaacagaaaaggtgacagcgtgtcgccctggatggtgccgtgctcaatggggaactcctcggtgggtccatgcaccgtgagaatgcgggttttagccttggcatagatactgcgcaccacatcaatcgccacatcagggaagcctaggtcaaacataatttgcagcagcttgtcatggtccgtggtgttgaaggcagcggagaagtcgatccagagtgcatacaggttccgtctgctcagatttgcatcctccaacacattggccgccatctgcagctggcgaacggtattgcggtttggtgtaaatccctcctggcaggaggag

SEQ ID NO: 34694 - DNA, 533 bp, Arabidopsis thaliana landsberg
acaccattgaaaaggatctagagatgcaactacatatattaaataataattatgaattaacattatgatagggatactaagaatatccggttcttgaattgctctcgatagcggatagtctcttttcgatcgtagatttctttggtcttaatccattttgaccaatggtagcattgatgtacaagaaattgacaaatggtaaacgttgttgatacaatcccaaatcataacacctcatagtcagaattccggtgttgacaaaatttgaagaaattctcacaaaatatttcgctgtccacctcatagttttgtctatcaattcaataattgcgtgttgtaaaataggctaacaatctcaacgtagttaaatattactgaacgttacatttgcacacacgtgacataaccacataggattggaagaggagtgataataatactggacgttgcatttgcacacacgtgacatagccgcatatgataggaagagtaggaatatggatgtatatgagtaataatagtaatgtcatttt

SEQ ID NO: 34695 - DNA, 1333 bp, Arabidopsis thaliana landsberg
aatgtcactattgtatcatgattgatgcaggaggtatacaccaaattgcttcactctatagtagcaacatcaagtaggtagcttattagggtcttttaacaagtacatgaacataaatgtgaaatgttgacagataaggacaacgttgaagaagtcaggaacactgtgtaccggtaactagtcttgatcatgcggtttacaatgcaggctaagttctgattcctccacagtgcgctttgtctttgtcttttctcatcataggtatgtaacattctcttttttcaacactgtttcagtgattctctcttctctgtgcgatcatcacatgttctttaaacggaacaacataagcattactatttcagtaaacatgaaaacaagtgctgttttttggacactaataatgtttgcaagcttcacaatcaaattatattcagactgctatttattgtttgtcttgtgatgactccttcactctcctcttggcctttatctcctgattctattagtagtgaagattatgtggttctttccggtttaaggatatgagagctcaataaaactttgagagtctcctctgtccttttagtgttcagaagttttggtaaaaggtgaagacttttagaattgatgaaaaggaaaaatgtagagtctcttcccactggtgctaacttcaaatatctgaattgatcttagtggatgttcaaagttgaagagttttccagatatctcaagcaacatctcatgtctctgtctaaaccaaacagggatcgaggaagttccttcgtggattgagaactttgtttggctcacacatcctactatgttggagtgcaacaagttgaaatgtgtatccctaaatatatttaagctaaaacatcttgacaaggctgacttttcagactgtgggacattgactgaagttagctggtgcaacaaaacaatttccgtggcggcggcgacagcagataatatccagccaaagttactagtgtctgaggcctcctcttccctatgtgtccagaaatctgtggttagattcataaactgctttaaattggatcaggaagctctccttcaacaagaaccggttttcaagagcttgatattgggaggtgaagaagtgcctgcatattttaatcaccgagctactggaaactccttggtcatccctctagttccgacctctatctctctggattttttaggattcaaggcttgcgccttggttgatgttaaagctatgtccaagccttgtagagtagatatccaggtattttgtccgtttagagggcggtctagggaccattttgattctgctgatcactcacac

SEQ ID NO: 34696 - DNA, 485 bp, Arabidopsis thaliana landsberg
ttgattatgacatctacatttatagaatatcggagtatgcacccgttccgtttcaatttaatattgttaacaaagaaacaaattttgacataaattgggctatggatcatgccttatcgatccaaatatgtcaaaaacaaacaatgtatcttgggtgatggtttccacatcaaattgaaaggaggaggttcaacttgctaaaattcaaggactagatcaacacaaccattctgacatcacataaaaatcccacagtgaacggaattcatcgaaaaagcaacccacaaaattagtcatcagccaaaacaaactcaatctcacctaccaaatatgtcatatatagatttgtttttagtggaaatcacgttcaagacaatataatcaaaatgtgaaaaaaagaaatttgaaaaaacaaaaagccaatataatcaatcaaatttaccactagactacaataagtttgacaacgtattatatttccattt

SEQ ID NO: 34697 - DNA, 1213 bp, Arabidopsis thaliana landsberg
ctctagagaaaagatcatgaactaactaatttgatctaatttaaaatctcttttttttttgtggccgagaaaatcgtcaataccacactttttgtcgaagaacccatgtcacattttttcctgtttggctgcctagaaaatagtcattaattttcccaagaaaatagttctatgtttcccaagaaaaagagcaccaatctttaaattctaattttatgttaaatggttactaaagctgaattgatattttgattttgttgtagacatcaaacggagacgtgttcgagaaaacacacgacgagttagacatagagtttctagggaacataaaaggaaagccgtggaggtttcagacaaatctatacggaaatggaagtacacatagaggtcgtgaagagagatatcgtctctggtttgatccttctaaggagtttcatcgttatagcattctctggactcctcacaagatcatgtaagcttttttcaataccatcatttctttttactttttccggtttagctttttcaatagcgttgaccaaacccggtttgtcaatatattaaatttggtgggacgatgaaagaatgtttgtctttcaccgaacgttcttcttcactttttcggtttttcctaagatagttaataaatattcgatttttggtttctaatatacagttttctaatcactttttcattatttttttaaaaatttgatttaattttttaaaaaaatcgataaggggtcagctttttcaaaacaattaattcgtcattattgttaaacaccagcttagagttatctttttttgacgcgtaatcacgtattaataagcctcagttgtcacgcgtcttaatttaaagccaaaattaactgttgaaaattttgattttctattgaccttcgttttttaaattaaagatggagaaacgttaatcatatatctttgaaaaatagaaaaatagtatatgagttagactttaatcaatgagatcaacgtaggcctcgagtggcaattaaaggctactttattgagtactgaagattaattacattgcgcgtaattaaactataaatctctctttattaaaaaaattagggaaaacaattttaatcataacttcaaataattttttaatattcctttttctctctcgttatttcttgattggtataattggtacatttcattaacatttgagaactactatata

SEQ ID NO: 34698 - DNA, 1262 bp, Arabidopsis thaliana landsberg
acctcaagaattgatatttataactatgggtggggatcaaactccaatttctcacacgctataacataccatagcaaaattctatccaatatacttgaagtttcaaatttatcagaataatcgaattccaaacttcacaatccatatcttcccatataaaatcataaaaacaccattattcatcataagaaaaataaactgtaattaactaaatacaaaccagtgtatgaagtcttctccggctatgttgcccacataggtcaaagcttggctccatttgctcctctcctcctctgttttatgagcacaagtttctttgaaagcaatcccaacatctccggtttgtttgcgcacgtgagaaggatcaacttcgtagaagacagtcatcactatttgccctatatcttctttgcactttaaaatctccaatagctcatccaaacaccaactggaagaagcatagttcttcgagagcaataagatcgcgatcctcgattctccaatggcttttttgagagctggagcgataatttggcttctttcgatcccgttgtcatcgaacattgtaattccattgtaaataaactgttgacgtaagtgactgagaaatttaatgcggacgtctggtccatggaagctcgtgaagacattgtatctccagttgcgagttgaggaagaagaagaagccatgagagatgattcacaaagactttgagttaggatacgaaatgggaaaatagtgttcactttatatatttcaaaacagttaaatgaagagaaaagtcaaaatgtgatttttggaaacaagttatgcagaaacgcgtaatgaagcgtacataagaagttgtatactgttcattctcggccagaggtgtttaggataagtcttttatgaaggagaaaatagcaaagctgttgttcacttaattgtgagagagacatgcatggaaagtttctttgcaaagtaaacgaaattcaaaagagtaagtgtttttttggaaaataagtgggccgggctccgataaaaacgcgtaatgagagaagaaactgtgagtgtttttttgttgttgattccatttacaagacttttaagacattttggcatttacagagatactagttattattcttaacttcataacggtttgaaaatgttattataattataataaacttaaaaagagattacaaatatatcaatgagcatacaaatgaaagctctacaatccataaaaccaatcttaagttgaatgaaataatcg

SEQ ID NO: 34699 - DNA, 719 bp, Arabidopsis thaliana landsberg
ctccaaaaagtttagttgagattctgttactcatcaacaaggtttttaagcttgttatactcacagcttgttcctgttgcttaataatgttattgagtagatctctcaaaatgctaacgaaaggtgttgcgccgattccaaggccaaccagtaataccacatcatacttccaatggtcttgcgctggagcgccataaggtccatctatcaacagctctggaaaactatattacaagagagagtatcaaaattcacattctgagaataatatattgaattttaaagaattttatgcaccttctttggtttggtacatctgctctgagaagtccgctttttccagcttcaggggcatgacataccactgagaatgccttcttaatcccttctgtccaatcaccaagttgtctaatgtgaatgctgatataatcatcttcaggtgcggaagtaattgagaatggatgcctaaaacgaaatacaaatcagtaagacagatgatttggttggtatcaaaaactgttatgaataattcttaccactcgaatggcgaaaccgcaggacattggacgaacatgtattgtccgcttttgtaacgaaactgagttggtttcgacatttgcagcgttaggacattaccaggatatatagccacctagaagggaatatccaaagaagttaacttactcggccaggcaatgagtgaaaaaccaaaccgaggc

SEQ ID NO: 34700 - DNA, 903 bp, Arabidopsis thaliana landsberg
gtggatcctccattggcaaaccatggagtttggttccctgaatcatcgagatgagaccactcttaatctcgaagttgttgttctggatagcaggaggtgcaattcccttcctatgacggtgatcacgtggtgcatctgcagcaccaatgttggtagggccattatgttgattctggtcgtcagccatttcgagtggttgctgaggtacaggtttgactgtggtactcctttttctgagttcgcgagatgtgcggatgatgttgtcgttgaaaaggaggctctggttgcctgatgatcgatttcgcatacagcagaggtgtacctggatcaagaagacaacaagaaaaacacacagttagtaactgaaaagaaaattgaagatgaacttgatctaagcaagtctgaaatctcaaatgtaacaaacaaacacccaattggtaacggcgccaaattgataataggctttttaagatcaattatcctaaaacaccaatcatattgttgtagtattttaggttgtcaatccaaatgggtgtgatgctaacaatcaagatgtgatcagaagtcactaagtcaagccaagcaataacaggttttggtgtgttctatcagtcctaagtgaatatgcagaaaacagaaaatcgatcagaagcagtaaaacactcgaccaacacagctctttgcagagcacatggtgaggtcgatagacaggtcgagtaacagacagaaaatgaaacacagatactccactgcacagtctgttgccagacaactaggtggtcgagtatgaggtcgagtaacaagaaagaactacagaaattaagcgacagataataagatgcagttaacaacagtagagtaaacaaagaatttaatcagataaagaattcccgaggatgggct

SEQ ID NO: 34701 - DNA, 9103 bp, Arabidopsis thaliana landsberg
ctcccactcatagttatacaatatccaacaattcgaacttatttcattaccaatccattatagatcgtggtttctacctaggaacaatgagtggagaaacaaaaaataaaatagaagaaatacctaaaaagtaaaaatgaaattctgatgcaatttgaaattgaaattatgcgactcaaggcttttattgaactagactttacactggcccgtatcatttaccacaaggaccgaacgaactaaaatcatacatacataatagtgaagctagcaatgacatgactaaggcttcattcatcacatgggtctctatcaacaaacaaaacactcatcaatgttacagacccggtggcttgaagaaagggaccaaacctaaggcgctttcaagatccaatgggacctgaagagcctgttttagtagctcgggcgtgttgctcgtatctcctttccatgtcccaaaccacggtcctcctcctatctccactgctgccattgagctctttgtctctaatatcacctgcatcattgttaaccataacaaacgttcataatcttctttcactgccttaggatttgttaagacttttaactacagggattggatcacattagcatacataccttgcctttacttccatcatatagccgttcccatatctgcaacttcaattcaccgtaacaactatctctgcaagccgtagctagcccaacttctgtggtaggagcacgcagaggtgtacccgcttcatttgttcttgcctctagttccacctgtcacaagacattcatcgggtgttggaatctagccataagggaatgatatgatgtcaaaagtaaaactgaatgaaactagtaaaacaaatttaccacatggttttcgttctctgcagttatataccaataaccccagggagacatttcccatctaacaacaccattccaaggaacaaactcgtacatttttccatcatagtgtacacaaacctgcagatttacaagggcccagagcttttgtaaactatctgccttctaatactcactgtcattgcttaagaagatcttataagtgcataccagtgcagcattttcataggtctcagtcaatccaggcaattgcctcaacccgccacctgcggttaaagcaacttctccacttgccccttaaagacattacactggacctgtaaagagacattgacaaataaagctatcaaacaagtatactacatgtgggtgtatacacaggtccactagctaactaaagtctgcaacaagaaatgtagcaaaaggatgaaatgttttacccaaaaccattttcttgggaagcctccaccccaattcttctctgaataagaaggtgcatcccgaaactcaaacctttcaccgccccattctatccaccctgcaaatacaagagaaaaaataagaactacaatagcagtttctgctgatagaaagagggtggtttctttcttaattttctgttagtactaggcaagtaaacttaaccgtctatttattaactttaagtcaatcaagcaaagctcacacctgtggaaaggcctcctgccatgcatatctgccaatgaggctcaaatacaggaaaagctgcaggccagcctgcagttgacttctgtttggccccaacatcaccccaaccgtaaacgggacgagtactatactcccaacgagcagatttcacagtttccgcatagtcagtactgacaaaacaagtcaagtcagatttaaacacagaaattttcaacaaaaatactcaatatccaatatttataatatagtgaattcttgttgtgcatagaatcatataattaccggccatcatcgcaaatgtgaccttgatgccaaaatggagtagcttggaacccttcggacactcttctgttaaattcctacaataaaacgacatgctttacaaatcaacatccaagagaatagcaagagtaacaaaaacttgagattttctacaaggagaagtagaacactatccggatacaattggaaaactatttaacagataacaaagtaaccaacaagggaggagtgagaacctctggtggaacctccttgtttggagcctttgcgcctggcacagcactaaaagtattccccaaaactagctcatgtcgatctatgcatgagtaaaaactttaggtaagcaatctttaaagtcatatatacaaattcatgttgagaaagcaccagaaccaaaatgtaacaaaattcagataagacttagatctttaacaacaataacgaacattagtactagaagtagagaaaagactcagatatgatttcttattgtcatgacacagcattttaagggtcaaggagttacctccccagaaattgtgagagtcttgttcgtattggcataaatatttatcattagcgccaagaatctgagctccaacaccagtgaatctaggtccatatagagccacttccaatggtgacaaactctgccgaaatgcaggattctccacagaatacataaaacaaaaactctccctcttctctgggatggaaaccctgaaataccatccctcgaagaacttccgaggtgttccatcgaaatggtatctgcatttttcaaaagttaaacaataagttatcaaccataaaaaaaaaactctctgatgttaaattgcatttttcaaaaactcaaattcaaaagtagtcgtcgaatggtgagccaccaaatgaataaaaataaaatcttacaactttgtaatactcaaaacatactgaagcatttaaaggagcaattttttaagtcccactgatcgtaagaagaacatataaattaaaagacgaaactgaaattggagcttaataaaacaaacaagagaagagaaatggaatggaatggatcaatttacccactgtgaggagtccggagttcgcgattgggagacgtcgggacgtaaacaggtttaacggagatcttgtcagtttcactattcggggtggagatcgacgccgaaaccctagaaatggagcggggaactagtttagtcgatcggaacggaactagtgagcgagtgagaggagatacagggcgagagagctcaaaggaagataaattagggttcatagaaacaatcaagctccgtatctccataatggaagaagaagaagaaatatgcaaaagaatgtgaaattgtgtgtttggtgttggtggtgacaaactctgtgaagaatgcagagaggaagaagaaaaggacgagaacgtgtggcggtaagtagttacgtggcaaaccccaaacgtaacgtatttttattttgttaaattaacaatttctcgtgtcttgttttcagtaatttacggaaatttattagagacaacatttcacaaacagacgtgaggagaatctctacaattttaattgaaatcgtattttgagatttttttcccttttaaaatatttacaaaaattctgaagagagctgaaaagaaaacaaaatagaatgcgtcaacagcaggattcgaacttgcccggcaaaagcccaattgatttcgagtcaatctcccttaaccactcggacatattgacaattttgttagacagactcttatagaaattaatatatgcacgatccaaaagactgatgatgatgaatggactagatttactcttcttcatttgtctcttgtttctttctgttagactagatttcaaaaacccaaacgaatggcaggtttttcttgtttacgacgagcaacataagaactaacaacagtcgcaaacaaaacaaatccttcctttctactttttcggtaattgacatcattgagtcgaaagagattatataatgcaagcatagtttgacattttgatgtctccattgactatggaattagggttgcaatcatatacaaagaacataaactgtccttttggcaaatttaagaaccataactctcatccaattgatatcaaactttattgccaatggatataacaaataaaaggtctgaaaatacaaatgagagattaaaatgtcctaaaatagaatctcgagacaaaccccaaatcgctgagttctcaacaaaagattttccagttttcttttctctacaagaaatatacaaacccataaccaacggtaaattataaggaagaacataacacatatgtatatctatgtatctcccaagagggtaataaaatcaatgatgaaaaaagcttaacaaagagaagaaagagagttagctgaggaggatagaggagatgaatactggtaaatgatgaatggatggaggaattttcacatggtaccagctcttccggaagtcggttttgtaggcttgaatttggagatgtccacaagatccccaaatagcttgtcctctggtttattcttaggtttcattggaggcagataagatgtggtagatgatgatgatgctacctgatgcgatgtctggtctctcatggataaaccgtacatttgctggtccagatatgggctgcttccttgttgctgttgattatagccatatccgtatcctcccatctggtttccatacgcctgttgctgttgttgttgctgtagctgttgctgttgggcatagtactgagccatcatcatctgctgctgctgttgttgctgtggttgatagcctgacccaagagcctgatttggttggtttggcatgtacacgccgttttgtggaatttgaggatatggactgatgttggcaactgcttgacctgtttggggcatttgagcatatggactgttattgttgactggtggcccggtttggggaatttgaggatatggattgttgttgttaactggttgagcatgtgtgaaggcggtctgagttggatgcattccaggagaaaacggacttcctgactccgcagagggactatagtcttggagctgagtttcccatgggggaggtggaaatgccgtactgtcttgggcaccttctttttatattacaagattaccataaaaacagaacaattaatgattagacatgagacacaattgaagctgattcttctgaatccaaaagaaggaaattctttctccttgttgccataaccagagaaacattggcatactgcaatctaatctccagatgtgtgaaaaacaaaaactgtttatatatattaccataagatggctggactggttgctgtgcaggctgactgctccagggagaagagactccttgcccgtatgatggctgctcaaactgcgaataacccacttgaggcgcaaatccattggattgttgtaatccagcttctccagcttgactatttggttgttggtgcccttgaggattcaaaggaatattctgagctggattgccacttggtgcagttgcaggacttggattattagtattatctgagaacatgtcgataagggcgagtgcattttgatctgatgcaaccggacttgctggctgaggaggtccaacaggaacaagggcaagatcatcgccactgaggaggtctattttggaattggctgaaccattagttacaggtggtgcagggagggccaactgatttagaaccccgttaccagagctcgatgtagctctgtgaaaacgttggacagtataaatcaatagctatgttataagacaaaaaaaaaacttttacaaggtcacttggcctgaaaccccagttcttacttggttaagagacaaattaacaccgtttatattaaaatgattataaagttactcccagattcataagtaacttttcgttttcacatcctagattgtaatagtttggacgtgcaagccatatatcgagctcaagattgcagctaggatcggtaacccatatccaaaaataggtgattttatccaacattcttgggtgcataacagtcaagtttggtagaacgtacccgttcgcctgattactgctgtcccctgtatcaataagtggaccatcaacatcaacaagggattttcctgtctcggacttgggcttctcgatctgagaagaagttccaggtaatccagaagcaattgcttcataattggttaagacacgctgcaagtcatcattcaaagccagaccttgacataacaaagactcgtccctgaaaaacaaagttgcgaggtaaagaagagtacaaagaaacataaggtctgaagcataatagcaattctaactgtattattccacacgatactatctgaaacgtgaagtaagtagcagcattaactcagacaagtacggatttcagataattcttaatgaagtcctctccccaccctcgtccataataaaccaaaacccacacaaaacacgaatcatttcctgctgaatctagtggtactatgtatgcatattagaagatgagaataaaaaaaaaaatcgtctcgtaccccaagaaatataacttatatgagacatgaaagagataatcaaatggaaccgaagaggaaaataaagagctcttacgaagtcgagttgacgaggtgcaccactctttgtttgtatgtacgacactgctccaccagatcgaccataacctcttgtttgagatcctgaataaatccaaaaacgagaagaatgatcattatttagtatattttgggctatagcctacacttgtaaacaggtagctcaaacactctgcaactaaatcgtgttacctccttgtttccgggctctaatgcactcagcatctccgcaagcacatccatgataccttttgcattttgaatctccgacaaactgaaaaagaatttgacatacagcagaataaaattttgagaagcaataaatactgagcaacaaaggcatacatatacgtcctaaataaagcaagcaaacagacacaaagttaaaactagcagaccctagtgaacatgcctattgagtcttacaagaaaaaattgaaactccgttactgcaaatgcgtgcatttttcaaaagctagaaggcttttgcttaagtgtgattattttcttgattcctctttacttcgattcatcctatatataggcttccaactagggaaggacgttgaacaaaaagtagctaaacatatattacgacaatttgttagatatagcaaggacgttgaaattttcccaacaaaatattgtatgcttttgttaaaaatttatgaacttaaaactgcggagttgcaacagaagatatctaccttagagtcggaaattctggctctgctgaaggttcaggcacatcattaccaggtccagcgttacgaagatttggagggtaagatgtcaaaggctgtgtttgaggaggtgtgaacacaggagctgatctctctgatctctgagggaaaacagcaccagcacgctgaaagggacatgagtcactggtggttaggcaagagtagtagaagattttctaacagaactcacaaaaggatctaagaagaattcattatgagatgtaataaaatttcagtatgagacatctggacacccagaatcagaaacactactctactgaaggaaaaaaaaatgaaacccaaaataagtatatcaaacaactaaattatgtagacataccaacaattcctggtatcctgcatagtattgtggatatcttgccctagggccaccaaaggcctcttgccatgtatcgataaggaccagaatcttctctttgacatggaagtccggctatatgcatcagaccaattaggattagagaggcagagcaagggagagagaaagagagaccaatttggaagaaccattaccttcttcttaactatccggaccatctcatgaataacacctttctcagccacatgcatatgaaccatgtcaccacagttcttcactattgtctcaagcagctagaacataacaaaaagcatgacgatgagtgaataactatcattgcaaaacaaacaagaaagatgaaaaaacgtgaaaataatgtatcagcttatcattcttgttagaaaacttgtaagtcattaaaatcctcatcatgtacattagtatcatgaacaagtaatctctgatcatgtcaacttccactaataaaagaggtttgtgaaacaaacacgctatccaaatgcaccgtttcagaaacaacagtggctatttcaatgaagtagccatcaaggaaaataaaaaggagagacagttatctaggagctcacagttaaggcaagaagctgagcttttggattcctgctaccaatccgttttttaatgcctttcacaacatcttttgcttgcctacaaaacaggaaccagtttcagacatcacatagtattggtgcagttagtacacacactgaaatctccttcttccaatcacaaagcatataaagaaaataacttgagagcttctacaattaaagccctatgaaagatgactaaattgagcaaaacagtaggccacaagtattccaattggtcctagaaaacatggaaatatctaactctggtaaagaaacgaaatttgatttccatcttactgttaactctctctctctctctcactgaaccaaaaatccaaatccgtatagagagttacaatagtttacaggagactaatcgagaagtatagaaaacaaaaggtagagagagagagagagagagagagagataacaacaaaaacaaaatcggagggagcagagggaaacatacgctggatcgctattgagcatatcacagatctcgaggttcatagcccaatcaggcccgatcagcatctcgctcgtcgctctctccaccatagcgttcaccatcttcgctttgacccccaaacagaaaaacaattaacctccgattgaaagagagagacgaattttgaaaccaacgaatcaggcgaagacgaattaagcagccggtaagatcacgcaaagagattactccggcgaagaatctctcgctcaggaattcacgcccttctctctttctactagaaatctttttttttttccttttcttttctttttctctaattgttaattttcagaatttgttttttaaaaatgtattttctgtacttcagatcattttttattttccacgaaatagcaaaaaaggaaataagtcgaatatcttctggaaaagggtccactaaaaga

SEQ ID NO: 34702 - DNA, 599 bp, Arabidopsis thaliana landsberg
aacggagtatcccgaaacattgtgggccaccaaaagtctgcttgaagaactttggatactgttttgaaagttgctaaatgaccaccatagctagagctgtgacaatgtgattgtatagtaggaacctctgttgcagcaatgcatctcctgtaaattccatcataacaatgcttatagagataaggctcatcccattgatatcgcctaatctctcttaggaatctcttcttgttgtaatctgtgaaattatcaggctccacatctgcagctaggtaattaacaacgtcagcataccatggataatcttttttgaccgctatgacggtgcaattctcagttggtgaccaatttcttgtcgattaaaagggtgctcgatcgacaggtgccaagggtgtcgatcgacaccatcgcgcaactacgaatatcaacttcctccgaaatgggagtgatcgatcgacataatgggagtgtcgatcgacacttaagcacgatcctgcaacctgtcacgtttgtagacatcgtcttcagctgcatcactcatgtatatgttctcttcaggcaagatatcatttatagggacatcatcatcgatccctatg

SEQ ID NO: 34703 - DNA, 1166 bp, Arabidopsis thaliana landsberg
aataaaaagataacacagtaacaaattgcagattgattggttgtgaagcaagataataaagagtcgggtttagggtattctcaggatactattgattagtagatctaatgataggtaggttgttatcgaaccatttttatactcaaactctaattttagaataacacatggcgttccgcgaaactccctatgcctatagctaagattaccaaagaacccgagaaatcttatacttaagcatgcattataaacgagttcaattcagttcaccttagtaaataggccgattcttattacacacctaagaccaggctcatcaaataatagtttcaactacagagacttcatacctatggcgggtatatctattgtctggattcaagttctagttaattactatagaactagcattaagaaaatttaaagatgaaaaattctacagataacctagcaaagagccgatctactaaaccatatgaatccctaatgagaaaccctaaccttaacaagcaaactactcagacgtggagattaaaacaagcaacatatatgagtaagaaagcataaacaattcagtaaaagaaagagttagaaaagatctcttcactgtattgaaatctgaatgaatctctgaaaaacaagggatgaatagcttatgtctctaagagaaaacttgataaaaagcttgatagatctaatgacctctaatactatttatatgacctaaaaaacgttcaaggagtaataatgcgaatagggaagtcttctgggcaaatttgatcttctgtaaacttgaaagcatctatggtttttgctaggccgaaaccagggtcgatcgacaccaagagtgtgtcgatcgacactcctcgctgattcctgaatccaaaagcgtccttagtttccttttccttagatcttgctccaaaatgtctccttatctccattgttgtcccattgcatagaatacttgaaaagatactaaaaaggctcgagaaataacataaagactcaaaatcctatacctaaaacatagataaaatcggtgaaaattgtgttatatcaactcccccagacttagcttttgcttgcccttaagcgaaacacaaaagccaaactcgtggaagaggttttgaaacaaaggtactccaacattctctagcccatat

SEQ ID NO: 34704 - DNA, 1421 bp, Arabidopsis thaliana landsberg
cataaatgattttaattttttttgctaaggatcaatttttcagatgataaatccaattatccaactgtaatttttcattcatgaccattttttttgggcaaacattacaacataaatttgaaatagacatattaaaatttacataagcatttggaaaaaataattacaaaattgaagaaatgatgaagatctttctgatacatcttatcgagtgagcattccatatactaggagatcttcaacttccaagtcgaatcagctttttttctgtttacaagaataactattcaacttgtatactcgtgaatacctacattaattctacagtctatctacaagaatcaaatagaacacaaaagctgatagaatttaatggataagacctatcaatatcatgttcatcatcatgaatgagtttcgtacttgtacatctactgcgtggattctcaagactgtagatgcaacacatatgttaacacatgcccaaaaaaaaacaaaaaaacaaaaaaaaaatatattgtaaaagacatttgcagaaactggcctatagttgcaaggccgaagcattgggagaataaaacgacccacttaaaagccttgggcttctcttattcacttcaggatccttaccaactacttattgggcctttaataattaaagcccatataaaagaagcacattattcgggaccgaccaaagtgaagtaggtgtgttgtattctgatacgcaactgaaaatatagaaagcaaactcagtgtcgccgtacacgtggcacacccagaacaatcatctcctataaataccgattcttccgcctcgcgtcaacagaaaccaccattaaccctaatttttgccgaactcgtcttctgctgaaaaccctagatctacagatctcccgaatctcccaggtaaaaaatttactatttcctcttccacgattcgttgattctattatctctatcgtattctccacggtttgatttcttatagtttggatttgatctgttttctcagggagataatttgaagatggtgtctgacgctagcaagaagaaggcagctcagaagaaagctgctgccgccgctaaaagaggtggtaaagctgctgctccatccaaatccgccgctacttcttccaacggtgttgatagcttgtcaagcggtgtcgatgctcttcaaatttctgatcggacttgtaccggagttctctgttctcatcctcaatctagagatatccgagtaagtcctcttatctagatttcgtgattcgatttggaaatttagattcgtgtcctttgatctgtgaatatatgtttggataatccttgtttgattgctcatactttgtatcctctgtttaaaatatgttgcagatagaatctctgtctgtgacgtttcatggttatgaccttattgttga

SEQ ID NO: 34705 - DNA, 1055 bp, Arabidopsis thaliana landsberg
gctagtcttcagaattgctatctcatatcacataaaatactctaactggtaaaggaaacactttctgaggaagaaatcttaagaaaatgtacatggaaatgcctaccttctccagctgctatgagagaaagcgcatgagcaggagacagaacaacctcttctttaatcccttcaatatagggtccctataatcagcaataaagagagaatcagtgcagaatttaagagggaaagacacttaatgcaatagaggtagtcatgtttattctaaaattcttagcccaaccaatagtcaacaggtacaaatctagtatacttgaataaaaaatgtgatccagaacattcaaatatagatagataatcatgccactttgcacattatttgcaggatctcagagaatttcatttatattaaaatggaacaagtactttcatgcatctagccgagaaaagatgtatcctctaattaaacaaaaatggtgtgctaggatttaggattctataatgaatatagtcccaacaaagatattatgagacagtgaaatccgcgctaagcatgttaccaacagaaagtaaataagaggatcaaatgctgaaacaagtacctgctcatcttctctgatcctcaaattttgtcctgctggattcaacaaatcattgacaacctgaagcaaaatgaaccctagggatattaagaaaaatcaaaaccagaatctgactatcaatcaacaccactggtaaagttgacgggagggaagaaaagcaggcagtgagtagcacctcgttataaatttcaaagtaggaaacacgtaggagaaattctcgccttggtgtctgcgagaaaaatgaaaagtgtgatttaactagcacttaggccaggacattcgactaatcaacatcctaagaagtacctcttgtataatgctgaaagcatctttcacggctaatggtattataccaggagatctttggttcccctgacatttgaaccaaacaaaactttcttcatgagataaaatagttcttatttcatgcacatctttaaaggtaaacat

SEQ ID NO: 34706 - DNA, 1976 bp, Arabidopsis thaliana landsberg
cacatatgcaatatgcacatcttctatacattgaaaaaagctgatcttgcaaatatttgtcttacacaacacaagcgaccgaagcgatgcgtttcccaatgataaggttacgacatacttacacgactctctctattgtctcgtctctttctttcctcatccctctcctttgtctcctttcactctatttttcacttttcagaatatttttacgtaaaaatcatggacatgtcattgtctccaccctactatactctttttttgttctttttgtttcctcttgtggatcacaaaaataacaagattaaacgtacatttctctctaaaaccagactcaaatgaccaaaacccggattctcaacccgacccgattcccttctcccaaacccttacgtggctgcggagacgctaacttcatggaacagctcctcctccactgcgccaccgccatagactctaacgacgctgcattaactcaccaaatcctctgggtcctcaacaacatcgctccaccagacggtgactccacccaacgtctcacatccgcattcctccgcgcgttgctctcacgcgccgtctccaaaacccctacactatcatccaccattagcttcctacctcaggccgatgaactccatcgtttctcagtcgtggagttagccgctttcgtagacctcactccgtggcaccggttcggatacatagcagccaacgccgcgatcttaaccgccgttgaaggttactcaacggttcacatcgttgacttaagtttgactcattgtatgcaaatccctactcttatagacgccatggcaagccgactcaacaaacctcctccgcttcttaaactcaccgtcgtctcttcctccgaccacttcccaccattcatcaacatctcctacgaagaactcggatctaaactagtcaacttcgccaccacacgaaacattacaatggagttcacaatcgtaccttctacttactccgatggcttctcctccctcttacaacagttacggatttatccttcttcattcaacgaagctctcgtcgttaactgtcacatgatgctccgttacatccctgaagaaaccctaacttcatcatcatcatcgctccgaacagttttcttgaaacaactccgatctttgaatccaagaatcgtaaccctaatcgaagaagacgtagatctcacatcggagaacttggttaaccggttaaaatcggcgtttaactacttctggattccgttcgatacgacggacacgtttatgagtgagcagagacggtggtacgaggcggagataagttggaagatagaaaacgtggtggcgaaggaaggtgcggagagagtggagaggacggagacgaagagacggtggatagagagaatgagagaggctgagttcggtggagttagggttaaagaagatgcggtggcggatgtgaaggcgatgctggaggagcacgctgtcgggtggggaatgaagaaggaagacgacgacgagagtctcgtgctgacgtggaaaggtcatagtgttgtgtttgctaccgtttgggttcccatttaaatcaggttgatttaatttaattagcgttttaattggatacctaatatagtagaatagcattgctttaatttctgatctaattacaatttaataatattttttattaacttttttttttgttctaattctagtgtcaattgttttgtactagttcaaaacattctaacgttgaaaaataatcgttattatgactaaacatattttacatcttcataagcacttttagtttacatagatatttttccgtgaataggcttagtgataacagtgaaaacttattataataggaaaaattgaatagtatatagttatttaaatttgtagcgagaataaacatgttggagatacaaagtattagaggatcagatacaattgccttcttaaaatccagacataaacaaaaca

SEQ ID NO: 34707 - DNA, 422 bp, Arabidopsis thaliana landsberg
caccactcggaagccaaagacacttttatgggtggtattttttttactgtagcttgaaagttattagctggtgtgtcttcttctttaaggacatgaatttcctttttattgatttatggcgtcgcaggttggctttgtgactttctttctcagttcgattctagacaatctgacctctaccattgtcatggtttctttaataaggaaactggttccacaatcagagtaccgcaagtatggaaaccttttcttaatgctctcctattagttagttagtttttgactccctacatatagaccttaagattctcaaggaaacatactggccatgtacctagagtttaaattttgttatacctcttacgataatactctgtattataacgttagtttgtacgctcaatgaccaatggcagacttct

SEQ ID NO: 34708 - DNA, 1534 bp, Arabidopsis thaliana landsberg
gtaagagacaacatagtgtggttatgatttcacttgcgttggtgttgagtaacaggaaatgatgattaaaatgggtctaggtatcaagcgaggcttcaacgcaagctaatgtacctagctgcaatagcagattctcagcctcagccaccaagtgtgcatagccaggtgattgtttatacagtgaagtattccaaattttgttgtatgatcaattgagaaactgatttgttttgtttggttattagtatggatctgctggtggtgggatgattcagggagaaggagggtcacactatttgcagcagcaacaagcgactcaacagcaacagatgactcagcagtctctaatggcggctcgatcttcaatgttgtatgctcagcaacagcagcagcagcagcagccttacgcgacgcttcagcatcagcaattgcaccatagccagcttggaatgagctcgagcagcggaggaggaggaagcagtggtctccatatccttcagggagaggctggtgggtttcatgattttggccgtgggaagccggaaatgggaagtggtggtggcggtgaaggcagaggaggaagttcaggggatggtggagaaaccctttacttgaaatcatcagatgatgggaattgaaagagtgtggcacaaggaatcttaatgatgaagcagcagcagcagcagaagaagtagtagtaataataggagtcttgaagttagtgtgttttggttttagttgcttgttgaagaagcaaagaactctttatttacttctttttagttttgttattctctctatgtttgttccctaaaacagtgaacctctttcgtggtagtgtaccatgtaaatctgctggctccaagttgtgtcgtaatcttaatatgttatttctctgagttagactcttttgctttaaccaggactgaagttttgtagatcattgatgttacctaattggattctaaatcgttatgtaggctatattattgttttttttttctggctgttatacataattttattttatagttgataaagtccaaccggttcagtccaagactcatatgaccagccttagtggtcctcgcaaggtcccatactgctgaagaccggaccatagccacccgaagctgcactcaaaccaaagaccatattcgggtccatttaagattaaagtctcgtgaaaaaaaaagggtttcaaaaatgtgtcttttggtccctttgcttcgtcctagattcttcaagtagtattgtgtgtggatttcccttagttgagagttccatcgtcgattgtttttctagtgtctggattcccctagaaggccaagcccagcccctgctttttacaactcaatcacaagccaaaagaagtcttcaattattgtattacttccttccctttggcaaaactataagccttgaaacaatatgtcacaaacactagttaaatgaatagaccgcaccaccataggccccaagtatgtatttgacatgttggcttcatgcctgctctactagacttcatgttgtc

SEQ ID NO: 34709 - DNA, 1855 bp, Arabidopsis thaliana landsberg
  unsure (1)..(1855): unsure at all n locations
cctaagctgtaattccttgggatcttaccagccgccattttttttctaggtttgcacatcagcaaaaccaaggtcctactgctcatgtggttgatatgaaacaaatgctataacagccgcttcacaagcaagtctctggctccatggagatggcaaagaagatatctgagtcacataacaagctggactgtagctacaatgatctcaatgtcaagatggaaacactgaataccaaagtccgatacttagagagacattctgcatcctcttcagctccgaaacagctaagccaacttgcaggaaaagcaattcagaacccaaaagaatatgctcacgctatcaccctatgtagtggaaaagcacttccaactaggaggaaccaatgacagtcactgcggacagtgaagatcaagatggggaggatttaagtctcggaaaggatcaagctgacaaaccactcgacctgtcacttgaccagtcactcgagcaaccactcgacctgtcactcgagcaaccactcgatttgccattcgacaacgttactcgaccaacaactcgacctatcttcccagcagcattaccaactgctctaaaaccagttgctgtcaaaaacaaagaaaaggtctttgtccctcctccctacaaaccacagcttccatttcctggccgtcacaagaaagcgttggcagataaatatagagctatgtttgccaagaatattaaggaggttgagttgcggatacctcttgttgacgctctagcgctaatcccagactctcacaagtttctgaaagacttgatcgtggagagaattgaagaagtgcaagggatggtggtattgagtcatgaatgcagtgctatcatacagaagaagatcattcctaagaagcttagtgatcctggttcattcactctaccatgctctttaggtccattggctttcaacagatgcctatgtgatttaggagcattagtcaatctcatgccgctctctgttgccaacagatgccttgtctaccaacgaatctggggagccgatcatcccaacttcagatgattggtctgaactcaaggcgccgaaggtggatctcaaaccacttcctaaaggtctaaggtacgtatttcttggtccaaactctacttatcctgtgatcattaatgctgagataaatgatgatgaagtgaacctgctattatctgaacttagaaagtatagtagagcaattggttattcattatccgacattaagggaatttaacctagtttatgcaaccataggatccaccttgaaaacgaatcctactctagcgtttaaccacagaggaggttaaatcccaacttgaaagaagtagtgaaaaaagaaattttgaaactgcttgatgttggtgtcatctaccctatatctgatagtacttgggtttctccagttcattgcgtccctaaaaagggcggaatgaccgtcgttaaaaattaaaaggatgaactgatccctactagagctataactagtcatagagtgtgtattgattgtaggatgttaaatgctgcatctaggaaagatcattttcctataccattcattgatcaaatgcttgaacgcttagctaatcatccatactattgctttcttgatggatatagtggtttctttcaaataccaattcaccctaatgatcaatagaaaactactttcacatgtcgttctggannnnnnnnnnnnnnnnnnnnnnnntttggtttatgcaataatcctgcaacatttcagaggtgtatgacctttatatttttagatttaatcgaggagatagtggaggtcttcatggacgatttttcggtctatggcccctctttctc

SEQ ID NO: 34710 - DNA, 1695 bp, Arabidopsis thaliana landsberg
aataatttacattttgccccttatatttcttttattttatcggatattgcttaacagtttagaaatgagagatacgaattcatgacaataacgaattgtggattttgttcctaagttcgctaaataggttgcatgataccacactttaattattatgtatatatttatgtatttaataaaatataacttgttatatgtattactctaaacactatctaattctatatatacatttttcagccattttgtgaaataaatcctgcaattggaacttctttacaatggttgccactgacttattaaatgcgaaaattaactaccaaatcaaagcaaattttattcaaaagaatatgcttttattccatggcctaattatttttgccaaaatggttaaaatatttaaaaattaaataatcatttaaaagaaaactttaaattgattttaattataaatcttttaataaaaatattattaaaaaaaaaaaattaattctaccgaacatgattagatagtaggactagatggcaggacgtgtttataatattataatatataaattttacattaattaaataaccattcaaaagaaaacttttaaattgatttgaattaaatattttttaaattaaattattattaaaacaaaaataacaaataatgtctaattttactgaatggggttagtggtaggacggtttggtcgatagtattacaagacacaagtgaaatccattagatatgtttaatttcactgtgcatgattagatggtatgacgggtttggatcgatagtaatacgaaacgatatattacgggtgaaatcctagatataacaattaaaatctatatatacattatcttaaacactaaacaaagcaaacaatattaataaaacaaatatctacatatacattttatataacaaattttattaaaaatctagccccgcggtatatcgcgggtcaaaatctagttacaacgtacaaagagaagtggtggtagttgtgtgacaagacaagctaaagagagttctagagaagagagctaaagagcttccaaagcaagttttcttcttcctctttgttgttcttgaatcttattcttcttgtgtgtaaaatctgaaaaagaaccaaggacatcacaagttagtggtgtgtgtaacctctttgatatagtgaagcttggaagcaagagtccttccccgagacgtagcggttagccgtgaactcggttatcaaattcttgtgtttgtttcttttacaagctattattattctcagttttctctacaacgactacaaaaaaaaattcagactattgataagtttatgcaagatgagtcaacaaagagatacattggagagatatgttgttaaagataattgcaatggtaaagagtcttgctaaatgttattctcaaatcacaatcaaaatgtttaacattagagaataattaattaagtacaattccatatataagatacacaaataattctctaatatatatatatatatatatatgggtaaaattatggttctagaaataataaaatatccaccactagtttataaatcagtcataaactagtttataaatcagtcataaactagtttataaataagaatcaagaattcaaacctgactcatataattcaagtctccactccactagtttataaataagaatacgaatt

SEQ ID NO: 34711 - DNA, 236 bp, Arabidopsis thaliana landsberg
agcacgtttgggacgttcatgataagttaaatctcctttttgtactttttcagaaaactatgtataagggggggatatctatactaattatactgatgtgacaattttatgtgtgccgtagataaacacacggtagaacatataggcctatgcaagagagagtaacttaaaacaggatcatgactctggtttggctcttaccactgtagtcagcaattgctttgccatggctgaaa

SEQ ID NO: 34712 - DNA, 1310 bp, Arabidopsis thaliana landsberg
cattccagctgactctccacatccctaaactgttctacctttttcttcttttctcgagaaaaccggtccgcctcagctttcatttcagactgccatttgatacacagtattagtaagctatatgatcacagaacaccaataaccttcagcatcatcactcttggagcagattatatgaaggtaagcacataccttaagacgggtatttgcagcctcagattcacttaatttttgggtgatgctagatttctcctttgtcatagattgaatctctatcttcttttcttccttcaaccggacaagttcttccttgtttgcacgcaattggtgccacagggccgccctgtcaatatttgcatgttccacaaccttcttcagcatggctaaaacaggtctcgcaacctcttgctcctgaaaaatcagaatagctagaatctccaactctaagtctaaatcgtggctgctactcgtagggctggtgaatctgtctacgagtctcctcagtatttgaaccctaaagggctgatccggaaaccacttgaataatattgtgtatagcattttcacaaatcccctcacttgaggatctctagaatgagttaatgtctcagcaagattaaggattatcctgaactcagtccctccagtggctggttgctcactggcttctccctccaatacaggatcttgatgcttaagagaagcatccccacttgtagcattcagatttgggctctgaacacgttgtttttcaaggaccatggcaacagcctgagcaacaatggctccacgagcaacagctctttcaaatgtttgagatgcctcttcagctaggcacgatatggacaacatttccagcagaatgtagacatcaaaaaactgcctatttgcatagaatatatgttcttccatcaaatccgccatttcggaggcagtctcattttcaccaatcagaaaaggcccgcagggtaatgttgcaaaattggcacctacactgtcgtcagtgttgatatccctaagtatcatttcggcaataccaggccaactgtgtacggttttactcaaatagtcaaggacacaaagagacacatcagcacccagacttttaagccgttcacggactgcatttacctgtataaggaaaatcttaggttagccgtaatttcgaaaatattaactctaaacaaagaataaaaattgagacatgaatgcttacggcttcaggtaggtgttggcactgggaggcagtcttaaatgtgaaatgaatggccgccacaagagattcctcatttaagtcgctcaaaagctca

SEQ ID NO: 34713 - DNA, 1320 bp, Arabidopsis thaliana landsberg
  unsure (1)..(1320): unsure at all n locations
cttttgatgattaacaggtcgtgtcaaaacagaacaagatgtcaagagggaggaagaggtgttggtgtcttctgactcgaggtctcgtggcccgacaacagcagctgaaactaatagaggaggcagctacaaaaggaagctcaactttgggaagaagaaagctgaggaaacccaaacttacaagaggactgagaggacccaaaattccaagaggacggattttgtggttagtaaggagagagtttatgcaggcgaaccttcctcttctgttgcaggattcaaaatctttatctcgaaatcatacatcanatccctggtatgataagagcactaacacacagtttctgatattggcttttgtgtcaaacttgatatgttaatgattgacgaacaaaattggtttggttnttcaggcgatcccgaaaccttttggaaattatatgccgaaggagaaaacaagggtcaagatccatcatccagatggggagaagacatttaaggttgtttttgtggtaaaagagaggggtcaaattttctctggtggatggaaacgtttgtgcaaggagtatcctgttgtttttggggacacttgcaaattcaccctcatcacaccactcgagctgcttctagttgtctcaaagccataagagagaataactcactgatgaatgatgctgatggatgtgaaggtgccttggataacaagcaactgaagtaaactacttttatgtttaatggtgttagtttggttatgtgaactttcctactcgtctgtagctttcatatgtttgggaccaatttttatttgtttcgtgtttccgtgagacattaatttgctttctcttagttatattcagcaaccaaaatctgttggaactttttttgaggcagattccaaattttagtttagaacagaattagtcaaaaaccggtttgtaggatatatgggcccttttgtccaaaaaaaagagaggatatatatgggcccaaagcccaaacccagtaggcgcttcacagagttacagtctctcctcctcctttagggttcttctctctgttcagagatcacttctccgacgcagaaatgacgaagttcaggaagcttggtcggccggcgggtcaccgtatgtccatgcttaggtttagtctccagcttttctttttgctacgtctcactttctttttagatagaaatcgtttgatttttgaagtgttggtatcactcaggactatggtttctcagttggtgaagcacgagcgtattgagaccactgtcactaagggtattgactgattctctttctcccattgtcagggtta

SEQ ID NO: 34714 - DNA, 8781 bp, Arabidopsis thaliana landsberg
aaacacaagcagccgcttaatctccttcaccaaatgctacatccaataaaagggactttgctgaaagcctccagagcttaagagaaccaacactgaaagcttcttagacacacaaaatcgagaaactttaaccatgagcactttctttttaaacagaagatgaacaaccagcaacaaagattagaacgcaagcctgcatcttccgacatgctttcttccaattaaaacacttcttagcacagtgagcttagtttgggcctccgattaaaacagaaattagcccaaaatataaaacccaaacctaattctctttcagactcgacgatcttttcccgacggcaagagaatcgcaaatatacttcacatctcatacaacaaaggcacctcttctttctcatctagccacacacccaagagctaacctgttagagatactaatctcagatcggtttcctgctctgataccaattgaagttactaactgtgtgctaggtctatacgtcgttatatgatgagagtgtataaaagacttgtatgtgtgcataaagtaaatgacacagagatttgttaacggggttcggtaacaacctacatccgcgggacctagtccagaaataattccactagaacaagatcgcaaatacaattgcatatgatattacagcataactatgcctaccactcttttctagatggactttggaaacagtatcaagccacgcatgtcttgactaccacccggcagcaccggtgcatcaccgtcttctctaacggctgcaaattccaaaggaataccaccaacagatcatcatctgtatttggtggggcgacgccacaaacaagtgtgtgcatctctctccactataccatagacgcgcaacctttttatgtcacgacagccatctatatatactcaagacaaaaccctaagctccaaatattcttgcaatcttttttctttgatctgaaagtatatgagccaccactaaaggaaacatcacgtctccaatagaatcatgccatgtcatcttcattcctcacttgattctttctgcgttcagttctcctgttgtgttacacagcttccacttgtggaacatcagctctgatactttctgttgatactcttgcgtcacacagatgtttcaatgcctttgttgcagtctgtgcgataggttgcatttatgagattgatgctagcagcttggtcacaagaggagcatcaatatattctcttgatatttcatgtgagcttgattgcttgagtttcaaactaagctaaaaagggggagaatgacgatgctagatcatatgagctacaactcagccatcaagggggagaatgttagtatattgtgatgttactgagttacgtagatatgatagttggaacatcaactcagccatcaaggaggagaatgttagtatgttgtgatgttgctgagttgtgtagctgtgacagttggaaaatggacactcggtcagaatcacaacatatgcagtgacagtttagagaaacattctgagatagtattgaagcttgaagatcatcaaagtacaatcttctaaggtgagcttgagttctaaaacgcagtaacaaagggggagaatgagagtatatttgtaactggttgttagactcaagatgatgacacacagctcaagatatgagatgatacagactacactgcaacaagaacgtgtgagtgaaacatggatgatacagaccgtgctacaacaaaggagttgacacagaatgcaacaagagttatgcagacatcaacaaaggtgttgagcaacagaggtattaagcatcagatattgtaaagatctatgtgattgtgaagccggagtatcaaaagaaagtatcagagttgtgtttcacaggtagcagctgtgtaacatagtaggcgaactgaatgccgaaagaatcaagtgaggaatgaagatgacatggcatgattctattggagacgtgatgtttgctttagtggtggtccagatactttcgaatcaaggcaaaacgattgcgagaatatttggagcctagggttttgtcttgattatatatagatggttgccgtgacataaaaaggttgcgcgtctatgatatagtggagagagatgcacacacttgtgtgtggcgtcgccccaccaaatacagatgatgatctcttggtggtattcctttggaatctgcagccgttagagaagacggtgatgcaccggtgctgccgggtggtagtcaagacatgcgtggcttgatactgtttccaaagtccatctagaaaagagtggtaagcatagttatgctgtaatatcatatgcaattgtatttgcaatcttgttctagtggaattgttctggactaggtcccggggatgtaggttgttaccgaaccccgttaacaaatctctgtgtcatttactttatgcacacgtacaagttctttacacactctcatcattaacgacgtattagatctagttagtaatttcacatataaccttagccattgtacccataaagaatttgatgatagcagtctccaaataagtttaaggcaactaactttgtttgcttcttctagtgagcgaagcccagccctccttcttctttaggtacacaaacatccctccaagaaactttagctttttttgaatttaactcaaggcagaccatagaaaagcagagcatagactgtcaatttctttgatgcaagcactcggtaatctaaaagcagacatccaaaagtttgtaaggctatggatcacagaacttataagttgcaaacgtccggcaaaggagaggtgtcctgccgtccaactatttattcttcctcgaattcgttctatgagaggagcatagtcacttgtcgtcattcttttgcttagtaatggctattgagcaagacctaataaaaagcatccatccgtacaaataaagaaaagaggccgagtgttgtgtgtaagctcaaggtgttgggctgacacattgagaagtctatgaagagcttctagaagaggtgaaggcacacaaatatctcttgtagccgttgaagaggactcacgagtgtctttagcaacaaggtcaaccaatgaccagtcactatcatcaccaagaccaaggaacctcttctcttatgtctctttcagtcttacgttaattgtaaacggccagattctctttctgtgtctttaaagcattgtaaacacacaaaggttataatccaattctatcaacatgatttggtctcatattctctcacatacaaactctcttgttcttcataactctcttaacctttaatacaattccgcatattctttcatggtattagagcgtaagatcatgtctttatgcttataaatcttctactctcattctattcttcattttctcgaaatctcttcatcattctctagcttcatctcttttaaccaacagataatagctttattcatcagtccgtttgtgttcgaatcatggagacttctcaaaaggtgattactacggtgatacttcaagggggaaactacctaacttggtcaagaacaacaaaaacgctgttgtgtggtggtgggctttggagccatgtaatctcatctcaagctccaaaagaagccaaagaagaaggagacgaagaagaaacggagactatatctcccgaggaagaaaaatggttccaagaggatcaagccgtccttgctcttcttcaaaactctcttgaaacctctattctagagagatactcttactgtgagacagcaaaagagttgtgggatacacttaaaaacgtgtatgggaacgaatcgaatttgacccgcgtgtttgaagtgaagaaggcgattaacgaactaagtcaagaagacttagagtttactaaacactttggtaagttcaggtccttatggtctgaacttgagagcttgaggccaggaacgcttgacccgaagattctccacgaaaggcgtgagcaagacaaggtgtttggactccttctcaccttaaatccagggtacaatgatctaattaaacacttgcttagatcggagaagttaccaagtcttgatgaggtatgctctaaaatccaaaaggaacaaggttcaaccggattatttggtggaaaaagtgaactcatcacggctaacaaaggagtgtacaagaatgaagatagaaagatgctgacatgtgaccattgtaagaagaagggtcacaccaaagataagtgttggttattacacccacatctcaagcccgccaagttcaaagactcaagagcccatatctctcaagaagctcatgaggagcaaagtcaatccgggtcatccaagggagagacatccacaatatcatccggagattatgtgaggaagtcggacttggaagctctcatcaagtctatcgtctctcttaaagaatccggtatcaccttcttctcacaaaaacctagtagttcaattgttatagattcgggtgcttctcatcatatgattagtaattctaatcttcttaacaacatagaaccagctctaggacatgttattattgctaatggtgacaaggttccaattgaaggcatagggaatttacgactgtttaataaagattcaaaagctttctttatgcctaagtttacttctaacctcttatccgtaaaaagaacaactaaagacctaaattgctatgctatttttgggcctaatgatgtatattttcaggatattgagacgggaaaagttattggagaaggtggctcaaaaggagaactctatgttcttgaagatgtgttaccaaactcttctagttgtttctcttctaaatcgcatttaggcatttctttcaatgttttgtggcatgctaggctaggtcatccacatactcgagctcttaaacttatgttaccaaatatgtcttttgatcatacaagttgtgaagcttgtattcttggtaaacattgcaaatcggtttttcctaaatctcttactatttatgagaaatgttttgatctagtacattcggatgtttggacttcaccatgtgtttctagagacaacaacaaatattttgtgacttttatagatgagaaatcaaagtacacttggataacactcttaccttcaaaagatagagtgtttgaagctttcactaactttgaaacctatgtcactaatcaatttaatgcaaagattaaagtgtttaggaccgataatggaggagaatacacaagccaaaagtttcgagatcatctagccaaacgtggaataatacaccaaacaagttgcctgtacacaccacaacaaaatggagtggcggagagaaagaaccgacatctcatggaggtggcgcggtcaatgatgtttcatacaagtgttccaaagagattttggggtgatgcggtcttaaccgcgtgctaccttatcaatcgaacaccaactaaagtcttaagtgacttatctcccttcgaggtacttaacaatactaaaccgttcattgatcacttacgagtgtttggttgtgtatgttttgttttgatacccggagaacaaagaagcaagctagatgcgaagagcactaagtgtatgtttcttggctactcaactactcaaaaaggatataaatgctttgatccaaccaagaaccgcacatttatatcccgagatgtcaagtttcttgaaaaccaagactacaacaacaagaaggattgggagaacctaaaagatcttactcattccacctccgatcgtgttgcaactctaaactttctattggatcatttgggcaatgactcaacttcgacaactcaacatcaaccggagatgacacaagatcaagaagacttgaatcaagagaatgaggaggtgtccctacaacatcaagaaaatcttacacacgtgcaagaagatcctccaaacacacaagaacactctgaacatgttcaagaaatccaagatgactcaagtgaagatgaagaacctacacaagttcttccacctccaccacctcttagaaggagtacacgcattcgacgcaagaaggaattcttcaactctaatgcggtagctcatcctttccaagcaacatgttctcttgcccttgtacctctagatcatcaagcgtttctctccaagatttctgagcatcggattcctcaaacatatgaagaggcaatggaagtcaaggaatggagggatgcgatagccgatgagataaacgctatgaaacgaaatcatacttgggatgaagatgacttacctaaaggaaagaaaacagtgagctcaaggtgggtgttcacaatcaagtataagagtaatggagatatcgaaagatataaagctcgcttggtggctcgggggttcacgcaaacatatggctccgactacatggagacttttgctccggtggctaagctccacacggtgagagtggttcttaccttagcaacaaatttatcatggggactatggcaaatggatgtcaaaaatgcatttctccaaggcgaacttgaagatgatgtgtatatgatgcctccacccggtctagaagataccattccatgtgataaagtgttgagactacgcaaagctatctatggtcttaaacaatctccacgtgcatggtaccacaagctcagccgaactcttaaagatcatggattcaagaagtccgagtccgatcacactttgtttacattacaaagtactcaaggtattgtcgttgttctcatctatgttgatgatcttatcatcaccggagacaacaaagacggtatcgactctaccaagacttttcttaaatcttgttttgatattaaagatcttggtgaactcaaatacttcctaggaattgaagtgtgtcgctctaatgctggactctttctatcacaacgcaaatacactcttgacttgttgaatgagacaggttttatggacgctaaaccggctcgcactccacttgaagatggctacaaggtcaatcgaaagggggagaaagaagatgagaagtttggcgatgcacctctctatcacaaacttgtaggtaagttgatctatttgacaaacacaagacctgacatttgttttgctgtaaattaggttagtcaacacatgaaagtcccgatggtgtatcattggaacatgatggagagaatactaaggtatctcaaaggcagctccggacaaggcatatggatgggaaagaactcaagtaccgagatagtgggatattgcgatgcggactatgcgggtgatagaggagatagaagatctacaactggttattgtacgttcattggaggtaaccttgcaacttggaagacaaagaaacagaaggtggtctcatgttcgagtgcagaatcggagtatagagcaatgagaaagctcaccaacgaactcacttggcttaaagctcttcttaaagatcttggcattgaacaacacatgcctatcaccatgcattgtgacaacaaggcagcaatatacatagcctcaaattcggttttccatgagagaaccaagcatattgaagtcgattgtcatatagtccgagagaagatagaagaaggaatgattctaccgtgttatacggacaccaaagacaacttggcggacatctttacaaagggggcaagtctcaaagtttgtgaacacatctacaacaaacttggacttgttgatcttacacgtccttgatgatcttccataatccatggtcattacactctttttcccttaacatagttttctcccatgtggtttttctatgttaaggtttttaatgaggtaatgtatcatgggttccaagcttaacccattcatcataggctaagcttgagggggagtattagtcaagtaacacacatggatcatgggcttagagttaacaagaagaagagaagttgatgagcccattaaccccttctagaagtgcgattagagccgttagaagggagaagagaggagagtcacgggtaggctaaggtttcatcttagccatggtcaagtcactatcactgtagagaaaagtcgtctactctctcttcatgtctctttcattttgttttgtttgttgtaaagggaaccctagtgtctccctatataaaagtcttgttccctacattgtaaccaatctaatctaagtaatatcttcacttcctattcttggctcttctctcctctataaacttcatacttctccatacttctcatactcttttccgcatattctaacatggtatcagagcatgttcttcgattcttaacatgctaaatctcttctacttactctaatctacttactctctacattcttcttaaatctacactttcctcttcaagaaacactctattacccaacggttaaaagagtgtacacatcatggagaacccaaaaccggcgataacgtcggtggtcttgaaaggagagaactatctactatggatgaggacgacaaaaacggtgttatgtggccgagggctttggagccatgttgaaaccaaacatgttcagtttaaggctaccaaagaagacggcgacgaagggttcaagagggaagaagaagaagctgagatcgagaaagaagccaagtggtttcaagaagaccacaacgttctcgctattcttcaacattctcttgagagctccattcttgaggcttactcttattgtgaaacggcacgcgagctatgggagacactcgagaacgtgtatgggaatgtgtcaaacttgactcgagtctttgaagtcaagaaggccattaacgcccttagccaagtcgacggg

SEQ ID NO: 34715 - DNA, 2149 bp, Arabidopsis thaliana landsberg
aaacaatctaaggctgttctcagtttattttcataccgcggagatatgagcactcgatatgaatgacatcgaccaattgcggcaacttgggtaaaatcagtggtacggatccaaggatcatcatcatccaagagatcgccagggacagtatcgtaaatatcatcatcagcagttctgtaccagacacggggtgaagaagccagctgcaaaataagcacaaagccatgcaaggttttatactgcctgactgtttgtatatctctcaccaataactccaacttataatcacaattgatcacagcatgcatcactgcatccttcaaagagaaggcagtgctctttctgaaacaaaacttgcacgtgttgtcaaaaggatccaccaggaaatcaaccccttcagctctccaagaaacaaaaaaatcatcccgagaaaccaatgtcccaatctcaagcgaaacaccagtcaacttataaggtacagtcgttcttcttctttgattaagtgtatatgggttcttaggaccacaagctgaatttaatggctggccaccgaggatgagtttggattgctctacagcatccattaatgatttacgggcctcgcaatggacaaatgcgtgaggcaccactctctcgtaagaatcaaatttggggatgtttgaagtgtctgtgatctcaaaattaggataagacccaggaggagtccaagaagtttttaatctgcatcgccaaacgagtagtcctacttcatcttcaaggtaatctgtgagttcttttgcagtagtggattccccaaatccaccaatggttacttgtgtcacaaccgacttcttcatatttccctctgaccccatttctcctgaaaaagaaacatactaaacagaaataacccccacatgataaggctgataagagaaaatattgaagaaaagccctaattcgctactccgttggaagatctaagaccataaatatcaaattaagagacaatatcgatgattccaactacaaatactattgaaatcgatcacctaatacattgttgattgaataattttggaatcaagcgggaataaatacaaaagcacttacacagtgaggttctggagacttacacagtgagatctttttcaatctaatactggatacgaggtagaaatagaagcaatgcggagactggagagaggattagtgagtatgcgaaaaagggagaacccgccatagctgaaaccatctctcgtttttatttgacttcggcgagtaaacgaaagagagtctgagactgatgagggggaaaatagactggagaagaagtgcttgtgctgctcacgtgctatttgtctaattaatgggcttttaaaatatattcctatttgtttccattattgtacataggcccatttaaacaacctgggccaaaccaaaccgttatcaagaaaatacaatcgagagattcgacattgacacagtaaaggtagcaacagagaacagactgaaggagaagaacaatacacaaatttctggagaaagttttgaagaatgacgacaatttccgatctatcagatgattttgtaggtgatattctttctagggttccatttacatctctaatctcagtgcgatctacttgtaaaaagtggaatgctttatcgaaaaatcagatctttggtagaaaaacagcagcaaggaatcagtttctagagttcatgattctagattctagagtttgttccttgagattagatcttcaaggaatccgtaacgaagacaaagaagacttcgttgatccatctatgaagctaataagtatacctagtaatgatgatcaagtcgagatatctcaagtctatcattgcgatggcttattgttatgcatcgccaaagagaactcgagtgtctttgtgtggaatccgtatttggggcaaacgaaatggattcgaccaagaaacacattccacagatatgacaggtttgctcttggatacgacaacaaccgtaaccacaaaatcttgaggtttctctatgatgaagagagcaacgaaagcagtcgaagaactcacattgatgtatacgattttagctctaattcatggagggttcttgatgtcaatcctgactgtgatacaccgttttatcagaacggagtgt

SEQ ID NO: 34716 - DNA, 2924 bp, Arabidopsis thaliana landsberg
ccagatgtgtgctttgtcgcccaaggagaatggaaacaaccaaatcttgaatccgtcttcactaacaccggttattttcgttaggttgcagagcctatcaaattcatccaagtggtcgagtggatcttccataggcagaccataaaacttgttcctctgaatcatcgagatgagatcactcttaatcacgaagatgttgttctggatagcaggaggtgcaattcctttcctctaacggtgatctcgtggtgcatctccagcaccaatgttcgcgggtccattttgttgattttattcatctgccattttgagtggttgctggtgtacaaggttaactgtctttctcctttcccgtagttcgcgagctatacggtcgatgttatcgttgaaaagaaggttctggttgtcggttgatcgagtttgcatacagcagaagtgtacatggatcaggaagacaacaagaaaaacacaaattagtacatgaaataaaaattaaaaaagaacttgatctaagcaagtctgaaatcttaaatgtacaaacaaacacccaattggcaactgcgccaaattgataataggtttttaggtcaattaatcctaaagcactatcatgtcgttgtactactttttggttgtcaatcgaaatgggtgtgatgctagcaatcaagatgcaatcagaactcgcagagtcaagccaagcaataacaggttttggggtttctagcagtcgtaagtgatcatgcagaaaacataaattcaaacagaaacagcaaaacactcgaccaacacagcttgttgcaaagcactgggtgtggtcgagtcagaggtcgagtaaacagcagagacagtaacaaagatactcgactgcacggtctgttaccagacaacagggcgtggtcgagtatacgaatgataacaagtatgaattgcaaaagctaagcaacaggtgataagaagcagtaaacgatagcacaataaactaagaaatcaattgggtgaaaaattccccaggatgggataattgagtagttagtttcctcagtctacatgtgactggcatgctcaataaactatccctagacaacaagttttataaccaagtctaagtaccgccgcaaaagagactctcaagttaaactagtcccagactcaatcacaattgacgagagctaacctaacgtgcattacgaatcaaaaagttaaagccaaaacgctccatgtaaccaataccttggtacatagccacaaatctctggaattagtggttcagacatttcatctaacaccttttgggtgcggaaatggctgggctcaaattccagttgatcagaaagcaataagcattaagaacaactaatgtagaagggatctataaatcaaactcaaccacctagcatactgagaattctaaactactctaacccatcctcagaaacctagtcactaatcagacatcattgtagaaagaataaacgatgataagaatgaaaacatgatagcaacagagtaatatcaagatgataacatgatgaacaacttagtaaacgaaatgaaaagcaaatactgaatagattaagagaaattcggattacaaaatgtcaagaacacacagttgtctgccgaattcaaacttttttggaaaatgtaaagtacatgctacttatagcaaaatattctgaaaccttaataatcaaaacgacacagtattgggacagattaagaatgttactcgacccatgtggtcgagtgattggtcgagtgaatagataaagagaaatctggattacaaaaggtctagaacacagtatctgcggaataaaactagataaaaatttagattcaaacttgttctcgaaaatgtaaagtacatgctacttatagcaaaatattccgaaaccctagtactcaaaacgacacagtattgggacagattaagaatgttactcgacccatgtggtcgagtgattggtcgagtgaatgatgatggtgggacacgtccatgatagttgagtgattggtcgagtgaatgatgatggtgggactcggccatgttggtagagtgattggtcgagtgaacgatgattgtgggactcgacctgtaggaagagtgattggtcgagtgaacgattattgtgggactcggccatgttggtagagtgattggtcgagtgaatgatgatggtgatactcgacctcttggtagagtgattggtccagtgaatgatgattgtgggactcggccacgttggtagagtgattggtcgagtgctgtgatcgagtgatggtcaggtggtggaggtgaacacacacgcgcaggtggtcgcgttatgtgatcgagtgaaatgatcgagtgaaggtgatggtggtactcgaccacggggtcgagtggtgatgtgaagttatgggttcgtctacttgaccaggggtcaagtggtttgttgtcgtggaaccatctagtcgaccagggggtcgagtgttttgaagtgatcaagtccgcttcttccaattagctcaccaattagctcaccaatagctccaaatcacctgaaaacaacacaaatatgcaacattcatgcaacactatcctaaacatgcaaagtgatgacaaatgatgacaaatgatataaaacagtgatgatatgatgttaaagtgatgacaaatggatgctcaaaataggtaaaatgcacacttatcaaaacaccaaacttagtctttgcttgccctcaagcaaacaattaagaacaagctggaggtgaggtttgaaaccggggactcagagccaaaacaccagataaataagatgaaatgagtgtccaagttgatagttctaagctgcgatacgatggaattctactcaaaaacgttagtcaagccttgttatcaatcaatccgactcttatgctcaacctacacatgttttcaa

SEQ ID NO: 34717 - DNA, 749 bp, Arabidopsis thaliana landsberg
tggctgacggtgcgacgcgcagccgttcgccgtcgcgttggcatagccgttgagcggcagcagcgcgatcagtagccagaggacgatggcggacacggatttcaccgccgcagtatcgcggcgcgacttcgtgccgacaagctggagccgggtccaggcttgctcaggtccggtactgcggacagctgacgagatgatcgttgacgacaccaaccgcctgcaggtacgcgtaaacgatggtgctgccgacgaacttgaagccgcgcttgagcaggtccttgctgatacggtcggacagctcggtctttgccggcacgtcgcccattttgcgcaccttgttgatcagcggtttgtcggcaacgaagctccagagataggcgtcgaagctgccgaattccttctgcaccttgaggaacgcgatcgcattggttcgcgccgaccagatcttcaggcgattgcggacgatgcccggatcgagcatcagcttttccagctttgcgtccgaaaagcgcgcgaccttttgcggatcgaaatcggcgaacgcctttcgatagccggcgcgcttgttcaggatcgtcagccacgacaagccggcttgggcgccctccaggatcaggaactcgaacagtacgcgatcatggtgctgcgggttgccccattcctcgtcggggtagctaatgtaatcggacgtggaaagacaccagctgcagcgtttctcggcggacatgcggatcgggattgtcgggcgg

SEQ ID NO: 34718 - DNA, 3350 bp, Arabidopsis thaliana landsberg
cacgattaagcaaaaatatatattaaatgtgactgaatgaaagtcgttgtataactccaaaataatgaagcttccttatatatcattaaaaacacatgtaacgacaatctctcttggtgtttgactttgaaggtgttcttgttttacgtcacgatgcatcagcaatcacattattgtactttgataatattgttaagtattaacaatataataggttccaccttccacgcattatgatcagtaaatcacattgtagattattattactttgataaatatttaaatcgaatatgtagtagctagaaacctttttttaacataccatcttttttcgttgatagtattgcgctgacgcttattttgctacttgatggcgatgcaccatctatctgtaaatagatttttagcatatttaaaatactaaggtttagcccgggctacgtttggtacttatttggcgataattaattttaagctagttgaattagttttatttttaaaattcatcaaacctaactccactacggtgatacatgacttcatttttgttacattatgaagttgatcagggtatctttatcgaacactgtagacattaaaacaagtataaaaacagatacatgtatattttcttggtacatacaatttcggcatttcctccaactgtaaaataagcaaagataagtgacacatgtttacactttacatagtcctcaccacagccatcatctaactctctttgcttccaccaccacctccgcttctccctctgaacgtcggttgcgagttgcgaccacctcaggtccgtctctcacccatggaaacatgggcatctgcctacggtccacaaattaaaaggtccaaaatttgtttgttttttagttgttggagttggaaaaaaacaatagaagagccctttatatgttgaagataaaaggccccaaaaattattaacttaacataacaggcccataaaacaattaacctagttaactagtttaaagaattcaatccgaatcttccttattgtcctcctttagtttttgagactcactcagatcatgatcaaaatcacaagctctctaattttcttcggtcgtaaagctcattaaagcctagacatgtatatcttaaaagctcctaaacaaatagatctaaattttccaagagtttaattataatttagttcctagaatgtttaatccttgggtcttagtgtcttacaaagatctaatactattttaggttaaatttgaagcatctttattttatttttcgtttttgtaatccattatctatttttctattcgaagtctgaattactaatgagcaaaaacatgtctttgagtcaaaagaagtaacagcattacacatttaggccaaccataagatctcttaagatctacaagacattcaaagtcaccacaatgaaaaagaaagcaaatagttcacataaataaagagtttctgaaaatttgaatccttggttcttacacgaaccttattacatttttggttcaattgaaacatttaagacaaacatatgatcttcttacagatctactacacaacaaagtcaccataatagagaaggaaaccacacagttcacattaataaaagtacagaaatgcaaaccttgtatgttcttcaacgaggattagagaacgatgactcggcaagaggtcgagcatcttggaattgtaatgagttctctgaggatgacacaagatttctttctagaagaatgatccaatgataaagtgagtttcttgaggattggtgagttctcaagtaagtatctcactaattccatcttccccttgtcccatgcaaattctatcttaacatactcgagagatgataggagacaccgaggttcagataagatactagttctctcctttgtataataatcagattcctgatattacaaccaagtgaacgaaacaagttggagtaattatgatactttccccatttgcattgttataccaaagaaagtacttaagttttaagtaaacttaccacgacaagagatttcacattcgggcagctctcaagaaaaaatggcaatatttcccatctgtcctgatagaattcaacacgcagcaaagatatgtcacgaaataagggaaccggttcacatcttgagtaatcataaaagatctacaacaaccaccaaaaacaagaaaagtatcaggataaataaacttatagaggataaagtaaaacaataaatatagcaaattcaacaaacgttacctcaagagtagatgcagcgagcgatggtcatatttttgacacgagagatggcgacaagaaaatgaagaatcatttttctctttgacagatcataaggattaaactttttccccacacaaaagttaaactcaaccttgatatttgcctctacaagggaactcgatttctttattatgaaacttgaagttacttgatgagagagcttgaggatctcaagctttggggcatcaatagtaaccactagatctttaaaatgaagatcacgggaactagggccattatagttgaagctcaatagagactgagatctcacacgtaatacttttacattgtcattgggacgtctgcataaagttaagctttcgagaactaggcagcctgagataagcatttccagagccaaatcatttgcaaacttaacccattctagaacgataactttgacacacggtaaagacgtaagctcaagatttggcaaggttacgccacaaagctttaaagacaccaaactgttacacaagtataggattggaggtatctctactgcaccccacgtaagatcgagattgtgaactttccgcttaacaacatcgttgatccaccgcgcaatatgagcattttcactcacctcatccccattaatattgcaaaagaatcttaacttaaactttttcaagtacaagtcactgtgaaaactcatgaacctatcgataaaactcacaaaagtattgttttccgtgaaatcacgactgtctaagtctaatccaggtactaacctccaaagatttctccatttgctagacaagacactagtcttaacaacatcttttgtcggaagattcaagagaatatgacaaaacaaagattctggcaaatctcttagccaatcaacttcgtcatcagattgtttggcacggacacgttcctctccgtcgtgatccatgtgccttcgctattgcgaagaagcggtaacaagtaggtgaaaaccaaaggatgtaggattaaacccaaacctatcaataccactttaacgtctttgtcagagataaccgagtaacagaccaccgttaacttttaaaattatctt

SEQ ID NO: 34719 - DNA, 1409 bp, Arabidopsis thaliana landsberg
gtggtttgggtaattgggtatttgggtataaggtaataggaaggttgaaacctaagcccttggttcccgaaggtggagaaaggtggggacggcggtggcgaaggtggtggtagtggacctggtggtggtggtggtggaggagaaggtggtggaggaggaggtggtggaggcggtggtggaggagtaggagatggatatggatatggccgtggatggggtggtggatatggaggagtaggcggaggaggatggggatggggaggagatagcaacggaggagtatggggtcctggaaacggcggtggttgttggtttcccggttgtgaatataaaaagtcaacgaaaggtcaacactgatcaacatgtttaaagaccgttttacatttatctatactacgttggttttcaatatggattctttctttacttattgaggtgcttataattggacatccatttaaaacaaaatgaatagtaataataatacttccattttctcttctttttttttgtttttttaaaaaatgttaatatttcattagaaaataaaaaaagttaggaattacaagaatgtaaaacctatagtttggtcccatggcaaaaaagactaaaaacatgggagcaaatatcaatcggtccatcgacatcaacaaaaatagttaagcttttggaatcaatgaagcgatacaacaattttgatgaatcgcatataatacacctcaaagagaaagataatgctgttgaacggcaaaggtcgaatcaatgaaaacttccattttctcttgttacaatatttctctaatttgagaaagacacaagttatgaagcatagaattgatgtgtgtcagcgtgtggagttgatggtatgttaacacaatgttttgatatatcatttatgtaggaccgcaaagaggggagatgctcgtaacgttaggttagagttgtgttaagtaaagagaagttggaaagtaggaggatcaaattaattaaaacttggattttataaagacgtagatttagtcctaattactaacaagattgagatcgaggattcttgtgccttgtcttggtcctaattacttacatgctatgatgtggtttcattttcaaattccatctaatgtggtgaaaacaaaattattaccaacaaggttccattgtgaatacaagaacacatgaaaatatctacaaaagttggtgtacaccaactctccaagctttcacaaaaataaactcatgaatattgaactttgtattggccttcttgtatatattggatttttttaacataaaaatccaccttttgtaatattgcattttattatctaaaaacgatcaactagcaacggaaataaatccactgaccactgctaatatattttagcgacggatccgaaagtttacagcga

SEQ ID NO: 34720 - DNA, 3864 bp, Arabidopsis thaliana landsberg
caaacatcatagtcaaaaaaaagtctggctgactagaccgagaccgaaactcatgcatgagcaacagttagagaatggagatcacaatcaagcagatgctcatgggaagaacgaacatcgcacgtgaagtcgggacaaaatgtgaccgatggatacttatcttagcccaggatcaagattactaacatacagtaagaagtaggtcgtgattatagtaggcttattaactcggcccttgttaagtaaggctcaacctcaagcggacaacataatacttaagtagcaattgacatacccaatcaataacatcaccttgttgtgtttgactgttttcactgtctagaaaggcgttactattcaaaacctaagttcaacctttccggtttgatcaacgaagtggatggtggactagtgggttttgaaagtgaaaactcaagtttattagttcaactccatatagaagaggggtgatttacgctttaaacgtgatattatcgaccagagctccagaacttccaatatataagattgcgtcattgcattttaggttaatgtctatgaaatgcagaccatcttgcttttatcatttttgtgctttcttaagtagatactttggcttattcatgttacactctttttttctctgtatttggtgacaacttctatacaaaacaagttgtaagtaagcacagttttccttagctatattaattaccaccaaacaaaacttagattttatcaatatatacatttgtaactcatacaatatatataccaaaaacgaaatgaagaaaaaatcttaagataaaagtctactagatttgtaaaagttgaaacgaaagagaataaatattattcccctacaatttaactggttatgatctttttcttttgttctagcttgtttagtcattgttaagtctactccttgaattgtcttctgaatctcttcctcaaaatgtcaccaaatattagcatcctataaataggtagagctgataattatacattttccaatggccaaaacaacatagtaaaatttcaagagattatatagaatggaacacaagatgacatgaatctgaagctctggccacactagccaactcgttgagcatctcacgtctcttttcgagattttccagatcaatgcgttttgtggagaaagttgctttcttcaacagtcttgcgttttctagtatgtatgtggcaacttctttctcatcacctcgttgccattcatatcctatccacaagaatgtctcaagatggaacaacaaacattccggtgcacattttggtggattccattttcgttcgtccggatttgttttgttgtcatgcagatatacctgggaacaatgcagtttatgtcatctaaatcaacaaattacctgaaagtggagttgtggaaacaaacaactagtgaaactgcttacatccgtgagcttgaggatttgtagtttaggagaactatcgagcatgatcgaaagcagattccaccactctctttcgtatgtaagtagctctagacaaactagttgatcgaagattttaccagtaggaaatttaacctaggtacatttccacaaaacagtgtaacattgttacatacattttagatacacaaaaacagtgttagcccaatttgcagagaaaataaccaagcgaaaatgttcaatcttaagcttacctcaaggggtgataagtgtaagataagacgtttggctgaagttagagactccataatgttctcattggttataccagaaacgttactgatttttgcctccactaactctagtgccttgtcaatcaaacaagactcaatatcaataaccccgttgatgttcaagtatttcaaagcaggggcatttatcacatagcttccatttccataacctccttcttgtctaagatcttctatggtcaatctctgtaatgacggcgacgcaattgtgaaagtcgccacatcggcattgctatatctatgcacgaccaaatcttgaagactagggcagccacataaaaggttgcaaacagattcttcgtctttgaaatgtacttggtcaaggtacagctttctaagagacttcaaacaaacccgagaaggaaagtctaaatctatagcacacttgagtttcaagatctcaagtgaatcattatagctaaacaaaacactaggaagcgtgacagtttgctcctcttgatagaaactatccaataccaatttacgcacaccgcgagcaaatgctgttgcaatccatattccaacatgcaaacaatctgttctaccttcaaatgacaaatgcaaactctctagaaccggagctttatgtaaagacaaagtcttgtaaacattctctgaaaacatagtgggatctatgttatcatcatcaaacacaggattgaaattggaatcaaacttgagttttggcaacatagtccaaagagatctccaacgtctagacaaaacactcgtggctatggcgttttctgtcggaagtgaagacaatatatgtagaagcaaagcatcaggcaagtcactgattctgtcctcattcatagcatcggttttactgtcaaaaatcaaacgaaaaaaaaaaagttagggttcaaaagagttagggttggatctttataacagctaagaaaaacataaacgaaccaaagatacttacaatttctgttccattgaaattaatagaggtaaaaattcgctaagaaactttcagattttttttgcataaggaacagctccaaacaagaacccggctaaagctaagcaatgatggaatcactttgggcaaaattcagggttttgtgaataatgggtaacagggtaatctgcatgaagaagaaagatgttgttatcagaagtggaggagattgatccagaagcaagagaatgaatcgttcacagaggaagttaattaatgttgaagagaatttgcatcgaagagctttgtctatggctattcatcaagctcaggtgtctcagagatttgatggatccatgtctactagcgacatacatacataatctgaagaagaaagaggacgaaaagtgaagtcgaaatgaacgagaccgatggttaagaatcgaatctaatcccaacaacacattcacaagcaaaacgaaaaagaagtctttctttaaatgggcttttttattcggccctttataagtgaggcccaatcgtacaaagaaaaaagtattatagaataaatattaatcgaccggttaatctaattaatcaaatggttaggcctaactatgtttgaaatttcatttacccgatttaatcaattcaatcaaaatcaaaatgttcttccttctcagtactgttcaaattaaaacttaaaatgtctgcatttcccgcacattaataattcaatttcaaaccctaaaaattcgaaaattcccccaatggcatcggaaaagccagaagatccgatgaacaacaccgccggaataggaacagacgaggaatctatagcgcaacggcggaagcggctaagacgagtgagcttcgccgaccgggaaattacttccgttcacattttcaaccgggacgaagattacgagacgccgcccaatacctccgccgcgaaaccccaaaacggtggtgatacatcagagcctgatgaggataataaagtaattaggtttttcggtgaattatctgaccgcgaagatactgacggagatggtgatggtgaatacgaacctatcttggataaatcattcttgaggccgaaatattctccatcttcaggaggtagcacttgttgttccgctacaagtgataacggtacgcttcaattgctctgtgaatttaaggtttggtctttgattttgag

SEQ ID NO: 34721 - DNA, 3089 bp, Arabidopsis thaliana landsberg
tcgaacctgtgtggaaatgaaacaagtgggactagcccacgtggtttctttcctcatacagaaaggagaaataatctattctctgcattgaaatgtttttgttttttttgtaaagttcacatcaaacctactaataattgagaagaaaaataaaatctattgattgattaaaccagccgatgctttatgtctgaatataaaaaagaagtgaaaaccccgtttaagaattacaacggtggtttacaaagtatttggacacaataaatccaaacgaaataaaacaaaatggagaactaccaaataaaaaacaaataaaaaacttaaaagaatttattcttttttttccgtagaatttattcttttatggattccttaaatccatatttgatgcattttgattcctcataataggtaataatatatactatgtatatagatatgtttctaatttcgtattaacctacctttttttggtcgtacgattctacctaataatattgaacggaattgatgttttggaccacttagaaagtattttttttttggtttgtctaagctgtatttcattaaatataaatttaaataaaaaatgtcataaataaaatttgacgtatagattttttaaatccattttatgttatttaatatttgaaatgtgagtttggctcctatttaattttaggctccaaatggtgattgtgttttgcggtgcgggaaaagtgcggtgcggttcaaatagtaacgaaaatacatagatacatatatatatgtaaagattttgatactattatagcactgttgcggtgcgattttaggtgcggttttggttaccattcacagccttaggatggattaatactaagttttccttaatgaattatcttaaagaaactggattaaataaactaaaaaattgatcaatgtgttttggtccggtccaatatctttggatttactattattggcgaaaagaaagtctcatatagtaaatcatattcctacaaaagaaaatcaaaaatttttgaattaacatggattgaatagtttcttatataaccaattagttcgcatcaagaaaaccaaaccccaattaataatcaaacgggcttggtaggaatatttcattgcagctttcagataaaagaaaaaaacacacacccaagtcttatatttcatctttcttacttgcaggaactcaatttccactttgccacttttctttacaaataaacacaaattgtcaatgaaacgaaatagtctttttatgcaaacacagtttgtcttttttcgatcacgtttctgattgtgacagccatccatatatatagggaatgtaaagcagcaacatgtgaagtcacatatacgtaatggtttagcatagcttctattttcgttgtcaatattagtcattccaaaacatttttaagaaaaataaattaatatatgtatattcttggaactaatgtatgtggaaatacagtaacttaattattaaacattctaaatgcaaatatgcaaagaaaaaaaagaaaagaacacaactgaaatcaaagccagattcataataattggctacatggttgtagaatgtagggtaacacaacatccagaattgaacactcaaattggatgatagatggataatctttagatacaagagaattggttctcttccattattaacgaaaataaagaaaaaaagtttagcataaaagtttgaaactcaacataacattttgaacttgactccttcataggagtgacatgaactgacgaatcacaaccgattacttgtttgagtcatcttccgctttctccaccttcgaaatgaatgtgaccggtttcttcgggtgctcatttacggtcaagtgtaaaacatctggtctcgagtaatgtccaaccgaatcgaagtacaacttagctcttgctacatcaccaagatcttgatgacaaaaataaaatatgattagctaaaaaaattatccttttctatagcctaagataaaaactaaagaagattatatatatttgttaccaagatcaagctgtgatgagaccctctgattcaaagtttggtcccgcaagaacctgtcccaaaggtgaaataataacacttccaccttgggaaacaatagagtcaggctctttgtcgtcgtaccaatcggtaaacaagtagtcaggatgttcagggaactctctacgcttgcagaactggcaagccgacaatacgaaacatccaccttctaccgcaatgtgaatcatcgatgcttgccattccaacgaataatcagcagtaggtgcacaataaatctcaatgcctaaacaccaaaaacgaaaaataaataaaaaactttgtaagatttttttattaaagccggatatgtcaagctacattgcattgcattaaaagctgacctttggcgtacaatgcagttctgtagaggggcatcctattctcccagcaaatagcagcaccgagttttccaatgggagtgtcgtaaacggggatggttgatccgtccccttggccccaaatgcaacgttccaaacttgtgggcatgagtttacggtgcttacctaagaactgaccttgtggactaaagaaaagaactgtgcaatagagtgtatacccttccttctctatggctcccattaccaagtacacatggtttttcctagccacgtcagccaatcttgctacttcagggcctgaagattcatcacaaaaaccaaaaagagtcattttgtgttccaagatattgagagtgctcaactaaatttaaactagagcaagaacactcattaattagatgcttgttccaattaaatttcatctaaacgtgacaaaaaaaaaagagactcgaaatcaaacatattttccctcaaagttaagtttactttgttccaaataaaattcaattgtccaaaacttatacacatcaccaagactccaaccatagccaactaaaaatcataatccagcaaccaaataaaggagaaataaaaaaatctttaattaatgagatttaatattatattttttgaggtaaaaattataacatttaatgtaacatatagtaatttataca

SEQ ID NO: 34722 - DNA, 1098 bp, Arabidopsis thaliana landsberg
aacacttagacagttctacttgtaaatgagtgcctcttaagctctcttttcttttattctcttagtaaataagattacgcattttaataaagagcatctcatcttcataatgaagtttgaaattgtactttggtaatctcttatagtgagtttcacatatgatcattatattgtgcgttagaatccttgtaagtcatggtccaattcactttaatgagccatatttgttaacagggtgtgttaataaagtgatactaacttcgaacatatacagaaaaaatatacatttgggcctttaaacctatatggccggttagattaataaagcatcttacggcagctcaacatgtacatccactaaccttgcattattaagaagatcaaaacaagaaaaaaaaacaagttgaaattatcaaataaagaaaaatcttacatttatatagcggctcttaccgatttcaaattttgtcaagtctttaagtgttgtatgattagtgatgtatatataagaaaatgtaactattattatgcaagtacactgtttatttttccactattaatttaattcaaactattctacatatcgatttaatttccacgtcagaacgaatcggaaccttcgtattgttgtgaatgtatgttgtggacggcttcaccaaattctcccagtcaacacgaaaaggccaaaagggctaatgagctaacatgtaatatatggtccatgtttaagatacagaccaaagatagcctgtaacattaatgatgatacatatatacaacgacttttaataaaactgaaaataatatcctccttatatatattatcactaggcatttacattttaaaaatttattttccttttgtgggggtgaagaattgacagagtgactgtgagtgatggaagttgaaggcgatgcatggcggcaaacctcaagctgacggcaaatggtcgattggtttctgcgattgctccaactacaatttattcttcattttcaataaacttggaattgtatagatcttctcaaagttaaaaacaatgtaaatgtgatccaacatccatagtatctcacttagacattattagttttatgcta

SEQ ID NO: 34723 - DNA, 3444 bp, Arabidopsis thaliana landsberg
agaaaggagatgcttttcacaagttcaataactttataactttggtggaaaaggaatctggagagaagattcaagccttcagaatagacagaggaggagagtttgtatctggagagttcaattctttttgtgaagagacagggataagaaggcatctcattggtccatataccccacagcagaacatcgtagtagagagacgtaacaggaccttattggagatggagagaagcatacttaaacacatgcatatgccgaatttcttatggggggaagtcataagacattctacctatcttttaaacagaatcgcaacaagagttcttacgtacataaccaccccacatgaatgctttcgagagaagaaaccattcgttgatcacatacggatttttggttgtacggcatatgcaaagatagataagcaacacttgaggaaactagatgatagatctcggatacttattcatctaggaacagagccgggatcaaaagcttatagactactcgacccacaagaaaagaaagtagtagtcagccgtgatgtaatctttgatgagacaaagggctggaattggacaagagagaactcaacacaagacggtgatggaagcttcaaggtcatgattgaagatttcgggactcatagacttcaagagacataagataatactgaaatagaccaaaatttagaagagaaaaaccagaatgatgagtccgattctgaaacaagtcatgaagtaatacaagaaacaacaaaatcaagtgaaagtgttcctgctttaccagcattgagaagaacaacaaggcaggttagtaaaccaaaatatcttgaggactatgttttgcttacggaagaggaaggtgagatgttactcttagctttaaagaatgagccttgaagtttctatgaagcaaaagaacaaaaggaatggatatgtgcttgtgaggaagaaatcaactctagtgaaaggctaggaacatggaatctcgtggatttgccaattggagtgaaaccgattggactgaagtgggtattcaaactcaaaagaaactctgatggaagcataaacaattacaaggctcgtcttgttgctaaagggtatgtacaaaagtatggagttgatttcgaagaagtctttgcctaattgtttggtcattgttagacctaagttatgttcttttagcttttgttacacattttgagagaagaatccaatccctttagagaggattctgaactactttgctattattcttaattaatcaatgaaaactatgcagattatgatttttgtttatattgtcatgtctgagtaatcaccttgttcggtttagggagtctcaatagggatttagatggattagtagatcgaaaaccccttaggattattcttagagttcttcatcttgattattctttttgctagttttagattgattacctagaacttgatattagataataggtatgcttgccataggtacttgttatttgaactatcatagatgagcctaggcatttaagaaagaacatgtaggctcatagaagggctctggtttagatactaggtaaactaatcaagctcattaacaatgcatactttagcataggatttctcggcttctctggttatcttagctttaagtatagagagtttcgcggaacgccaccggttactctataatcatagtctgagttcgagaacggtgcaataacaatcctaatattagctagatctacaatttatctatctcccgagacaattccttagacccgacgctttaatcacttgaatctacaactcatttacttgcttatttgtcttcaatattcaattactttatttagcttatcaaacaacatcataagtctattgtgtgaacatcgagaacttagtggaatacgacccttaagtgctaacggcgatctcttatttgagggagtaagcttaaggcaatttgagctatatcagtctgtgatagtgacttttgaaagtatttctttgaaccgacctagataggcgttcagtggttcgccgttctcctgagtcatgctccaaagatcagaactagaggctccgggctgaatacacacttggtaatgctttaagaaggcagttgacaactaggtgaagttgtcaatggagtttgcctcctacctggagaaccaggtcaaagctttcccgacgagaccttcaacgaagagttggtagcaaccgatgtccctctgctcaactgagaagtgagctttggcgactgttgtcatgaaggaggtcatgaatgacttgaggaactctcgtgcgcgtaattcgatcagtgaaagaagtcttatgagtttcttcaatcattcgatcaatctctaaagccgaactgacgaccttatggacctatgatccgatctctcgaagtttcagatagatatcgtctatctgcccgtcatggtccaaagctgctggcataaaaatgtgaccggatgacatcaggggcggcatagatggtctgccgtcctgattggcgggatggtgcgatcctgggaacctagagttgaccatgttggactgtgcgtccgtgaagtcaacgctaagaccgcgcggttggatcgttcttggcggtgttgcttcagagttcggacgtggcgtgattccttttgctaactcgtcgagccggcggttagtctctgcgacagatcttttgtcacggtcgcgaggatggctttgaggtcttccaaggataaggacaatggagcgacggctggggcgataggattcgcttctcgaggtaattgatcttcaaccgtcttggcagctaattctgccacggagggaggatctcctccggtaaggaggctagatttcgtatcgtcaccgttaaatggaaggatgacgggatcgatgatcgtttgaaccatgttttcttgcgagagcgtagagaaaatttgtttataatcccctacaaggcacgccaattgttgattttgtaaatcaaacaatgaatttatactaaggagttagataaattcacttctctcttagctctaaagtaaccaaagactagatgaaaagaagaacatggttgcttaagaacgaaggtagggcttttgcttcagaacaatgtaagaaaaatagggtttctatattaagttgcagatgatttgaatagaggacaaatccctctatttatacaatatttagacagtttaaggatatgctaaacttttaattatctaaagattgaattttcattccttccatttttcgtgagatcctccttttttaaatggaagtcttctctttttcgatttattcacaatctctctggtttaagtcggtattgtcgaatgtgttaattcatgcaccaacataaaccaccggttccactggtctcattcatagtctaagacttgattattctgagatgttagttatgcttacccaccgaatc

SEQ ID NO: 34724 - DNA, 987 bp, Arabidopsis thaliana landsberg
ctatacatcttcttgtaaatatatacatatacatttttgactaaacttttttaacatttagatgatagatttcaatttttaacttataaaataaaacaaacctatgtttactatacatcattccttttaattatattcatatacattttggtttaaacttttttaacatttagatgatagatttcaacattaaacttataaaataaaacaatattttgtttcaattttttttaactatactctatcttaaaataaatttatttgattagtgttattaatatgtgattcgaaccataaaacatatatgagataaacatcatgttcaatattattaaacaagactattgtgaagggtaaaagctaaatagatagctcactgattatgtgcaacaacgagagcatgatgtggactgttaacaacaaaatatgaatgtgttgaaaaaatgtgggagatttgcaacactaccctttatttactatccttatgtaacaataccctttgatgtagcctatcctgaaaaatacccctgtccttgaacaaaataaccaagttaccctcatctaataggaacatgtaatagaaaactgaaattttcccgcaaaaaaaatattccgccaaacttttttcccgccaaaaaaaaatttcccgccattttttttttttaacaaatttttcctcagccaaaacaaatgcttttaaaaatccttgtaaattttttttgtcaagaaatagatttacaacggattttaaaaggattttaaagggttttaaaatatttacaagggattttaaaagggttttaaactatttacaagggattttaaaaggttttaaaaagatttacaacagcttttaaagggtcttcttgtaaatccttgaaaaatcttttaaaaacccttgtacattttttaaaacctttaaaagacttttggaaatcttttaaaacttttttaaaacacttttaaacactttaaaatatttaaaaa

SEQ ID NO: 34725 - DNA, 2287 bp, Arabidopsis thaliana landsberg
gtgttcgctcttcttctgttcttcgtgtgaacgcacaaaatggggtgttaaataaggttaaacggaccttctatttccttttatctctcaatcatgttgggccttaattattatcaatgaaaagacccatgaaagcgcccaaatcatttgaaaggcctttgtcattttctcagcagtcagcacccatcaaactccacaaggttcccttactttcttacatgaagcatctatattacattttaggcaatgaagaggaaagagaatctaaactatggacagtgatattcttaggctacaaacaggagcattagccaaagaatatcactatgtctctaaagtttttaagagagacttttgcacaaaatgatttgattagtaaaaactgattacttgacatcagagttttagacttttagtctaagagaatcaccataaatcccccaagagaaagaaatgaatcttattaatgttttttcttttgtttcataccaatcgttacacataacttattgctatgctatgaaatcgaagcgaattaagaaagatcatttgagaaaacatgataatataatatcaaaagattcaaacagcaaacttggacttgagtttgttcacagtaacatcatcagtcctaaacgttttggtcaaaacagcatttggaatggtagggtttgagccaaacagagtactaggcagaacagccgatcctggaagctgactgttgaaagaggttatcaaacgcgctttcactttaccaacattccattggaaatgaaccaatcctctagggacaacaaacatctctccggcattcaaaaccttcgagaacagagtgttgttagtagtcaagaacccgacaaaaaccgagccttcgatcacaactcctgcttcggttgcacgcggatgcgagtgaggaggatttacaccgcctggagcgaattcaacgttgttcatcgagagtcctaaagtgtttagacccggaaaagttaggacattggcgggggaaacggctacgccgttaggggtcgaggtgtttaaaggaccacctaagccggagaagaagaagtcagaagcggagacggatgatttgcaagggaagccattgatggaaggagaagctttgagatcgccgacgcagaagtcttgtaaaggatcagaatcagatgagagagatgggattacaaagacacagatcacaagaagaaaagatctgaaaagagaagaagagatttggagagtagtcatggctattgatgagaaatataaaacagagcatcctctgttttgtagatatatagtggtttgtgttggtctttggcaaagtttcttttgacttcttctatttttttagtctaaaaaataattggagattagttgaggtaagcaaatggacctgaaaatattgtttgtttattacttatggttcaagtttgatgctctgtctaacacgataactatgttttctaaaacttcttattgattttgtcgtaagaagcaatctgaagaacatttcaaagttaatggttaaaatgtcttttgttaaacagagaagatttcttacttagtcataagttacatcatacatattgacttcaagacttaagctaatgatgtcttttaagaaaaatgagaaattagaaatctttttggtatgttaattggtgaatctttggtcgataatgtacgattttccatgataaaattagttggtaatattggctgggtcaagtctttatgggtttgttaaagtgggattttcataaatactatttttaattactaacaataattacttggcacagggtttttagtttcattcaatgaatcatcaaagaaagattcaaccaagttctataagaaaagattcaagattgagtttgaagtaagtgataagttagaaaaaatgttttttgcttgttctgtaataaaactgtcagtatcagttacatacagattagaacaaggatgttgttttgatttcttaagtaaaacagattcatgattctgttggcatttcaatgaaactacgaagcatatgcagattctgagatatctgcaatagaattgcttctccttcactaacatctaaaacatctgaaatttgctgcaataaatcaccatttgattgaagagtacttagtctctctgtgatctctgaaagctcttttactatcccttctttgctttcactccctgcccaatttcataacaacaacacaagattaaaaagggtttttaggatcagattaaacaacacataatgatcaaactttgagtaaagaatcat

SEQ ID NO: 34726 - DNA, 2437 bp, Arabidopsis thaliana landsberg
atagcggtattgacctattattggttgagtaacgagtcatattaggtctcaaattggcaaatagatcctgcgttgagaagaagttaagacacattatttgttacagatacactgaacccttaagtgaaaattggataatttctactaaaaaaatccaatctcatgtccactataataaaacacaagactaacctgcaagtcaaattcaatatccagtggaaggtggcccttgctcaggatgtatctctggaagtgtattaaaaattgatcaagccttttctttgaagaacctcgatcaaagtagtgcccacaggtttccagaagaatgataaccatcctgacacggaaaaaatcttctggtggatccagcacctcttgctaacatcataaaagtatatacaacagcaattcagtggaaaagaaggagtgagaattaatcgtaaagcaatgatcctaaatctgtatatcatgaggaatgtataaaagaaagtaacacgagaagagacattttttttggtaaacacgagaagagacttatgattataatttttatgctaaaccacacaaagaggaccatttataatttaataaaggattagctcttgaagagtgttaggctaacgtacctttgaagtatcatgaccatataaaagagttaaataaagtgtcttgaatatcacagatgaatctacgtgcttcatagttgtacagctcccctaagaatctcatatgggctagccgcttctgttgtgccccatattcattcaactcaagcccaacccttatctcctccagtaccttcaagtgaaaagaatgtaccacgttacttcagaaaacagatgtgatactaagcttggacaacatgcaataccttcaaagaaagtgtgagatgaattaagtctgcaaaagctatacataaaatttaagtcaagcatgtaaattcatgagacggcataaccaagaaacaaaatacaccaaacatcaaattttatgatgctagaatatttccatacacttttctgatttcaaacaacatggaatcgaaacctataggcatgtttctctaaccattttcaacagaaagcttcttttagacttcacataagaaacattaccatttcaacttgacggcaattttcatttctattgactaaaagaaggaagtttatcatcttagaccttttcactactgcacataataaatcaccaattgcctacaaatttagcactacttttagttataactccacagggaagagaacaagctacatatctttaaaacaatcaaactttgtacatgattcaattcttcaaactggagaggggaaatcagaatagttttcccgagagccagggagaagccatttatgcaacaccatctgaagtaatagctatctaacttttgggaaccaactgtacgcaaaaacccatgaccagagtaattttctacagtaaaacccggaaacttttgatttttctgaacttacggatttacaggtccagagagctaaaaatgaaaagccatatgtattagtctattagatatagtggaaggaacatacctcatcaacaacagccaccacaaactcatcatgatggcggctcaaaccagaagtcaaggaagcaattaagtgaatctgaccatactttcccttgtgaaccttcataaagcactttaagatgtattgctcacattcactccatggcagcttccgcagttgcttcagtacgtttgcaatggaatctttatcaagatcagagaatagcaattttcgaacatactgcagaaatttgaacagaagtataagaataacaaatttcaatacaattgcgcaatggaaaattattgaaacataaaagatatggaagttggagattagtaagtacctgatgcaatggtggacgaactttagaaattcttgctgatctttcaggaggtttacacaagtagtaggcattttccacaagagtgctttgacgaggatctaaattcttgacatttttcaggcgcatcaatatgtccagcatatttgtcatcctgagtgtggtttcaggagaccgataaaggaaacggccacatgtctccagaagattgcaagcaacatcaatgttatggtgagtaaattcatctaagcaagcctgcaataaaaaaaattaggaagtgaacattttataaaattggatggttcaagtttcaccagagaggatataatctgtccccatacaattacattttgatatctggtaagaggattcaagtgaaagttacttaccctattaattgaaactcacctagcataagttcagaaattcaagaaaataaacatctctatagaatgcatattgggttgtgcggttatacctaaagacagcaaaatacaagtccagcaggtacaattttaaacttgcagagttctccgataaatctgatgagtcg

SEQ ID NO: 34727 - DNA, 1454 bp, Arabidopsis thaliana landsberg
  unsure (1)..(1454): unsure at all n locations
ttgtccataatgactcaaaacccaacagattatagttacacgagttaagccaaacatgttacatatacagccactttctaaactaatctaaaactgaactatcatataggagtttgatcacatttactcttttacccgctacgacgttggaacttacctttcccgtctttgatccatatcgttgaccgcgttcttctcacatggtctgcgtagagacggtacctaacacagttcaagattcccaagtaagaagccatgaatgagatgagacaaagctttgttcgacaaatataagaatttattgtctaataacaatacccacctctcatactcaagcctttgggtaactatcccatttagtagtaactccgagctatatacctcggcccctgagaagaaggaaaagaaaaactgtgatttccccgtgaaatctaccacatacaaaagcagaagttatatagaccaaactataaaactcacctctttccagaaagggtatacagatagcgcgatcctcttcacatgataagaccagaagattctctgggaccttatcttcgcttagggaagatcttccgagtctttctacaggctggcatttgttttcattatggatcagtttcggggagaaaaagttttgaaaacatgcacatgaaagtgtaaaaaggtgaagaaatgattaccagtccannnnnnnnnnnnnnnnnnnnnnnnnttgtgtttaaagcaggctttgtatttggagtgataaaaactcttcttccctgaaatatgtaaatataatgagccgaaaagggagaataaacgaggtaaaaaaagaattgaaaccaaaagagtattagatacctgtagtagcggaaactggagtgcacgagccaaagaaacccccatgttgaaacagaactccttctccttctttgaatcttgaagtatatacatatcctcatcaacgtatatgtttacttgatcgatgctttcaagccattgtgttgtgcccactggcttgcctgaagcgattgcctctagcatgttccttgtgcgcgtaaagttatcagctatgaagtgtgttgcttccttcatggaggaagcttccgagatatcaaaccttgccaaaatctgttaaacatatcatatgccagattgttaagaggtttacttttgtctagaagacttggttaatgcaaaactgaaaattcactaccaattgtaaaagaaaaagcaaggaataaggtcacatgatcgaaggtaactaaagttacagttagaaacccaactataccttcttctgatgcttggtcacatcttcatcaagatgctggctgaacaagacacatatactacccaaatctcttctctttctagtactctttgtctcggagataggttccgctactggtacggttaagctacgaaattcccttgtagtgtgtgatgtaaatgaatctttgcaagaa

SEQ ID NO: 34728 - DNA, 1148 bp, Arabidopsis thaliana landsberg
gacagtttctttcctgtaagacacttggcctcaccatcaaatttgccacggtctccagagcacagatcatcaatcgcttcagcagccacttgtgtatcattccctaaaactgccgcttcacgaacttcatctaactctttgccaagattctttttagcaccctggatattctttcggctcctagtcacactatgcttcaacagtttgggatcagaacgagcccatcttttatccactgcaactggtatcagttctcttttctgttctctaggcaagctagaaaattcccgtcttttacttgcaacgccaaagaattcatcttttcttctacgatagatatcaccccctccttcatcctcacgattatcatcccagtcgaaaatattgtttccaacagctccacttttgtaacttaccttctttgctaattcttgtggacctttaaaaatctgaacaaattttgatttatcttctgttttccttccatagtcagcttgaacttcaaaatcaaactctagacggcactcactaatgagcttatcaaccaagttaagagcactggcctgggattcctcaccaggttcttgagagccaatataactcaaattccccagatcgacattgcaatcagtagaatgaaatttttcttcagggaaatcctctacgaaaagcttcctcgctgttttttttcctgttcttaagtcctttttctcttcaacaaataaactggtaagagattgctgattccctacttccccaacactattttctagaccagaattatgtgtggttcctttcccagaagaatgacagttgattagtgtagaacagtcagtgttggcagatttttggtttgcaacacgagctgccacagcagaagcacgaaaagctgctgaacgaactgaagcgaacctagccaccttttttcctggtaaaagaaaaaaaggtcattggaaaagtgcaaatgagagagggaacttgaaaagaatgcaaggcagatattgtcttaaaataactgcaagtctgcaactaccaatggtttgttaatagaacacaggaaaatatgactacctaattagattaagatctccatcttaaaaaagattacatgaacattaacaatggagttacaaactatatacaaaaac

SEQ ID NO: 34729 - DNA, 556 bp, Arabidopsis thaliana landsberg
cgtgacttatgatcaactaggaacctaatcggaacgcaactcgagattcattgtatttattttatacttctaaaattatcttgaaaaatatatcgaggaaggtgtcatatctcatggaatccgaatctgccaataatatgagagccactagcaattattctgaatctcccaaagggaagaatcaaaagttggtctctctatgcctgtctttggtctgtgctagagttagaacagaagcttccaaaaggtaataataatctctttcaagaaactcattattagtcaaagatgtttactttttagtactctctctgttcttcattgcttctctagaaacccaatagatcatgactcttgccttgcctttgcggttgtctaaagatcacaatcctcaatttgagtgtgatcgatcattaatgtgtgtcgaatatcatattaccgaaaagatcttggttggtgcttagtgattttcatgatttttatcagtgtataaaagagagatagaaagatgtatttgattgagagcaaaggaggagcaattgcatgtatgctcttg

SEQ ID NO: 34730 - DNA, 748 bp, Arabidopsis thaliana landsberg
acgaggcttttagttcagttgaagatgtgctatagagttcatctaagaaggagcattttaaaatgtgcagtagatatcttaaagagggaagctcctaatagcaaatcacacggtgggtttaagactaaccacaaaagacaacatacataaacttctagaaaacaacaacatttagagataatgaagcaaagtctcacctatgcttcagatttgatggtagcacttgcattttgcgcagctgcggaagaagaagcattactctcaagaagccattcccttgcgcaaatcagagcctccactgtctcgggcctcagtgacgtcttgtactcatccatttccctcggttccatgtcaaagacatagtcaaaggctgcagctgaaaccgggattgaaaggatgtctctagccatctttgacaaggtcgggtacttgagcttgttctgtttccaccagtcaagaacatcaaactcctgaaccctgggaagcagggtttcatcaaggtactggtccagctctgatttcagattctgccccgttgtctccattatgtacgtgtcaaaatccgacagtccatctgctttcccaccttcagatgtcgcgttttggggcgacgggagcgccatgtattcggtgaagagctcgtggatcccatcatccacagtcttgatgttctttccagcatcttctgcaaatatcttggagaaactgaactcgacaagcttcatcttgaaccgaggatccatcacca

SEQ ID NO: 34731 - DNA, 1219 bp, Arabidopsis thaliana landsberg
  unsure (1)..(1219): unsure at all n locations
aacctatgaatctttgaaatatttctgaagaaccatatagcttatacttatatcatctgaaacttgaaggcaccacaaattcttcttgattccttgatcatctatattatatttatataatcaataaatattcttcctatacagcgagagagagagagagtatataagctataaatatggcgtcctcatcagaactaagcttggattgcaagccacaaagctactctatgcttttgaaatcctttggagataactttcagagcgatccaaccacacataagcttgaagatcttctctctcgcctagaacaagaacgtctcaagatcgatgccttcaaacgcgagcttcccctttgcatgcaactccttaacaatggtacatatatccatttacaatatttggatctacgtatatatacttgtgtataatatgatcttcaaaatatccctttattaccaaaaaaacctagtgaaccattagttttttgaatttcttttcacttttttttttttgaaaagatctttattcattaatttaacaatttattccataaaaatcaaagcttgcttttgatttctttgaatcacaaaacttttgtttcctcccaacactgaaatcaacaaaactaactaaagtgattttaaaggttataaaagttcatgttatatctgttactttcatattttaaattactttaccatctttaattactttgatttttttttccagctgtggaagtttacaaacaacaactagaagcatatagagcaaatagtaataacattaaccaaagtgttggtacaagaccagttctcaaagagttcatacccttaaggaaccaacccgaaaagacaaacaacaaaggaagtaattggatgacgactgctcagctatggagccaatccgaaaccaaaccaaaaaacattgattcaactactgatcaatctcttcccaaaaacgagattaatagtagtccgaaactcggacattttgatgcaaaacaaagaaatggcagcggtgcttttcttcccttctctaaggaacaatctttgcctgaattacctctatccacggaggtcaagagggtctctccgaccaacgaacatactaatggccaagacggtnatgatgacagcatgatcaacaatgataataactataataataataataataacaattcgaacagcaatggagtttcttctacaacgagtcaaag

SEQ ID NO: 34732 - DNA, 1220 bp, Arabidopsis thaliana landsberg
tgagcaaaagacctgaaagtcagagagaagaagagaagataaaccaatcttattactacttggagactcttcttgagatgacaatgcaagttgagacatgtttgcagaaaaaaccttgtggagaaaaactagccaagtttttttctctattgatctgctctctcaagagtggtgtgggtataaggaagagatgtgtgagaaagagaaagataaagaaacagtgacaagaaaaaaagaaagcaacttttgaaagttacctttcttttcacctgtttggccatttcaataaccaccaccatccattgcctttttcttttgatcagtctaaatgttccttaccttgaccaataaacaaaaccataaacagattgatcagaacaactacaacaatttgcagtgattgtgaattgtgattaagtccttaaaaaacatagatcatcaaagttttgagcatgtttatctccttaattagaaccaaactgataatgtcatatgcaagagcctaaccaaactgtcctaatccacgttatgaatgtactactaacaacagtcaattatcttatcctaaaacacctacaatcacggagctagttagttcatactaatacctcaaaccaaagagagtactcttagtggttggatatgggaaataaaacataatgggtacttaagtgcagatcattattaattattttgtcttttcactttatcttttctacttcttctaaatggacccataatggttcttcctttttcaatctcttttgtccttaaaaacttaactttttactagccgagaggtatcttgagaagacttggttccaacttttttctttctctctccaattatccactcggatctcaatttggtaaaagcaaaatggttagagagagagagagagagagagagagtgaaactgaagcaatattgggatatctcatggtctcaaattctcaatgagatagtagtactacatagtgaaaagattcttgttttagttttcattctctagctatacatacatgtcacttgcaaataaatagtatttgcttagtaatttttacttcaaattttaaaagaatcacttgcaatcggaagactcatacactatagttgttcctttgcacaaggaactaacggtaaagaaaaggaacatgtcacctaaaaacaaaggaagatattaattccaaagcaaatctctcctcaaagatgaagggcc

SEQ ID NO: 34733 - DNA, 4664 bp, Arabidopsis thaliana landsberg
tggggcattctgtcacaccaatgttttacctttttatacctacaaggacatgggccacgtggatgggtgccattcataaagtggtttacaacacttccctcaatattacataaccgtgtatatgccaacaggatctcattaatgagctagggggatgctgcctattaaaaccttactaggaaaacccttttgggacaaaaccatagtttggaaaaagagtacagcacgcattactcccccctgaattggtcatccctataagtccttaagcctccgcatcccaatctgatgcgagagcttcctcaatgtcgatgctggtaatgccttggtaaatagatcggctgaattgtcgcttgaacgtacttgcaccaccttaacttcaccatccttctgtaggtcatgcgtgaagaagaacttgggcagaatgtgcttcgtccgatctcccttgatgtattcttccttgagctgagctatgcatgccgcgttgtcctcgtacatgatggtcggttccttgtcttcgaccgttccacaatcggctcctatgtgttgagtcattgacctcaaccacacacactcgcggctggcctcgtgcattgccaatatctccgcatggttagaggaagtggccgcgatggtctgcttcattgatctccaggatatcgcggttccaccatgcgtaaacacataacccgtttgtgactttccattgtgcggatctgaaagataacctgcatcagcaaaaccaactaaaccttctttgttatggttaatataatataaaccaaattcaattgtcccttgtaggtatcgaagcaaatgcttgattccttcccagtgcctcttggtcggacaagaactgaatctagagagaagattcacggcaaaacatatgtccggtctagtgtggctagacaggtacatcaacgctcctatggcactgagatatggcatttcaggaccgagaatttcttcatcatccttctttggaccgaatggatcactatccaatcctaggctcctcacctgcattgggctggtcaatgggtgggccttgtccatattaaatctcttgagtactgtttctatatatgccttttgatgcacaaggattcctttatctacgtactcaagctgcaatcccaaacagaactttgtcttgcctaggtctttcatttcgaattctttctttagatattcgactgttagggcgatttccccagaggttcccaggatgttcaaatcatccacatatactgctattatcacaaatcctttgctagcaaacttcttgatgaagatgcatggactgatggggtcatttctatagtcctctttgactaagtactcacttaacctattgtaccacatgcgcccactttgtttcagtccataaagcgatttgttcagccttatgcagtattggtctcgagacccattcttatcttttcctttgagctcaataccctctggtaatctcatatatatctcattatccagtggaccatatagatatgcggttacaacatccattaaccgcaagtcaaggttctctcttattgccagacttattagatatctaaaagtcgttgcatccaccacaggggagtatgtctcttcataatctactcccggtctttgtgagaatccttgtgccacaagccgtgccttatgcctcacgatttcgtttttctcatttctcttcctcacaaagacccacttgtgtcctactggctttatattagatggtgtcctcaatattggaccaaacacatctcttctctttaatgaacctaactccacgtcaatggcttctttccactttagccaatctgacctttgagtgcactctattatagacgtgggttcatgatcctcatttatctcatatgctacctcatatgcaaatttctcgtcgacgtcgactttttttcggttccattttattccagacatgatgtagtttattgagatctcatcattatcaattctttcaggaccatgagcttcggcgtcccgaatctcatttggtggttccttaggacttgccgcgaccaggtctatggtttcctttacctcggttcccattgcacctttcttagtctttcgaggatttttatctttggaacctactggtctaccatgttttttctgtgggttagactcggtagcaattacattgattcccttctggatatcaatacgtactggtgcattacaagctggtatttacgatttcacaactctctttgggtcagcaaagaaatctggcaactcattagctagcttttgcaaatgtataattttatggacctctgaatcgcacatcagagtccgaggatcttgccaattcaaggatgtttgattccatgctatctcttttatttttttacccagcttgttcgtctcaccacctaacgcaggaaactcggattcactgaagtgacaatccgcgtatctagccttaaatagatcacccgttattggctctagatactttataatggtgggagaatcaaattcaacatatattcccatcctcctctgaagtcccatatttgttctctgtggtggagcaattggtacatatacggcacacccgaatgtccttagatgggatatgtctggctcatgacccgttaacaattgggatggtgaatatttgtgttcactagatggcctgatacgaataagttccgatgcatgtaatacagcatgtccccaagcggctactgggagcctcgacctcatcagtaatggtcgagctatcaattggattcgtttaatgaaggattccgctaatccgttctgtgtatgtacatgtgccacgggatgttccacacttacccccatgggatgttccacacttacccccatggacatacagtagccattaaacgcttgggacgtgaattcaccggcattatctagacgtatagtcttaagcggaaaatctggaaaatgggctctcagacgtatgatctgggccagtaacctagcaaatgcttggttcctagaggacaacagacaaacatgtgaccatcttgtcgatgcgtcaatgaggaccatgaagtatcggaacgtcccacatggtgggtgtattggtccacatatgtccccttgtatcctttccagaaagtttatggtctctttattgacctttgccggtgatggccttattataagtttcccttgtgcacatggagcacacgtgagcttctttgggattactctcttttcttttagggtgtgcccctttaaacttatcattagctttcgcatcatgttatgacccggatggccaagccggtcatgccacaaagtgaactcctctatgaactctttgttcattgccaaattagcttcgatcatattgatcttagtatggtaaagaccagtggacaatgcgggtatagtttttaggactctcttttgtccttgggcgatctctgttacatgtaggaattctctattcccttcaccctttgtttcaacgtggaaaccattaagatgtatgtctttgaaacttaacaagctcctctttgagctgggtgaatacaaggcatcacttatttcaagatgtgtgccgtttggtaggagtacatgggcttggccgtttgctaatgttggcattcctcaatgttagatttatgaaatatcttttgtctcttaatatcgtgtggcttgagccgctgtccactacgagtatgttcttgtcctcgaccatttctaaatatggacaagaactatgtcttaggcgataaagcaaacaataatgaaacaaagcaattccattaaaataaataaattcaagacatcgagcaatagaatttcaaactacaaagcaaagcaaacaaaacaaatttaaaactagatgcctattttcccaagatgtccgaagtctcataatccattaggtcatcgttctcgtggtcgaaatccccttcaccatcgagatgaaccaaattggcttcgggtcccttttgctttatcatctcttgatatgcctcaatgaggtgcttagaggttctgcacgtctttgcccaatggtcgtccatgccacacctatagcacacggacttagcctttccacgcgatttgttaacaccgcggcctttacccctacctcggccatagttcccacggcctctaccaccatagtggtttccttggccgtagaaattgccacgacctcttccaccacatcctctgccacggctacggccgtgagggttacccctatggacgtagttggattccttggtcgcctgaggttcattaggcgctttggccatttcggctctattggcttcgggcacagctgtggatccgggaggtctcaatgcgctgttcatgagtaacagctcattgttcttctcagcaagaagcaagcaggaggctagacttgtgtaagtcgtaaaccctttcgcacggtactgttgctgaagcagtacgttgttcgcgtgaaaggtcgagaaagttttctcgagcatgtcattctcagtcaccttctcaccacacagcctcaggatagagacaatcttaaagagctcggagttatactcctccacggatttgtaatcctggatcctgaggttaagccaatcatgttgggctttgggttgttgtacggtcttttggtggtcgtattgattcttcaactcaag

SEQ ID NO: 34734 - DNA, 902 bp, Arabidopsis thaliana landsberg
ctatttatgtgacatgtaagttttttttttaatttatatttttcggaaattataacatatgggtggggaaagtgtaaatgcaaacgcacagacaacaagtcaagcgtttggcatagtttaaaaataactaagcaaacgctaaacacacaacaattcaagcattgggacatgtatttgggcttataacccatcaagctgaagagggccgtggatgcaataacataaatgttctttatgggataaacaggcccagcttaagtttattttttggtctctagggttttacttttgacaataacgacgtcgttctaccgattcattcaccgccaccgtctggagcaaatcgtggtctcaatctccgtctgaatcatacctcgaaggagctcctctaattagggatgttaatatgggcttataatttagggccggcccgagtccgttaaaaaaaataaaagccctaaccctcataaaattaaagaaaagatttcgggctaagatagggctatacttaaattgttatgggctaaaatagggttggccctattacactcttttattattctctgtcattttttttttcttctctttctcctcccaaacgcgtcttcttcaactcttcttcttcaatctcttcttctttgatttcttcttctttgatttcttctctgaacccataagagtggaagatttgatctgaatatatagagaagcataagcttggtgaaatagcatcaaccgtaacttttcaatccctaaaggtgaaggttttgttcttctttttctttgattctactctttatcgtcacaatagcaaaatatttgatatgggttggcattttgattgaagaattttggtgggctcgtgttagattttggtgggtttaggtaggagttacactttg

SEQ ID NO: 34735 - DNA, 1675 bp, Arabidopsis thaliana landsberg
caataaaactgtaagaaagaacatttagaataataacaaagcgtaaaacaagtgatttataggattatatattcatatctcatgaattttctaatcaggactgaaacaaaatccctaaaaaaattgaaacaaaacatacaaatccatgcatatgcatataaaaagatgttactagacagataacatcttgcgtgttcatgaacatttaaatatcaaattttgatccaaagggccactgccttttcaacaacctgaactaacaaatccaacttacgtattacaaatctttagttgcaatgttatattccaaatttccaaaataacatataaaaacaaccttagaattaaaaagatggaatttgacattcaacaatgacaacaaccatagagaataaaaaccctataataaatatatacaaacaacttacatagtcacatttattacatttcttatatcttttttttgtttctcattgtagcggaatctttactttcctttttttctccaccttctttcctcttttagtttcacataatgtaaaataagtgcatgccaattacaagagacaagagtaaaagatctaacgcaacaacaaaaggagacaaagactttttcacacttccaaaagaagatgacaaagtcacatgatacgtgacaattcactattggtcatcacaactcacaagtaccaaaatctacctactagttgcctcccaatcaattcctcctttgacaataaaacgctacacaatcacatggtaccgtcacaaatcacaattcaataacattccttcacgctcctacgtcgtccacacgtatacttcttcacgcgttttacgaagcgtaatccgtcacgcgccacactttaacggagttgtctaaactcccactatacactatccaccgttgatcccctttctctccaccgttgtctccgtcgttgttatcatcctccgcctcttccaccgccgttaaacacttaacaggtccttcatgatccatcaaaacagagagacacgtatgagatccgtccccgtttcttttccaaacgcaaatatttttatcagctccgccgctcaaaagcaaactcccggcggtggcgagacacaaaactgccatacggtggccgtgaatcgtccctttgtgagtcaaatacttttgccgttcccagaagttaacggttccgtcagacgaaccacagtaaacaacagcgtccgttaaattaacagctaacgccgttactgcgttctcttgtttcattaacacttgtaccaaaacatgcttcatctctttgccttgtacctcacgtttccatactttcaacgttccgtcggctgaaccggtaaataccaaatcgtcgaaaccggaaaccaccgtgttaacggcatcgtcgtgagcttcgattgattctaaacattttgaatcggacaatctccagaccttaagagtcttgtcccaagaaccggagtagagcaaaccgagatcttcgtttaagctcagacaagacacagcgtcgaaatgtcggatcttcaaaacgtttttccgcgacggacttcgacgtagtttctaggatttaccgatttggtgagaaattctttaagagttggtaaacttccgactcgtgaatatttctcggcgttcttctttgatcctctccatacccggattttacca

SEQ ID NO: 34736 - DNA, 1837 bp, Arabidopsis thaliana landsberg
ttttattatattgattagttccgaaatcaaaagctttatagcctctataacttcatcactcattcccctcacgatatgttgtcgccaaggtgtgaaatgctaaatcatacatatttttgggattgtcaaatttataatttctatttgtttccgtcacatagcatacaacccaaacaagagaaacaagacctatagttttatgtcaataaacaaaagcaagctaatacttacagcactggacattcacaattttcacaaacccaaaccaaaagaatctgatgtatacgaaaaaaaaaaagaatgggtcacttttaaaatttcttttttcgtcaaatgtaggacatatgtattgtttgtgtcacttaaggaaatattgtgcccacttgcaatataaatagagacaacaaaggtgattagagagcatctccaatccaacttgcgaaatcattcacaccatttaaaaaacaaaaatcacacctattgaatggaaaaatgtaaaatcaatcaccttaataattattaaccacaagtataatccctattatagcaaaacagcacattcgtctccttcttcttaccagacactaaaacaagcaaaaggaatcgttttttctttctcttgtaacttttatgtttcgtcattctacaatttcttctttataaaaagtgactcttaagagtcccaacattttcagtaaaaatggaaaactcagacactgattcagaagttttcttttggtttcagaaccaaaaccaaaaccatagccataagtttccttcttcttgttttcctccgagctctcactctgctttttatggtatatctctgttcctccattctaattttattttattttattttcttgaaatgcatctttttcacctttgacgaatcttcatccccaaaatgtaaccactcagattaaaagattgtcctttcattttaaaagagtttgaaaagaatagcaagaactttgaagaacctcatgtgacgacataggtcagattctcttctataaaatttgtgtcaacctcattcgcttcttaattcaggatctagctcaatgatcacacagagactgaactatggacgaagaagacgtatgtgagaccacatgatgcgtgagataaccaagagacggaagctaacaccgatccaattgcgtttactagaggagagtttcgaagaagagaaaagactcgaaccagacaggaaactctggctagccgagaagctagggctgcagccaagccaagtcgctgtctggttccaaaacagaagagctagatacaagaccaaacagctcgaacacgactgtgactctcttaaagctagctatgctaagctcaagactgactgggacattctctttgtacaaaaccaaaccctcaagagcaaggtacagtttcttaataggttaacaagccactattttcatagagtctgttcaaaattttgatgacacattcaaacaggtcgatcttctcaaagagaagctgaaaatgcaagagaatcttgaaactcagtctattgagaggaaaagacttggggaagaaggtagttcggtgaaaagcgataacacgcagtacagtgaagaagaaggtttggagaatcaatacagtttcccggagcttgcagttctcggattttattatgatccaaccttaactgcttcaaatctaaggttgtgatagtgtaggtcaacaacgttccgtgtgcctcaagttatcttcgctgtctccatcctttttatcttagacttcatattctaagaaagaaagcagtaataatattcattgatggaataaatgaaaagtgcatgcttttcaaatgata

SEQ ID NO: 34737 - DNA, 558 bp, Arabidopsis thaliana landsberg
gtttcctcgggtatgatccagtttgtgatcaatacaaattcttgtgcatgacggaaagactttatggccttcgacaagacccatcatctcaacatcaagtgttcacattgggagaaaaaaagccatggaaaatgatagattgtactaccattcctgatcaccgaccttggtctaacggtgtgtgcatagatggttttgggtattacgttgctaatactggacaaggtatgtcacaactgagcttaatgagatatgctctgagggatgacaatttgaatctttttactagttcacctgaagagctgcgaactctaaaactatctggggacactgtattgaactatgaagggaatgtagtatgggcgctccagtgacatcttatatttaatgtgtgggttatggatcaggatggctaagaacatgaatggttgaagaaaataactttcaatattgaaccttgtaagagttcatttcgctttgtagacgctagaggcactactcatacgggtgagtttattctcgcaccattgtactatcctgatgatgagttttatgttt

SEQ ID NO: 34738 - DNA, 1836 bp, Arabidopsis thaliana landsberg
tccttttgggcaacagtcttgtgtgtatataaaggtattttgtaatgcaattttttttgttacgtgaagtttgttcatatgtgttaactctaaagctgtattgatatgttagtctctttatgctcttgagtttctgaccaagccaattacaactgaaagtctcttaattttcatttgtagccaataatgtatttacatgattcagttacatcaaacctggatatacaacaatattatattaatctattctatcaaagtttaaaaccaattttttttaaaaacatatatatatatatatatatatatatattctatgaaagttagagaacctttatgtgagatctcatcagagtatgggaagttgacatatgtccaattactaaatgaataaattaataaaatcttattgattattgattttatatcaattcaaatcaactaaacataaaaatcctaaaacaagatgtttaaaaaaggaagaaaatctgtcttaaaaaggggaatgaaatcttatcataaatacattatttaaaaaaaaaatcataaaagcataaacatagatatttacattaatgtggaattttaacatatacagtattacattttcattttcctcttatgtgggagggcttaatttttaaatcgccatcacaatacaactagataatatccgcacatagtgcggggtagaaaaaattatttaataacttttatgtataattgataacttttatgtataattatttaatacccgcaatataattgattattattagataaataatggtgtattaattaattatcaaaattagtgaaccatttctttatgtattaatgttgatgacaatcatgaataattatgcatatctcgttatattaatagatataaaatattagatactctattttgtatacatttatatctcttaatcatatattataattgaattttcattttaataattgcatgaaaagcataccttaatttgagacaatcaatggacgtaaaactaatgacaaattcttaaatattatgttggctgtttaattaaatggattgagaagcaatgtgagaacgacatgtcagcgtgacattttccttaatgatacataaaagtctggttatttttttcaaaatgcttctcaattaatatatgaggaataaaaagaaatattaactaccgttggaagaagttcaaaaaataacccgcgagattcacagatcacaccacacatatatcttaacttactatagataattatgtatcattcactactaaaaacaagtataactcatccaacaagatgtacaaacactaaacaaccgagatttcaatcattctcctagtaagtatacctgtttgataaacattatgcacattgtctcgactagtaactcacaaccaatgtgtttgagaacaagtagtaataaagaagtccaaaaatctttgatgtcaaatctttgaaaagaaaagactaagaaacgacgacgttcatcaaatcccgtaaggcaacattctccgtttgactaaaccaatagcgagaaagaaaacacttggacaatccttttttttcttcttcttcttaatattcattgttcactatttatatgtcctctctattgtttttatatataagcaaaagtcgaccttatacaatcttcaccgtctctattttttttttcctctctgtcgcggaaaaaaaaaccctagtttttctctcttctcaccgatttttcattccgatgcttctggtcgcatagcccatccccgcagatctgttaaaacaaaataaaaatcttccctttattcctaatttcgagaatttggttgttcc

SEQ ID NO: 34739 - DNA, 503 bp, Arabidopsis thaliana landsberg
atctttccggtaatcaaatgtcaaataatagattgaagtttcctccacttattgatagtcttaattagcttttgagttttgtttttgggacagtggttgcaaaagactaagagaaaacctttgtttgctgcattggagaaaatgaaagaaggtttgattgatcaacatttgtaacaactctaataatatgttttgtgatgtgttgtcctaaatattaatttggttcttgaactttttttatccagagctgatgctgctcggattcatatcgcttcttcttacagctacctctagcacaatagctaacatatgcgtctcttcaagtttccacaacgatagatttgtcccatgtacgccttctgagattaatgagggaaacttgaaagtactatttctactgtcaagcggactcagttaacgagatctctttttttgcacactttgaggaaaaatttgagtggtataggagaggatacgtgcagcgaggtttcctattaatctca

SEQ ID NO: 34740 - DNA, 10761 bp, Arabidopsis thaliana landsberg
atgtttttggcttgaaaaatgtgataaagtcactacttttgtttgattggaaaattatataatttgaattggtgaaattaatataggtaaaactgtttttgcaacacgaaaattgaaagaccaagttcaggaacttccaaagttatgttttgctatattggtgaaagagcaaaacaccacaaatgaatatctgactggactgcaagagagggttagttacgtagatttccattatataaaggctcaatatgtaatttcgcaaatatacaagccctcattttggaaattcgttaaaaacaacgagtcagccgaagacagaaaccctagaaatcgcccgagtcgagttaattcgcctctcacccagctgtatctcgaaccgcgactcgttccttcctgcgcaaaacgcttcttcgatttttagctcaaatacgtatctcgccgtctaaatatgtgttccaacttcgcttaagcttcacctccattttcttggtctgaaaaatcaacaaaaccagaaaaaaatctcgcctccgattacgaaagttctcagcttcgtaggtatgctatagaagaaaaacccagttcaattatttgttcttgctttataaaattgatgaaaaaatgttgtttttaaatccatctatgttgaatccatgcatgttgtttcaaagtcttgtttttgttgtaaagactcttgtagattgtggctgcactggtttgtggaactgttaaagtttgaagcttgtaaatggtttgacaatggctccacctggatcaattggagtggttgaccctggatgggagcatggtgttgcacaagacctacggaagaagaaggttaaatgcaattactgtggaaagattgttagtggagggatatacagattgaagcaacacttggctcgagtttcaggagaagttacttattgtgacaagtctccggaggaagtatgtatgaggatgaaggagaatctggtgcgttccaccaaaaagctgaggcagtctgaggataatagtggacagtcttgttccagtttccatcaatctaacaatgacgatgaagcggatgaggaagagcggcgctgctggtctataagaagtaagggaaagctaggcttgagtgatgggagtcttcttcggtcttcaggttatattgatcctggatgggaacatggtattgctcaggacgagaggaaaaagaaagtgaaatgtaattactgtaacaagattgtgagtggcggtattaaccgttttaaacagcacctggcgagaatacctggagaggtagcgccgtgtaaaactgctcccgaggaggtttatgttaagattaaagagaatatgaaatggcatcgagctgggaagaggcagaacagacctgatgatgaaatgggagctttaactttcagaacggtctctcaggatcctgaccaagaagaagacagagaagatcatgacttctatccaaccagccaagataggttgatgctgggaaatggaaggtttagtaaagacaaaagaaaaagctttgattcaacgaacatgagatctgtctctgaagcaaaaacaaagagagcgaggatgataccgtttcagtcaccttcttcgagcaagcaaaggaaactatacagtagctgttcaaacagagttgtatcacgaaaagacgtcacatcctccatttccaaattcttacaccatgtaggagttcccacagaagcagcaaattctctgtactttcaaaagatgattgaattgattggtatgtacggagagggtttcgttgtgccctcgagtcagctgttttctggtaggctcttacaggaagagatgtcaactatcaaaagctacttgagggagtacagatcttcttgggtggttacaggttgttccataatggcagatacttggaccaacacagagggcaagaaaatgatcagtttcttggtctcgtgccctcgtggtgtctacttccactcctcgattgatgccactgatatagtagaagatgctttaagccttttcaagtgtctagacaaactagttgacgacattggcgaggaaaatgtggtgcaggttattacacagaacactgctatctttagaagtgctggaaaattacttgaagagaagagaaagaatttgtattggactccttgtgcaatacattgcacagaactggttcttgaagacttctcaaagctagaatttgtctccgagtgcttagagaaagcccaaagaatcacaagattcatttacaatcaaacatggctgcttaatcttatgaagaacgaattcacacagggactagatcttcttagaccagcagtcatgcgccacgcttccgggttcaccactcttcaaagtcttatggaccacaaggccagtctcagaggtctgtttcaatctgacggctggattttgtcacagaccgccgccaagtctgaagagggaagagaagtggagaagatggtgttgagtgctgtgttttggaagaaggttcagtatgttttgaaatcggttgatccggtgatgcaggtgattcacatgatcaatgatggtggcgatagactatctatgccatatgcttacggttacatgtgctgtgcgaaaatggcgatcaagtctattcatagcgatgatgcaaggaaatacggaccgttttggcgggtgatagaataccgttggaacccattgtttcatcatcctctctatgtggctgcatatttcttcaacccggcatacaaatatcgtcctgattttatggcggtaggtatgattatcattcatttgaatcaatgactaaaagctttctgccattttccttacatttgctgtaaatgtgaatgaatctgcagcagtctgaggttgtgcgtggagttaacgaatgcattgttaggcttgagcctgataacacgcgtagaatcacagcattgatgcaggtgagacaaaaaacaaatcaccaagtcacacacattgttctcagaacctgaggttaaaccaactttttgttgaaatgttttcagattccggattatacttgtgcgaaagctgattttggaacggatatagccattggcacaagaacagagcttgatccatcggcgtggtggcaacagcatgggataagctgtttggaactccagcgagtggcggttcggatactgagccacacttgctcgtctgttgggtgtgagcctaagtggagcgtgtacgaccaagttaacagtcaatgccagagccaatttgggaaaaaatcaacgaaagatctaacatacgttcattacaacttacggctcagagaaaaacagctgaagcaacggctacattatgaggatgaaccaccaccaactcttaaccacgctttgctggatcggttgctccctgactggctcgtaacatccgagaaggaggaggtacttaacttacttaaagtgagaaacgctaaacgccattccagtgattttataaaaggctaataaatgtagtttattggtgaaggaggaggctttgcacggggaagacagagcagagaaggaagaccatgaagacgatgaggaagaggaggagaagttttacatggaatctggtaacgttgacggtgaaggtgaagacaaccttgatccttacgatgatgatcttagtgacgatgactagttagtgctacaattctaacgaagtaacgctaaaatgtattttgaattctaagcattgtatccttaaaatattcgaaaaatatgataatttcgttggctagaagaatataatcaaagtattagtaggtgaaattagtgaaagtgaaataatttatctaacaacggatatggatgggaccaaaaagttggcgcctcgctgtcatttatttaactaccgaatatctgtctttttaatttatttattactctatttttttttttttataaatataatatgtttgaataaaaaagaaaaaaacaacacacccctgacagctctctttcccttttcccgttctttgacgtcctttgtttcgtctttcattcattctcatttgtgttttctctttttggagattttaacttcagtttttgtctaattagggttttaatttaaattggagggaaattttagatgcagtgacgtagtgtttgggttaattttcgtcgggttctgaattttctccggcgacatggcttctaatctccccatgagccctcaattggagcagatccatggcgaaatccgtgaccatttccgagccctcgcgtatgttttacatatcatcctcttgttcaattttctaactatctctgtcgtggttacgaaacactgtgatatatattttagggttttggatttttttgattatgtgtgctcaataggatttatgtgtcttttgcttaatgctgatgataagaattagatttagtcatcactcgaaagattgttcttttagtgattcaccgttatctgttttgcaggaatggtttccagaggttggataagattaaggattcaactagacaaagcaaacaacttgaagaacttactgacaagatgagagagtgtaaaaggtatacttatttgattattgttatgctttaccattatgttctcggcgttacaacattgtttgctaattgcctttagtagaatgtgctctttgatcactgttatgcgtacttttttttctttgagccggatacgatgccgtataatgagaattgagaaggaaagagtattgatgttacaaatccatgattcaataatctgtatttgcttgtctaatgtgtacttcatgtcagattggtcaaagagttcgaccgtgaactcaaggatgaggaagctagaaattctcctgaagtaaataagcaattgaacgatgagaaacaatctatggtgagttgttatcctttagtctgttgattaaattcatcgaggcctttctttgattatactccaatgtcatatgtatctgaagtgaatattaactctttctcagcaccttcctaaaattccattatgcagcatcaatcgtattcagtttggtcaatctttaggtgtatttgtaaacaaatggattaattaaggcggatattgagtatcattgtgtacctatcactcccatctgtaatttgtatctgctaccattttgtttgtatggattttttaacatatgtgttcaactttttctttcgtataatgttacagatcaaggagctcaattcttccgtggctctaagaaaaacgttagtatttctatcattcctctttaagaaagctaattatttgaatctcaacatgttcttttagggttttgatttcatatccatccgttcagaatatctgtataggatttcatttgacttttatgtgttcatacatgttaaattggtcttgaatctcaggtatatgagtacccttggcaacaagaaagttgagctttttgatatgggagctggagttagtggcgaacctacagctgaggaaaatgttcaagtggcttcatgtgagtccttatgcattcttgtcttcagttgccaccaaaatatgagtttgcttagaacaattagagattgacatgcttgaagtttagactttttaatgctatatgtacttgaatatgttggattggtaactaatgctctctggttattcgtctggcataatttgtgatgtctgtcagtaaatttctggcagatggtaatatggcactagaaatgttatcggtggcctagataatagaaatgaatgattctgataatttgattaggcgcgaagtatattatattgggaatgtaaaaactgatgaaggcttttgtcattttattatgtatagctatgtcaaaccagaagcttgttgatgctggaatgaaaagaatggatgagactgatcaggccattgagcgctcaaaacaggtaagttacagaaggaattatgttccccttagcctttgttactatatgaatatatctatggtaacattcttgttcctttcaggttgtagaacaaacactcgaagttggaactcaaactgcagctaatttaaagggacaggtaatgcaaattattctcctttacttccatattaatcttatgagtagagtcttaaacaacctgaaaattttgcagacggatcaaatgggacgcgtagttaaccacttggacactattcaattctcaatcaagaaggcctcccagctggtgaaagagatagggagacaggtgtgtaacctcatatggacatatgtagatttatcctttttggcttgacctcaaaacctgaatgcttatgtctacttatttcaggtggctaccgataaatgcataatggggttcctgtttctcattgtatgcggtgtagtagccataatcatagtgaaggtactgtcttttctctctctgttgaaagttgtgattgctcattagcaagttgtaactctggtttttgtattaattcttcagatcgtgaatccgaataacaaagacattagggacatcccaggattagctcctccagcgcaatcgaggaagctattgtacttgaggaatcaagactacatgtgagaatataaatctctatttgtatatttattcacgaggaatgaggaaattgcatcttgaggttcgatatttccttctaatttgttaacaatccatttcatggatgttagagagagggtttgtgcttgttggcattgtgtgctttgatagttgacgaggcttggggatgtttatcttcatgttcttttacttgttttaacccattcgtttgaatctgggtttgattggagggtgtgtatattttcagcttttgtctctatttctttttccttcttctttgttgtagcaacttatcacttcttttgtataaaattcagaccaatgttatactctctcacgttttctttagattcctttcttcgtcctactgtagaaagtttcatgacacagctggaatttcattagaagagtccaaatggttatcactttctgtaacttgctaatacgaagaacgtgatgaagagtactactacatttctgacgttaagtatttatgaaactactgactgtattctcctttaattcgttttgtttcacctttctattactggagaaacaattaatactcttccaatcagaatttaccttgaagacattaatattttgtaccaatcaatctagttcaaatataagagatgctgctcagaagccggaacataattgaatccagggtcggctgatgatggaaaaaattaagaccacaaatatataaatttaacgtcaattcactacaaacgaatttgagactttttagttttccagctaatcattggtaataatctccgctattctatctcataacaaatttggaatttttcacctgacacacgaggacacgggtctagatggtgctgcaacttctttgtttggtttcaaagatttttttcttctaagtaacaaaataacgaattgggaagcaaaatgtctattatacgtttataccggcatcttaagcagcgtgatttccgagctgcgtccgaccaatatgagacaaccgggatgtgatcaaaggggcttcctcgtcgtttacctctcctcctactcttgggatctccacactgtcgttaggattgaatttatccgaagacttcttctccatcttgtactcctgtgtaatgtttgtgttcatcagttgttacattagaaggaaaaaaaaggtaactggttctacactatagtttgcaactctagtggttcttttgaaagggaaatgcaagctgagatctgcttgagcttagagatcgagaatgtttgactgaccttattgattcgatctggaagactgtcagctgttggttgagacgccttcacatcccttacttttatgtaattgtacatgacgacaccacatagcgctgtgtcaaacacatgacaagaataaatagttatgtgggcaaaaaccagtcaagaaagatgtttacagcaatcacatttgttgtgacatcaagtaatctacctattgcgtatccagtgatattcaacccagtgattgtggactcggggaaaatgacggttgagagggctataagaatccagtctttgagaacaccagccacccggatggttactgcacctgttctcccaatgactaagaatatggagaagttcaaggcaagagcacatagagcattggagaaaaatatccagaagttgaattggatctgtgaaacttccattgtgggtttctctaacacataccaaggtaaggccagaaaaacaaaaatgcacaaattgaaggcatagtgtgtcaaggaaaagatcatgtatattaatatgcagtagagtgagacagaactttccatctagcaaaaataatgtaatgtaatatatttagacgaactgaaaccaaaggtataaccagtatcaatacctgcagggagctatgtaatacaagctggttatagggttcaatgtcaaacccttcttctggagaagaacttgagttagcaccagtctaagtgcttcagcaaagatgcctgtcacctgatagactgtgccaactatgttgaaatgaatttccccataagaagatatcacaactccaacactgaccagcaacatgttcgagaacacatcacaccttggtttgtcagtgccacaaacaactgccatgataaatgtcgctactggcactgaaattgcatagtcacatattaatatgctttgtaatgaatagataaactaaacagattctgtaaccaaaatgttaactcttcacatacttagtgctttcagcatctgaatgaaggcaacagaaatgtgcaaatatgcagtatttccaaacctgcacaagagaataagaaatagtgaagagacagtttgggaagcaagaaatactagaaaatacagagttttcctgaacctgatggccagcaataagcgcatcaataaattatgtttattgtctatagaacaggaacttaccagagacttgatgcaaagaatgcacttataggtaccacacaggttgcatatctgggcccattaagaatgtcaaaatggagagccagtggagggggcgtgcgaagagaacaaaaaaatatagatgaaaaatatagagcaaactggcttacatttcaaatgtcattttaaccggagctacaacctacaaaacagaggaaaacttataaacgcccttgcaaaaggagtctaaggatccacaaagaagataatattataaaagagagctccagataagatgtgcaggagcaaactccataatctttgagtttaggataccttgaagacacgaataagaaggaaagccacgaatccagcaaaccccatatggatcattgtcagcgttataggaaggggaaaattgaagtattttggggataaaacccactgcaaataaaaagcaataaaagagtcacgatttagaagtcagactctactttaacaaaagctaatacaaactacagttatagatagcccttgcatatccaacatccgacgatacatcagaatactatcatagcccttgcatatccaacatccgacgatacatcagaatactatcatagcccttgcatatccaacatccgacgatacatcagaatagtatcatcccaggtagacatagggtatagaaaaaattactaccgattgctacgaaaagggtttggctatggtttccatctcagatacactacatataattaaacatcgaagccttatatggagatacaggctctaacatgcaaactacacatatctgcttaacaattagatacgttatttaagtataaaagcctctaaaaaatcaccttattgtacagtataactcctgaagaaagtataatgtagatcagcaagtagatataagttaatacaagcgtcttgtttatcatctttgccatcttactcgtcccctctcctcagagaaaaagcaaatattttcctttgacaatcaatttcttacactgcaccaataccaaaacacggcagtataaaaaccaggtgcaaaggctctgtggccattacctgaaacccaacaaaaaaaaaaatgaagcaaaacttttgtcagccaatgcagatttaactgaggaattggattcacaacaccaagtaatgatgccagaaaataaaatccaaaacctacgacatgaaatctaaacctccaaaaccaaaaatccaccaataagagcaggataaaatcgagagatacgagcaggataaaatcgagagatcacgatcagagaaagagagcgaaatggatcagatccgataagcaacgagttaaaaaatgaacaataagggagagaagaacagacattactacctcgagatcataagcagagaatttgcaaattatcagcaaagaaaacaaacgcacaacaaatctagtagcgatagatcaagaggaacactatctgattaaacaaattcagctattcgagcagaatctgatgatacgacgacgaattcgtgagaggttcaatggtgggaatcaaccaaaaagagaagaagaagaagattttattaatagaaagaacgtagaactggagatagctagctacagtagtttagttggagaagaagaaagattagaacttgaaattaattaatattttgtccagttcctgaaccaaaacaattaaattaaattgacggtggagatgaataagctaatcagcaaaacctgaatctaacggctacgggtttataacttgaatgcggagaagacctgcgaagagagttagaaagattgggctttatgggcc

SEQ ID NO: 34741 - DNA, 1957 bp, Arabidopsis thaliana landsberg
taaacaaataacaatgaagttgtgttgtcagaaaaatgttatgcaaattgttattaaacatcacttcatcatctacagctatgatgaaggggaaaaggctcattttattattttgtgataaagaaacgcagatccacgggttgagtattaaacatgggcttcagatgcccaatgggttattaccatctttaacatctataatgtgttgacaataaacgaatggatgataaattgataatgaacaattgtcagcaaccaagtcatctgatctgtttttttttatttttgtttttgtcatctgaaaatctaaaggctaagaaaaaacgaggcatgaaaataaataataaacaaagaaagatgaaaaggaagagacaagacagaagacaagacagaagtgagtagattcgaacaagaaacttaaggctgacattaaaccttacataataagacttggatccccaaaagtcccaaaatggagaagaagaagaagagagatgaggaagaaacgagaggctaaagatgaagatgaagaagaagaagaggagaagaagaagagactagagttgatgaaggcagctgcgcaggcttggctcagccactcccaaacctcaaaacatactgttttagagttcgatgcgcagagaaagcatgcttttgtcaaagggaaggcatcacgtttcaaaacggaagccttgtccgcaaagcatcatccgtcgtttttggattgggaattcggacagtcgctgtgggatccctacgagattctttcggtctctaagaaactggaacgcgaactcactttagaagaacaaaccttctcttcttcagataatgatggcctcaagaagatgaagaagaagaaaactagagacagcagaaacagccttaggagtttgttcactcgttcgtcttcaaagagattctaacaaactcatcatgttactacttcaaacttgtaaatttttctcaaaaagtgaaatcaattatgaatgtcttttattggtctattcaaaaacttttattggtttttgaatggtttctatggatagaataacaaagttttgtcagttgtaaacagtttaatgaagccgaccaccatgactaattgcaactgccatgccgatgattcgaccacgtgaaaatgtcacctgattgagagagatgagagggtaaatgtgaattaaaacagtacgttgtttcaaggaaagctcttctcacaaactcacattaagccaaatacagctgagaaatggagaccaaaaaggcctaaagtgatgaaatcaataaaaaagactcaaccattcatttgacccgaggagcaaaacgacataaactaaacttgaataagaaagaaaccatccatgtcttagatagagttaacatagtaacatcatcccaacacaaagcaaaggaacagtctatgtgacgcagcacgaaaccaaactaagagatcaggttttatttataaaacataattattcctgatagataagagagatagagaagagttgccagaaaccaaagagctcatcaagcctccttctcccctgtgaggagatccattaccacgcctttgatgcttccattgttcttcttcagcagtctcttgttcgtcacatcatcacagaagccctgcaaaatcacaatattttcaacattccaatctgcaaagtaagatttaataaattcaccaagtgcagacacacttaccatctcctgaagctcctctaggattggatcccactcgctaactccacaaagagcatcaacagactgctccaggttgtactcgttatccctcaagatctccttgttcaaatctatctccttgaaacccatttcctcgagctccttgagcatggttatctccacgtcattcttttctatatccctctgaagaggaactggcacgtcttttgtagtagatgaagaaccaccagacaagacctcaacagca

SEQ ID NO: 34742 - DNA, 479 bp, Arabidopsis thaliana landsberg
gataaaaattctctaaataggtataatctttcttttatttactttttaggatgtgattaaagtcatcaaatttctttataaattaggaactaataatatctttaaaagaaaccacgaatcaactggtgagaacagttttgtgttcctccacgactctattttttttttctttattttagcgagatattattatattaattggcgaaaacaacaaaatgaatattgaatttttccaggttgagccaatgaggtaaaagacgtatcattttgacattatattgtaaaagaccaatatacaaaaccccacaaggtaaaaaaaataaaaaataatcgagacactagtctacatatgacaacgactttggtccttttctacacatcatattcatcttcaagctcgtaggaactgaaatgttcgaccttgaaagtacactcgccattcacaggatcataagacacaaactgagcttcttgttccc

SEQ ID NO: 34743 - DNA, 2590 bp, Arabidopsis thaliana landsberg
gtttaaattaacgaatttaagatagaagctcttaagttatttgtagatataactcttctcgctttcccaggtttgtggtgcatatttgactgcttccatgtatgtggagtattggtgtgaggagaaatttggcaatctaagccttggagatcctgatttttcttatcatgataaggtactaaacaaggaatgcatgttatcgttcctctggtttccatcttttaaccaactaactcattatgcttattgattaatgagtagtaactttatcgtcatctatgaaactttcattggatgcacttttacaaaattataaactcaggtctccatgtaaaaaaggggattggtaataagattttatttgcttggtttcatgcagcagagaaaatggttttgtttgtgccgatttctaatctttccttttctttgttgttaacagttaccggatcatgttgagatacttgtgtctgcaataacaagaataaacgagcctgacagcttatatggggttatacattcaaataaggttcgttctgatactaaaattctttcctacagagtacatattcgatatctcatccacacacttggatcttgcctattggaaatggttgctagtctgtattctcctgaacttggtaacattaacctttttgttatctactctaggaatgttttgagacatctcccgtttcatttgattgccaaaatatattttcgacactgattagtaaaaaatgaagtagctaaatcatattgcagtatttgtttttaatttttttactggtttcttatatgtgaataatactttctgtttctgttacatggatgcaatctaaaagttgtctgctcaaataatcacattcgagcatgagggaaactggactagggcactcgagtattatgacttgcaagcacgttcacagaaaatggtggtgccaagtagcctttctgaaaatctagaggtggaacaatttcagccaacaactagtgcacggcattcggtttttggtgaaggggaggtccagagacaaccgttcaaaggactcattaggtcgttgcagcagacaggctgtatgcatgtcctggatttgtattgccgaggcttaacttcccgagaaggatgctttcagtatgatcccgagttcatcgaattgcaggtatgcatcctgatttctccttttttccaatacatggaagtctcatgtctaaataaggttgttggtaaaacataaatagtccatgggataaagaaacgatatgatgactcaaggatcttgaaggagtagcttagcaccaatatttaccagattagtagtttgtttcgttgcaatattggcccaaattctgttttaacaaataactcatcgaacaagactcagctgtggtacgtaagttgtgttgcttaggtgataattcagttgcaaattaacttcttgcttgcagtatgaggctgcatggcgagcaggaaaatgggatttttcattactttatccgcaaacacattgccaacctctgcaacatgcaaagaacaataattatcatgaaagtttgcactggtaacacatttctactcttatgtaccgatgctgctatacttagccattagatatctttccctgtctatatctcacgattgcaccaaatatgacatcttctcaacactgaatttgccggtggtcttaagacttttacttaaaagtaatatgttacagaggaattttagaatagagtagttgaagtctccatactttcctggtatctggcattgcttcttgggccaagtcttagtattaattttcagttatgattatttaagctttgaacagtcatcaatattacacatgagagtcactaacttccgtcttaggcatgtctttttcgatgatttaacatgtttaatttcccaaccgcttgagagcatcgcatgaaggggattacgatgggttttatggaaacctgaaggatactaagaaggtaatgcatgatttcagtttattatcttagaattggaaggttgcaaccttcagtgtggtaaagaatatttgctttctctccttttcaggagcttgtgttgtccatttcccgtgcaagcgaagaaagcactgaatttatatactcaacagtagtgaaacttcaggtatggaattttaaaattgacattaacgtacaactcctttttccatcatgcttgtcatttgggtgcaaaattctactccttatttgttcatattcttgaatgtgataatggtctttctcttgccacaacccctttaaaagattagcacactctgggagtgccatacttaaggtcatcttgatcttaactagccaattacactgcaagagctgtcaagtttaacttatccaggtgtcgcaagttccaaaacttaactatgttgagatgttcacctttgaaaaaaagacttttccatctcaatatttcctcacaaaactatatctcatagactaaattttttcatatgtgaactttcaagctggggaatttatgaatgcaagctgcatgttcattaagatctaaggaaaaatgctgatgctaaagattccatgtctctttggaaaaacaagg

SEQ ID NO: 34744 - DNA, 598 bp, Arabidopsis thaliana landsberg
tacgaacataaaatataaattgaggtggggaccaactcgtacattctatatcacaaccgacacaaagtccttttgtttattgtgttgttaaagagatataaagtccttttagttcatcaaagttaatagaattcatccaacgctatctgatatacgcgatatcttgaattcggagtttggatattttctcttttaaacgttaacaagcgtaaagtattttcttggttagcaaatgtacatccatctcgtttttctgttataagacaaaaataatgtgcatccaccatggaccttagaccatagtccatagtccatatatagtaacagcttgtgactttgccataatatctgttgatgtacgtaatcgatcgatcatttacatcaattgatcaaatgatttttatagcaaaaatattatgacaaaacaaaaagttgagactaaaaaaaaaatccatggatttggttaagtttaattgtttatgtaatctttataagaaaattttaatcaaggtcgaaatgatttaatatctaaaacccatcagttttcttttagacgtcatgtttaggacattcaattttatactgtatttggagacta

SEQ ID NO: 34745 - DNA, 864 bp, Arabidopsis thaliana landsberg
gcttttcagaagtaaagttggtgttattgctcttgggaatctgatgaagcttgatggttgtttttgttgctactcatgtggcaaagtttctcaaattcttgggtaaaatttcttcctttactctttgtttgattgctgtaattggctttgtataactcaatgtgcgtgtgtgtttatgaagatgttggaaaaagcagcttgtggcagcaaaggaagcacgacgacgtgatggactgtgttatagaatagatttgggttatagactgttgaatgggactagtcggtttagtgaattgcatgagattgttagagctgctaagtctatgctggaggatgaagttggacctcttgatggacctactgctagaactgatagaggcattgttagtaggcttcctgttgcagctaatgtgcaagagctttgcacttctgcaattaaaaaggcaggggagttgtcagccaatgcaggtagaggttagtattggagatatgtttattgcaatgaatctgaaagagagagtaatgaaataagttcatatatgtttttgcagatttagttccagctgcgtgcaggtttcatttcgaagatattgcaccaaagcaagtgactcttcgtctgattgagctacctagtgctgtagaatatgatgttaagggttacaagttatggtatttcaagaaaggagagatgcctgaggatgatttatttgttgattgcagtagaactgagaggaggatggtgatatctgaccttgagccttgcacggagtacacattccgtgttgtctcttacacagaagctggtatatttggccattcgaacgctatgtgctttacgaagagcgttgagatattgaaaccagt

SEQ ID NO: 34746 - DNA, 471 bp, Arabidopsis thaliana landsberg
tggtttccggctttacatatcggtttctacacttctttttcccaatttgcctactccgggatcaaaaatcgaatcgaaaacaaaaattaataattacaattagatgcatatgaaacataatgatgtagttgaaaattaggataaaacttacttgtttttgctgctcagtaagtaactctctacaacgcggtgtagttgtgagagtcgaaatcaacacaatggaaattgtatcttagggttcttacaaagaaacagtcttcgcgagaatctcaaagaacaacagaatcggtaagtaaccacggatggtgttcttgatattattgataagaaacaatgatttgatcgtacaagtgttttagaaaagtaaagaataagtgtttttagccttcaaagtcatagcgttttgatagcctgaagttgagagcctttttctgtgtaccctttttgcgaagtccttgaggcgccttatat

SEQ ID NO: 34747 - DNA, 2090 bp, Arabidopsis thaliana landsberg
attggataatgagctgcttgaatgtgggtaacatgaggataagcctgattttttgagtgacttgcgctccaagtaactgggtgaccaagcttacccagcttatataaaccccctagatcgatgcattagttcttcacaccaaaacattcagcttaaaccgttagataggtagttagtccgtcggagtccgagtcgggtagaagttggtcgagtcgggagtcgtagttgggtaataaggtaagtagttccgcccttagtcttttattctttttagaatatttttcttaattttgttttcggtccgacgcttagatccatcgttagtacgtgttggcgatagctcggtcggatcaaaattattagccggtcaagagtagaatttttatctctcaacaattaggccaaggtgagtacagtagcgtgtgtagtagcacacgactaggttttattttggggttatgattcttaggcatgaggttgcatttttatactttatttttacacaattaggccaaggtaagtacagtagcgtgtgtagtagtataatgttgcatttattgttgatagtcggatctacgtttttacgtaagatcgtcttggttgtttgataagatcttgcattcatgcttgatttagtttaggatgaaatatttatgtgcttatgctagacattagtttagccattatgttgcttgattgtttgttagcgctaggatttagtatcgtatttatttgcattaattgttgtttgtttgtttgtttgttcgtaatttttattacgaattaaattgttagcaagcatattaggtgtttgattattgactgattgattgttgttggttaatcttgcttcggcttgattatcctttgcgtgttagttgcttgctagtaggttttattacgagtagtattaggttacattaggtttgtaataagtaatgtggttagtcatttttatgactaaggtgtgacgatgtcgtgattgtcccaatagctcggaatggtttgctaccacccgggactacccgacggagtagtaaaagttttaccataagggagttggtcccttgtagacggtttggattggggaagggatgtgatcgttttagactttgtgtatagcggtcggagacattgccttgtgggaaatcaacatcttatagtatagagcccgtaggatgaagagtcgttagcatgctagttttagaattagtagtttccgctgcatatactctgtaaagagtattcattgcttgtttgtttgtgttgtgtgatttcttgtcaagtatactcaatcgagtatactcgtattgattgtttgattggcgattgggattgggattttttgttatttgttagaaacccggactcactgagtaatattagattactcaagattctactttttgtcttacaggtaaccttagttggggacaccttaagggaagcacggacgttggggaaccggtgtagagtttgttatctttgtaaaatgagatttgtaaattgactcgcttttatcattaggctcgggatcccattccaaagtaagtgttttcatgttttagtaaataaaggagaaattttttaaaaatcagtgtgtacttctgatattagtcttgtccggactaacacaacttacggacatggtacgggttgaaaagccttaagccgtgttcgtgaggaacgatgttcaaggatggcctgaccttggtaccagatgtgttctgggaattcggtcggatcgtctacgtgcatcaaaagtaacgcttctggattcgttcttagtcctagaacggttcgggggtgttacaagagtggtatcagagcatggttttgttcatgcttaagggacacaagttttcaaacgttttatcgagtcaaaatgagtcgcaaagacaactttaggaaaccggtgcatccatgtgctatcgctagagggattaggtagaaggattaggtctaccttttggatgttagtgcagatttagacttattggatgaaaggaggacggatgtggtgaccacttacaagcttacatataatgggaaagaactcataggagatgatattggactttaaacacact

SEQ ID NO: 34748 - DNA, 1502 bp, Arabidopsis thaliana landsberg
gaaacacaacacagaactcaaattcccttttatataccttggaatccacttaacatcatcacaatgatctctgcccaaattgctcataaacctgctaacaactcccgctacatgtgcaacatctggttttgtaccaaccatctcgtacataagtttgcctataacggaagcatatggaaccatatcatatatcccatctcgtttatccttagataactaaaaatgactcgccaagggagtactagccagctttgcatcatccatattaaacctcttgaggattttcttcacatactcctctggtgacagcaaaagactctccttgcttctactaattctcatcccaataatttgtttagcttctcccagatctttcatcgcaaactcttctgagagagttgccttcagcttgtcaatctcctacaagtctgcacttgctatcagcatgtcatccacatataaaagcaatatcaagtaggactccttcagcctcttcaaataacaacaatggtctgcctgacacctcaagaactcagaaagctatcaaatttcttatacctctgccttggagcttatttcagcccataaaaactcttttgcaacttgcataccagctgttcttttccggacacatcactatgtaccaactccagagtctcagattttttcttcttgccatcacattgggaaacaaaccggcttatgctttcgaagcatgcagcttacacacatatgttgattcgccatcttcaaatctggaagtgaaccattcgctatcatgagcttatacctttgtcgctcatattccccaatctgccacaacttagtcttctttgcattcttgataccttttaagaccttttgcaaccaccatagaaccattagtcactctccaatctccaccgccaaaattgacatcatgtcctttatcattaagttgtcctacaaatatcagatttctcatcaattttggaatatgtctcacctttgttattttccacacaagtcattctaacaacttcaagttgatgtctccaacaccaacaatgtccaaaggtattccatctattagatacaccttctcataatgctcacttacataggttccattatgctcgggtgtgcagtcgtgtggaatgaggctattgaattaagaacccaagaatcaatctgattatcagaggaagagaacgatgcttatttggtgtcaacatccactacgtgagactcactctctcttggagaatctacagaccctacaaatgcatcaaccattactgcattagctccagctcttctattgtcttccttcttgtgtaaagcccaacaattctttttaatatggcctttcttgccacaattcgtgcacccaacaagctgtctggtcttaggttgaccatgtacactgcttgactgttcggcttcctgtgtcttgacttacgcctatgttctcaactttgaaagtagaactcttcagcttctcatgtatatatccttcgaac

SEQ ID NO: 34749 - DNA, 1104 bp, Arabidopsis thaliana landsberg
tataaaacctgtaagccttatgtgcgaaaggaaacaatgttttagtttttcgactattttgttctaccttaattttgttgtatactagtgttcgttgataactctgtaatttcttactaataaaacaggatgttaaggaaaaagaaaaattgtaaaccaaaacagaaaaatcgtaaatgtctaaccattttgactttttaatggaacgtcaattataaactactttacttaatctgaaaaaaaatgtaatacaaaaataaaaaatagttcaaaggaaaataggctaaaatcttgtcttctactccatgttatatctcatactcaccaagtcttctttctcgagtcttcgttgcgactcaaatcctactgctgaaaaatgcagcaaccaatatttgctagaatttttttgatgctataccaactgccaaaaaaggcaacaattgtgataaagaaagagatcccataaagaaaacctgagaaaaaaataaaaataaaataattagacttaaaattgaataataatcaatcacactattcagagaattaaacactacaaataatcaattcaagataacaaaaaaaaaaacaagaaaacaatgttgggtttggctcacctctatgatttgcttctcttattgctcctaagttgacgaattcatcaaccactgtcttcataaagctagttacattgatcctaaacttcaaggagcctcgttgtctagtttgttttttgactccgcctttatctattgatccaacaggagctccatctttataagcattgcacgctttcactatgtggtgagaaccggacgaagaaatggctacgagcaaactctataaatactgttcattatgcacaccaacagtcgttgattaaagtgcagcattttcatcagtactataaccccacttttgacgaatgttttaacctccggttgttgtgtcatactgtaacccatagtcttaaacgccaataagaacatgtcctcagtggaaacaaaactctatggatacccttatatattcagtcagtgttcttcatacaattcacgttgggagatcaaatcttcatgcatagatgaaaaacagtattcggtatcc

SEQ ID NO: 34750 - DNA, 554 bp, Arabidopsis thaliana landsberg
aacgtatcaacgatttgcttttcctttagacgttcttgcatcggattggtttactcaactccactcgatgaaaaagttactatcttaaaaagaacaaatgcaaattcaataaaattccccaatatctacgcatgaaaatatgattctgtcttttttttgtttgtctatctttcaatactttaaaaagtgtatttctagaggcgatttgtcatttcccgaataggaatttgagtaaaaaaaacactctgttttttatttccactaatatcaaatcggcgaatatagttcccaccattcttatctccttgtcgtcactcggaattttttaaataataggatcgctttaataatataatctctataatttatagttccttttccaatattggcgtctccgttgaagctttccacaaatctcaaatttgtttggagactctcaaatgtatccttctctcgacgatgatttcgtctctgatttgttttgcttcgatcaaaggttcgtcctttcgcactcttctcttccttcaccttcctctggtttctctatctctttc

SEQ ID NO: 34751 - DNA, 2550 bp, Arabidopsis thaliana landsberg
  unsure (1)..(2550): unsure at all n locations
aagtcttcttcgacaattctctctagtatgctcaaattcttcgttttttaagcaacctgttataaagcaaattccaaggtatgactttccacaagtatcacacacattttgcttgagaatttacccaatttatagcttttgccatctattttnnnnnnnnnnnnnnnnnnnnnnnnnnnnnnnnnnnnnnttgcggtagccatatatacatctcaaaacgattcttgagctcaattctatgtcccctcaaaaacctaagcataagctcatcatcatctatgaaatgacatgcaaaccaactcaataagtcaagctattcctcatactctctaaaagcatgcttccctggtgaagttctaaatatttattctccatctggtacattgcctccccagaaaatgcttcattaagaagtatgtgttgaaatcctcccaagtcaactcatatcgtccctacatctaggctacaaccttatcccattatagttgagtttcttcctttaagtactgaaccactaactccttacagtacttttgtagacatctaacattatcaagattctttttaattttgttctttggttattaggaacaatagggttagattgtcacaaaataactccatacacacgagcttcaaatatctgatagcatccacatacgatgtatcttgtctataagcatgcacaagatgtggtggaggtggggatgcctcattcggtaatgccatgctgtagaatattcacttctgatgctcctctcatacctcgctctctccgcatgtattcttggaacctacaaaatttctaaacatagacttctcattagcctcaggacattcactagtggtgcttctgcctaagccacattagacggcacaacttccggagactagtgggcaacctctaatttttcacctaagtttacctctaatttttcacctaaaattagtattttaagctaagttccaaaatgaccaaaacaaaagacttgaaagaggagaagacataattatgtaagagtttccttacccaaacaaactagtctattagatcttggttctagtgggtgaagtgtttgacggtgactatcagtgaagctcatatggtgaccaaagcctttgcctcaccataattctcttttctctctccctctctttgtctctctttcgtttgtttctcttagtggctaaggttactttgctaaacttagatgaaaattcttatacagctacatattaaagattaattacccttgtttttgggagtttgcttcatataggcctagtgggctacaaattttgatttcaataatgtatagcccatttcttgagattgggaatgttacatgtgaactttgaagacacgtgtgctctggttactcggctcgaatctatttgtttattactctacactacaacaaatattcgcattgatagcacaagaggatagctcattttctgtaactactatgaaagatgaatttttattttgattattttttaatagcgtttgataaacgctatgatagaaaatcactaagcgggaagctaaaatcatctatttcaccaatacttatgcgaaaaaattcacttaaccgcttattgtctcagatctaaaaatattaagcgacaaaacgctaaacacatcttaagaaaaaaaaaaatccccaaaattgattccttcaaaccctaaatttcttctttgtccatctctaattccacttcttacatcccaaattctacattgttcttcacctttctctcctcctttctctcttctttcactcatcctctcacgtttcagatggaaaaggtttgttgattttgtctctcttttccctttgaatctatagcttctaatccttgtttgttggttgtatcgctcctttgttggttttgtctctcctctttttttgaatttgcagctcaaaagggtaacgtttttgaagtgtttttgtgcacacaaggtgttcgacgaattgactgtgagacaaaaaccaagaaaagactcaacatctctttctctgggttcgtttctctcttctccaaggttgtggtatatctcaaatcactatgattcataaacctaattacaaatactttatctataacatcttaagtgttcttcctcatgttgaattatgctgtgtatatggttcgacattgcattcagccgtggatattgtagtatcttaggtcattaagcaaggtctctttgttagcatatgtagcataaaaaagattttgttttgttctttatgttgtttggtgctaatatatttcacaaattctcattgctttctctcatgattctctaaattgctgttactctctttggatttctttaatctgtttccatggatgattacgtttagctactttaattgtatttctacattgagtttataatgatttggttatatgattaatagttttccttctaataatgactaataattttctctatttcagtttactattgacaatatacttagcttcaattaagctactaggagacccagttttggttagaccaagagacgagaaaaa

SEQ ID NO: 34752 - DNA, 2009 bp, Arabidopsis thaliana landsberg
  unsure (1)..(2009): unsure at all n locations
tcatcccggagaaacctaacggcacaactaaaggaggagatgaagaagaaggagagtgatgaagagaaggaattgtacgttaagatcaacatggaaggagttccaataggaagaaaagtcaacctttcagcttataacaactaccaacagctttcacatgccgttgaccaactcttctctaagaaagattcgtgggatctaaacagacaatacactttggtctacgaagacactgaaggagataaagttctggtcggggatgttccttgggagtaagttttaaatcaaacaaaactaattccatttttttttctggaactgaatatgaacttactttatcaaaaattcattttatatctatctacttttgtttttgtcgaatttaacaaatatttttagtatgagttcctaaaaagagtttggccatttctcatcagattattattttcctttaaaggtcatatttttggatatttatctgataataatttgaatcattggacatattaatgatatagtttactttatttgttaggatgtttgtatctactgtaaagaggttgcatgttttaaagacctcccacgccttctcactctcacgtaagattacaattcttacgaaactttttcatacatctcatcacttaattactgccttgaaattaacttatatatttatttattttttcacagctagaaaacatggcaaggaatagagagaggttggccaaaatcatcagttcgatggtttgtttttaatgtaatttttgtggaaactaatggggtttggctttgatttactggttttctttttcacttatgtcctacgtttttgcttgctatgttatttcttggttaggaagtaaatatgctgttcgtttaagaaatcgggggttagtatgttatcgagtgtataattatagtgtaagcacgtaagttgattacaatgcctgatatgattcatgccttcgtttcgttttttagtagggaaaatggtatttaattagcgaaatcaaaccgactcattttatgtttgtttcagagaggtaaaaatccagagagcctgtttactatgtatgagtaaagattacccgaaataattgagaaatagatactagaagctatccatgttaggagggttcgagttttataacaccatccaaaaaaaattgtggttttgtaacacacatgagtaccaattgtttatttcacaaaagacaaaccatttatttcatgaactgtaatcttgttatgttcatgaattatttcggtataacatgtaattaactcgagtaatatcttaaaatagtatttagagtaaaagaatagtagggagaaagatactttatttttttataactcatataattttaaaaatttcatagacccaaaaattgattatggagtatggaaaaaccatgttaaattacttaaattttggtggctaatactactcgaactcagatggtgaaaacgactttagacttcattaatatatatatatatatatatatttatatgagtttttacttattgtcaattggttttggaattagtaatctatgaaacttaacatagtatcagtctatcagaggttgaacattcgctgacccgttaatccaacttggaaaatggtccgattacctctattaattgatgatccaaagaaaaactcaattatgtcgagataggtaaaaaaacattattttaaaagaaataatgaatttaaaattagtaaataaaatttaaaatttaaaaatcctcctataaattttgtgtctcacaactttctttcaaactttttttcttcaaaaatataccgtatgctgatgaaatttttatctttaccaattaagaatataatcttttgtttccatctcaaatcatcatcatcacctccaaagcgtttagcaaccccaaaaccaaccacttggcgactacacagtattttactcaaaacatcacaagtttctatganacgtaaaacgatgagtttagtaaaaaaaaac

SEQ ID NO: 34753 - DNA, 1857 bp, Arabidopsis thaliana landsberg
ccatgagatacaagttgatagaaagaatcctgatggacctgatcaaggttttctagtcagttgcttctctgatcttcttgaccaacctctctttcgtcctccgagtaacggatctgtacttaatggtcacttgagacttcccttaggctaccaaatggacgcttcttatttctgtaagtagtctcttaattcttctctcaagattttgtctataatgattaatgttggctaatgtattaacttgtactctcagatcttaagctaagatggaacataccctgtggaccaaacagtgtgattacattcccgggagctgtttggttaaagccatggtactggtggtcatggcctgttcttccactaggtttctcatggcacgagcagcgtcgcgccactatagggtaattttaaatttttaaatgatgataactccctcttaagctctgtatagtggctaataataatgatcttgcaataggtactcagccgaaatgcctttggttataatccaagcaatgttttaccttggaatcatagtggttacacgactagctcgtcctaacataaccaagctatgttatcgccgctctgaccgcaacttaacaacgatccaagctggttttaagttgatcgcgcttctctctgtagttgcagcctacatcttcccattcttcaccatccctcacactatccacccactcatcggctggtcgctctacttgatggcttcttttgctctctcttccatttcaatcaacactctcctcctcccaacgctccctgttctcactccatggctaggaattctcggcactctccttgtcatggccttcccttggtaccctgatggagtggtcagagccttgtcagttttcgcatacgcattttgttgcgcaccctttgtgtgggtttcattccgcaaaatcacatcgcacctccaggttttgattgagaaagaggtgttgttcccgcgattgggagactcaggggtcacttcaggcttcagcaaattgtattagggagtctttatttgacatattgtttctctgtatataaaggattattattgtttcattcacattacatttatatcaactcactctaaccttctttcttttacctagtcaaagtatcaatttcggtagcctgatttcatactcttcattattgtttttaactcactctcttggatttaaagatttgtagcatgaaaagttaaagaacacaaacaattgagcacactctgtttttctctctgttgtttatttgggtccctctttgatttttcctctctagttacaaaagccccctagatccaggtcaagctgtgatgtagctagaatgaaattacaagtagagaccatagagattcctttggattattattaacttgcctactagacttgagatagtatgcttcatatagaaaactcctaatttgatgaagagtctagtctatattctctagggttagaacattttaagattaataacgaaaccacctttctccatagctccgaaacacacttgtacgcacctactcatcacacaaagatattgaacaaaataatgaatcattcactagaaaaactgtagacgaagaatattaagagcaaattgtttacccatttctccaagtttcacagctttcgaattaggttatcgccgccaagtataataaatagcgacatttattataagacggcgagttttctttgggccacttcacccattgggctacccatcagcgaactagtccaaatttttacaatatacgatccatatattgctaggtttattggtcaatcacgtgttattgcattttaaaattgtaataaagttattgtctaaatcatg

SEQ ID NO: 34754 - DNA, 869 bp, Arabidopsis thaliana landsberg
atgagaggttccaaataaagcatacatggagaactaagtttatcactccgtttcatcaattggtgttgggcattatgaatattctatttggacacagagtgacaaagggacgcagctcttttacagcaggagattggttgtttacaagcttggaagtgaggccaagaatgttgtagaggtgtctcaacgtgtgtatcagcttgttaaactgaaatttgccaaagacgaacgaaagcttgaagtcatacagagccaaacctttgaccctgggattggaattgaatcacaagagctacttgagaatacctattcgaactgaaccttgtggtcaaggttcttccaacaggggagttttgatataggaaactaggcattgatatatggttagatacgtggcaatacatgagtggagacagtagctgtgagacgtggcaagagaagattggtcgatgagagtgttagagaaagaatcgagacgcggagatatatagctaatgaggatcatttgcagaagaataagaagatttggattttgttgtttatcgtttccttttggattctctctgagaatcgttcctcatcgttcgccggagtttcatgttgaactcttgtaaatgagaagttgatatcgcgttttatgaacgttgtatcaatctgtcattttcattaatcgaaagtattctaattcgttcctccgttttccgttgtcacaagaactctatacaaatttattgatttcttatactaacaaaacgctgacaaagctgctaacaaggatgatagggaaactctactttgtgacatatatcaggggcatcttttcgacgaatagatttcataccattacagcattacaggtcgaggctggc

SEQ ID NO: 34755 - DNA, 2188 bp, Arabidopsis thaliana landsberg
aatagtagttaaaaaaaaaagtatatcaaaagaagaaaataggaagaggaccataagaaaaaacttggtcaacttaaaacagctgataatgggatataaaggtttcacaattgggaagagttgttaaatggaaatgtcaattgagtaatgggaaggaacaatttatgaaacaatacattaaagtatacatatgagttgtcgtgatgcgaaactaaagtaggacccttatttatctactgtattaaatacactcattattgattacaaaaaaaaatatctataaacttcaaaaacaaagaataaaatatgattttgtttgcccaaatcgttagatctcagaaagagagacttgtggaatatagttgtggtcatcaactatgcagtgatatgttttttttaacaaccaagattgaataaagtcatggtcgttgcctcgttggaaaaatgagcacaagccattttccaacttgatatactaatactaattacaacaacagtgatgatgatgatgatgatgatttgatgaaatattgactagaacttcaaaactaattatttaataatcgagtgggtatgcaaaacatatataaataaatgtgagctatgagaagaagatgtgtaactaatttgtgttgtgtcaagcttacaaggaccaaacctttaaatttggctattgatgaactttattaccaagctaggggagactaagagagtacaagtagcaaggacaacaacaacaacaagaagtggagaaacatcatagcaatgttgtagtggtaggatcaagctattgatgtatgtcaacataatgttttgtcgatcaacttgatagtggactgaaactgttagtgtccacaagctacactcgtgcaactacgtgtgtttaggggatacatatatacactcaaatactctacgcgttaactacgttatatgttaaggctttgaatggatgttacgggcggagcggactaaaccatgttgtccgctccataccaaatttatttctacagtatgtaaaatcagtagctagtttgtctacggcgatttttttttttttcggtccacagactacagtttatgaatggtaaacaacaagagatccaatcccgcaaatggttttgtcagtccgccgtggccatttgaagcctaaggtgcacctcaccacttacatttgctagaatagcaatttgtgtattgactgggtcttaataatcagtttggatatagattgatctagcgattcattatttttggaattttctatgatatctctcaacaacttcaaaaacgttcaacaagacttgtggaaaagtcttgaataacttattaaacatgtgttttacaagcataatatctcaaggaagattaattacaactcctaaattatggtattgccggaatcacaaagttctggtgcaacagtaacattacctaagatgtataaagctcatcaaattcaatgtcttagaaaggaaagaatgttgccagggatggattctcaaatggtttactagctttgaacctgaagatgtgaagaacttgatacatcatacatggctgccttcatagctactctggtagctattcttgagatcaggatctgtttgggttgcaaaacagtcgctggaatcaaaatagtcattgaatatagtgttccgattatctaaaagtgttgttggttaacttggatttccttccagactgaatccaactcctccagtggttcaacctccgtgatttgcaaattgtggcttctttgtttccgattaactggaatagtatatctaatattgagatcacagaaaacgtacatcgtttctgttcttgtccaaaattgtttctctctctctctctcgcctgaatagtttctgaagagtcaggtttcttctttgttgtttcactttctcggtttgtccgatgatcgtctcttctcccaattttatgggcctattgggcctttttacttcacaatttatgggctttcgtatcaaaaatacaaaataaacaaaaaaataatttacgggttaaaacttaaaaccccacgattggaatgggtgcaaaataaaccagtcctaaaaagtaaaaactgacaaatgaaagagatttgagaaacttaaaagcatacaaatatgaactatacccataatggaaagctaatagagttaagacttaagaggaacaaatg

SEQ ID NO: 34756 - DNA, 1506 bp, Arabidopsis thaliana landsberg
taatatgatttgttttatggggcatttgaaatgggcagggcagacagcagaaattggttgaggaccagagaaatcttttgcagacacaggcgcaaaccaaagcgcaaaatctgcgatatgaggatgaattggccagaaagagacagcaggttattctttttttcttatgtgttctcgtagatggattaatctttctgaagtataaaaatcttacaaatgattttggtttgggagtaatgtagacagatcatgaagctcagaggcatcataatgtggaattggttaagatgcaagaggcttcttctatcaggaaagagaaggcaaaaatcgccacagaagaacagatccaagctcagcatcgccaaactgagaaagagagagctgaacttgagcgagagacgattcgtgtcaaggccatggctgaagctgaaggtcgggctcatgaagccaaacttactgaagagcaaaacagaagattgcttatggaaaggattaatggtgaaagagagaagtggcttgctgcaatcaacacaatgttcagtcacatcgaaggtatggaaactgataaatcaagaaaaatatatctttttgcttttgattttgaataaggaaagatcagttctttttgttccttttgcttacttctatatgaaattggcagggggattcaggaccttattaactgatcgaaataagctgattatgactgttggaggagctactgcattagctgcaggggtttatacaactcggtatgcatctccgaaccaaataagctattggatattatgggattctctgaaccagtctgatttgactcaagtgatcttagattcttttatcattttctaatgtaatctatttcatgaatctttttgtgtttgacagtgaaggagctagagttacatggggttatattaataggatgcttggacaaccgtcacttattcgagaatcttccatgcgtagatttccatggacaggctcagtgtctcaatttaagaacaggatctcaggggctgcagcagcttctgcagcagaaggcaaaaagccgcttgataatgtaattctccatacttctttgaagaaacgaatcgagcgtctcgctagagctacagcaaacaccaaatcccatcaagcaccattccgcaacatgatgttttatggacctcctggtaccggtaaaactatggtggcaagggaaatagctcggaaatcggtgagttattatcaaaactatggtagtagctttgttagtaccgtcttcatgagttcttagatacaattatttgttgcagggtctggattatgctatgatgacaggaggtgatgttgctcccttgggatcacaagctgttactaaaatccatcagatatttgattgggctaagaaatcgaacagaggcttacttcttttcattgatgaagccgctgctcctctatgcgagtaagatctccttctcttaattacaaagattagtggatgttttagcgttttaggttttt

SEQ ID NO: 34757 - DNA, 1079 bp, Arabidopsis thaliana landsberg
  unsure (1)..(1079): unsure at all n locations
agactctttatacatgttggaaaaaaacatagacgtggtttagttacaagctagtcaaactaattctacggatcttttgtcatagttgaaccaaataccatcaagtttatagactaaaatagtagcataactttagatagtttaaaacaagtggacactaaatagtttctaactcgacgccaaaaaaatagttcctaactggatggcaaaaagttcatacctcatgaagagctaattaaatattaaaatataataacagaattttcatttttcttccattgattttttttgccatgtgttatctcaattgattcatttacaagtattattaaagaagtaccatatataataagcaaagagacactctcactctctctactcctctctccatctctctagatcactatctctccttctggctcaatcaccacaaactcacaatcaaactaaaagtaaaataaaaccagaaaccctccatctgagtcagaagctctcattctctccctctctcttctgcaacacaaagatggacgagaagtggaggctgtcgaaaaaggatgcattagctgcgtcgtgttcatcttcttcaacttcatctaaatccaagttctctagaagcttctccacaagcgcttcctcctcaaaagctcctgcattcgtacggagctcatccaccaaatgctcagtgccttcatcttcgtcgtcttcaatctcaagaagttcatcgaaaaaagagaaagggtcaataacacaaaagtacagtagcttggccaaagaacagaagggaaggttttacatcatgagaaggtgtgtggctatgcttgtatgttggcataaacatgattcctaggtagatatagatctcatgcatttttattctctttttttgaatgattagatcagtttgattctctactctaagttgccacaagtttccatactagtacattgtaagaagagattctnttttgataatatattactattaattttgataagacagagtcatgtatacagaggtataaataatttaaagtgtgtcgtctgatgaagaaaaaaatttgaaacatcgaacgttt

SEQ ID NO: 34758 - DNA, 1783 bp, Arabidopsis thaliana landsberg
  unsure (1)..(1783): unsure at all n locations
ctctgcaacaagactacaagttgaatttcaagtatggaggaaaagtctagaaaacttgcgattacttttctacctctcatgttgcggctgactctttgggggtggggacaatgggtgttgctctcttgttgaatttgtaaagttgggcattctctaagaccagagaattgtcacttttgttcttattgtgttcctttgtgaaagtacaataaaatgcaaaccacagaccatgtgtttttgcctaatgagtaatatgattaaaattttgtttcacaaaactattgtttatcttctaaaccaaaatatatactatatgctaatctgcctctattaaataaataaaaaataaactgcgcaataaaagaaaaaaaatcttagatattttagactatttaatttgggcaataaatgttttagattttttaagaatgaaggatcgtttgtggtagactcttgcctttgtgttgtttttgtttttgttttgaagatggtaatggtatgtcaagtgagaaaatagttaggcctggacataatacccggaatcgaatacccgaaccgaaaaacccgaaaaataatcgaaccgaacccgaacctaatttttagaattatccgaatgggtcctagacttcactacccgaaaaaaccagaaccgaacccgaaccgaatctaatacccgtgggtacccgaatacaaatataaacttaaaaatattatttatatatatatttgtaatacctcaaacacccaaaattaaaattataaatccgaatataatatattttttagtaattcatatacatttggatatatttgggataaaaataaccaatgttatagttttcttttaaataatttaaatattttggttatatttggataagaaaataaccaaaatatttacgggtaatcgggtatttctgatagatttgggtagatatgagtacaacacccgaacccgacccgaacccgaaaatattttaggtatttttggttactttttacatttttactaaaataaccgaatcgacccgaactgaaaccgaacagaaattttaaaatacccgaatggttcccaatctcctacccgaatagacccgatacccgaaaaaaagaaccgaacccgaacggatacccgaatgcccacgcctagaacccatctaagaaatctactaaaaacctttactgaacttgttcttaggggccgaatccacaataaactaggaatgcacaaatttttctaagttaaacaaataaaggatgagttttaaactaacaagatttgtgaaataaaaacaagaaaacctaaaatgctaatggaaaatatgaacaaaggcaattgaccaatttaaataagtgtctaaggtacgcaattaccaaacataatacaagaacaaaatgaatgataaaaggagcaatctagaaaagtcaacaaaagagccaacaaaggttattgacttgagtgatcaaatgcgaatctaagatgctaatataatcaatcccttgctaatcatttggccttagatcactaatctagactaattcatttccatggtactcttcactgatcatctaatcatcaaaaacttccgttcgcaatcaaatgatcaaggagcattaaatcccagcttaaataaccacttagcaccgtgatcatcaatttctactgactaggaatgctaaacactcactaagttnttnttggtaatttcattgaacacaatccaagcatgaaactttctatgatccacactagcttaatcaaagacttatctagcactaagaa

SEQ ID NO: 34759 - DNA, 1421 bp, Arabidopsis thaliana landsberg
accacttgcggtatatatatcattatgatcttggactggtgatgctttgaggattttttgacactattagatgtttgtacaggttactgtgaattctggaggagttgttttctttgccctgttcaatagttccagctctgaagatgcctctcgtaaggaagaagcagcacttataaaatttgcatcatggaggatggccacgcaatcagaacgtctaggttatgagttttccaagtggctaggggtgcaaattccgcacgtgcttcttttctttcttgtagcttttaaaaaatgtagtaatggttttgctcatttcactttctttctagaattttcaagtaatgagtaatcatcatgcgacaggctagagtaattcacagctgtaatcctgagtggacactgatcaaagaagccactgaaaaagcacaagctaaagcgacttcggagggggacgaggttggtgaaatgacatgttcagaacttctggaagcccttgaactcagccgttgtcttctcttaatgaggtgaaagcacaagattcatctttattctttatactttttttcattttttacttggaccaggagcataatggtgacagtttttttgttcctttgcattagtgtttaactagatgatagtaaaccatttgaaatatgaatataccatttgataatatattttaagaaaaataaaagatgttatgttattagatataaaaattgtattataaaataagaaagatctaaattacaaatatgaggtggaattattttattggataaaatttgataacaacagtttaacagaaatctaatcttgctttaaatgataataaatatgagagaaatagctgaacagaaatctagtcttacctaataggattatgtaaaatctagtcttacctaataggatcatgtaggcactttcaaatttacaatttttaatgtgatatttgtatagaacccctcttcttagcacaggattctctatttgtgattacagttatgttcatggatgtccaatgctggagagcatgagtagttttgaaactgaagaaaaagcagagagagctgctgcagctctagggagaatcttggtgttagatctagtaattaggaacgaagacagattaccgtgtcgtcagctgagatggcgtggcaacccggcaaatctgttactgacagacagaattgtgtcttctgcaaagcatcatgaatgctcatttgatgaagcttttgattccgccatcaaacggtaccatccaaaggactatagatccattcaaagggaaagaagagcttcttccgtagatagcagatccaggttgagtatcagtgatcaaatgttggtctcacaggcttctgatttttctgatataacggaatcgcctagatcatatgatactggtttaatgagtg

SEQ ID NO: 34760 - DNA, 858 bp, Arabidopsis thaliana landsberg
acggacgtggtagctaatacggttacgaccaatacgctgatttcttccgatgcgaacattacgaacctgtcggggcgttgagggcttaagtgtaacgggcacgatcaccgcggatgcgatcagcacggcagtattgactgctacagcgggtaactttaatgacataacggtaaacaatacagttatagcgggtggtatcagtacagcatccctgactgctacagcaggtaacttcggagatatcaatgtgagcggcacgatcaatggtggtaagttcagcggcacggatgtggtggccaatacggttacgaccaacaccctgacctcaaccgatgcgaacatcaccaatgcgaacattacgaacctgtcgggtcttcagggcttaagtgtaacgggcacgatcacagcggatgcgatcagtgcggcaacattgactgctacagcaggcaactttaatgatattaatgtgagcggtacgatcaatggtggtaagttcagcggaacggatgtggtggccaatacggttacgaccaatacgctgacttcaactgatgccaatatcaccaatgcgaacattacgaacctgtccggtcttcagggcctgagtgtaacgggtacgatcacagcagatgcgatcagtacggcagcattgacagcaacagcaggtaacttcggagatatagccgtaaacaatacagttatagcgggcggtatcagtgcagcagcattgacctcaactgatgcgaacattaccaatgcgaccatcacgaacctgtctggccttcagggcctgagtgtaacaggcacgattcagcggatacgatcaaaccagcagcattgactgcaacagcaggtatt

SEQ ID NO: 34761 - DNA, 4688 bp, Arabidopsis thaliana landsberg
agagattccattttgtgttctttccattgatgacgtggcagtacatgtcatcgcatcgacgacctctccttatcttacgttatctgtaaagagagagtatcatcgtttttgcgtttggtgactatataggccaggcccaattaaaaatgggctttactatcagattagtaactgaccaaggttgagttgaaacttgaaacattggagataaaaaattgtttccaagatcgaagtgaaaacaaaagatacagtactcaaattcctctactaacacttttgagatgaagatcagctagcattgagaatttgcctgaaatgatttatgagagaacgcaaggttttggaaacgagggaaagtgaagggtaatgcatttttgagatacgtgcgaagcagttcacagcgaattcgtttgggagagacgtaaacgactcacatggtagatgctgaagcggcgactcaacttcttcttcggggatcatcatcgttggtggagtcaaaaagtcatgaattttgtttaatttatcttgatgcaaatatcattgtttttctgtttctggaaatttatgtttttaattgatgaaaaaaaaacaactttcaaggattcttctttgctttcaagaaatagaaccttggataccactcaactataaatctataactgctactgtagtttacttgttatttttcctttttcacgctattcaaaacaaatcttattatagctatattataaatcgatgacaaaaatactcccgagaagtatatggtaaattcaaactggaaaaataaaaatgggaggttttatatttcttaatttgtgttagatccccgtgaatttagggccaatctccgacaaagaaactcacgagaattatttataccaaattcagacaaagcacaagagtcgagagacactgttcctagccaacgtggaataaagaaatactacatgtttagtcgaatgtagtggcaacattcgaagtagcttaaaacggagtcgtttcgtcttgtttggattctcgtataaagccttccttcacgggaaggtcttgtaaagttgttgtaactctctttaagcctaagagaaaacttcaacaagaaaatggccgcacacaaaaccagtgagtatccaccgttgatttcaatgctgatcatgttcatcatcgtcctagaatcaacgattatcaatgcaagagaattacgaccgtccgatcacggtctcgagtactactacgaaccaggcgagtcatcagaaatgacgtcattcttcggaccaccttcttcaaatgatctaacgtcgatatcatcaccgtctagctcgatattgccgagtgcggtgaagtctccaatgaagacgctatcaaaagatcaggatgatgatcgcgtgatgaatcacgtgctggttgtgggcagcttggtgtgtggactctccggcgtggctttgatggtcgcttctgctctcatttattttctcggttaccctaaaacgcaaaattcctctgttaattgtgatcacattcataataataccaagtagaatcgttccttttttttggggttttctctataattttctcaattgtatcaagaacaataaagatgttatcatgtattattgtaagaaaacagatactaataatcttttggttggttattgattatgtttggtgtgttcggttcaggaaaatgatttgaactggttcggtttgggaacattttgtcaattcggttcggttattgctaataattagttaattttaaaagcttaaaagaaaaatctaattaattaattaagaagtctgagagcgtcagttggaggagtccaaaataggagaagaaggaagcttggcctttgaggagattcaaaggatcgtgttgcttactgtatttaaaaaccctagagttcatcatcatcttcctctcattattgattgctctaatcaggttccgacgagactaataatcctttctcagatcgataacaatgtctcactctgctgtttctcaggttagatcctcgcaacatttccttatttttttagtcaacgattggattttatatcttcttgattatagtgattatagctggagattttcgaatcctctgttttgtttaggggtttgatttgggtcttaatgttccatttgtctgttttcggagaaaacgagggaatttttaaaaactttattgatttgaggttttattgatctttaatctgggtttaggcttgtctttaattcgattaacgatcttgtcttagtgatcctgtatttgagtttcatttgttatcagaaaggagttttaatctgatggagtttaaatttcttctatacaggctggtgctgtctcagtttcaattggaaacgaacgttctcttagaagatccgtcttcaaggtgatgcatctaatctctcatataagtataaagattcgagctttgagctgtgttcatactcagagtcatggattctgattgtcttctacatgatggctagtggtttggttggttgagtttgatcttgaaccatcggttgctttgtgttgtaccacttcttcattctgcagcagaacaatagcataagcttcaacaacaagtcatggtcatcttccttagcattgaaccagaaaacagcaagcataagagatgggaaacggtacacgaacacgacaatttgtatgtcggttcaacaaacaagtagttccaaggttactgtctctcctatagagttggaagaccctaaagatcctcctttgaacttgtacaaacccaaggagtcgtacaccgctaagattgtctctgtggagcgagtcgttggcccgaaagcccctggagaaacttgtcatattgttatcgatcatgatggtaaccttccttactgggaaggacagagttacggtgtgattcctcccgtaagtcatgtccctcgtgctgttacgttgtcttcaaattgttaccaccattcttaatctcttaaatctattaatgaactggaccttgtgcgtgtagggtgagaacccgaagaaaccgggagcgccacacaatgtgcgcctttactcaattgcatcaacaaggtacggagatttctttgacggtaaaacagcgagtttatgtgtacgtagagctgtttattacgatcccgagactggaaaagaagatccttcaaagaacggagtctgcagcaatttcctatgtgattcaaagcccggtgacaagattcaaatcaccggtatgtaaactaattacccaaccaactgatctcatacttaaagaccccttggactaagttttttttaactcaatatacatttcgaaaccaggtccatctgggaaggtaatgctattacccgagagtgatccaaacgcgacacacataatgatagccacgggaacaggagtggctccatacagaggctacttacgtcgaatgttcatggaaaacgtcccaaacaagacatttagcggcttagcttggctcttcttaggcgtggccaacaccgatagccttctctatgacgatgagtttaccaagtacttaaaggaccacccagacaactttaggttcgacaaggcattgagcagagaggagaagaacaagaaaggtggaaagatgtatgtgcaggacaagattgaagaatatagtgatgagatcttcaagcttttggacaatggagctcatatatacttctgtgggcttaaaggaatgatgcctgggattcaagatacactaaagagagttgccgaagagagaggtgagagctgggacttgaagctttctcagctcaggaagaacaagcagtggcacgttgaagtctattgagctctttatttgtatttgctgttttgatttttgatttaagaatcgtaataaatttgaatttggtgtttttctacttttcaaacatgatatgatgataatatctgaaatttgttggttttgagaagagaatattctcagagaataatcaatatatcatttatgtagtgacatgagccatcaagaaaacgacgaaaaggtatatactattaaagttgagaataatcttatcttacatgtgctgccataaacccaaccaaaggttatagaatattgcataaaatattcgaatcgcctaacgtcattttaatgaaaatttagagagtttataaatcataataatcatcggtttaccaaaaaataagtattttgaattttcggcttttgttcggttatgtagctgaacaattcgaattagtttcttgttaaacgagtctgcatcatagattcataccgaaccgagattactctcttgtctgatgtctctagaattcaaacaaatacgaaccggtttcgctatcgatgactcacacaacagaaaataccaataagaatcgggcaacgggtagaggttaggtccccgtggacttaatcagtagtgtaagcgagctgcttcggtcagcaaattttagatctgcccgtaatctgctacgtgcaatctaaaacgcttctctaaatatccacttgtacgatcgatattgcgtccgcatcaattgttacaaactctggcgtttctttacttgctgaagactgaaaacgtcatgacgttttatgctagttgagaaggacgctctgaagcttgcggatattaaaagtgcggaataaccttgaggaagggaagaaaaggacactgcctcgctctctctctgtt

SEQ ID NO: 34762 - DNA, 612 bp, Arabidopsis thaliana landsberg
catttgttttcataagtaataaaaaaaaaacctaactttcttcccaagtgaacttcaaaatgcagccgcaaacagacgttttcagcctccataactacctaaactcatcgatactgcagtctccgtatccttctaatttcccgatatctacgccatttccaaccaacggtcaaaacccgtacctcctctacggattccaaagccctacaaacaatccacaatccatgagcctaagcagcaacaactcaacatcagatgaagcagaagagcagcagacgaacaacaatataatcaacgagcggaagcagagaaggatgatttcaaaccgagaatccgcaaggagatcgcgtatgaggaagcaaagacaccttgacgagctttggtcacaagtgatgtggttaaggatcgagaatcatcagttgcttgataagcttaacaatctctctgagtctcacgacaaggttcttcacgagaatgctcaacttaaagaagaaacatttgagcttaagcaagtgatcagcgatatgcaaattcaaagccctttctcttgctttagagacgatataatccccattgaataaagcatttgtccccgattcatatttatgaaaa

SEQ ID NO: 34763 - DNA, 939 bp, Arabidopsis thaliana landsberg
  unsure (1)..(939): unsure at all n locations
cattcacatgtgcctagggatcataggtgtacgacatatcataagagcctgacggatgctgctctctaggttcattggttgagtactcatagactacggccaagtgatcttattggaaacaatatacagcacgacttaccaaagttacgtggtgaaccctacatagcgtgcacacctgatactcaaccatatgaacacataacgtgaggctcatattgtcctcataatatcaatagggcatgccaagttctgtacgatagtgcctatttcttagatcgcttgtagccttgagtaggtgactgggagagcagttctacagctactgtttcagtatcagtcattggaccatgatggatcgatcctaactatgcttcttcaatgactcatttcgacactattgtnnnnnnnnnnnnnnnnnngatatgtaaaccactttgtcttagttaaaattgacgacttaaatggttgattatttcgaccttcaaagtcaacaatacaactacacgccttgatattttatagcctcaattgtgcttaaaatataaatcaccgtgacatacctttcaaattttttttctttttgaaaacaaaaaagagaaccagcgaagccacaataagtactagtccagcaatcgacgcaatagccggtataaggacactcttgtttttaattttgcataaattatccacacaaagcttcgggtttccatcagtcctacagatcacatgtgtcactttaaattttgagagaaagaaaggaaaagaaattgtgaaaatcttacagtaactgtagccctttcttttttctgtcacgaagggcttgggggacccgacccttgagtttgttccaacttaagtttctgtcaaataataaagttacgtacatgaaaaaaaatcaactgaatatggtgcaaagatatgagatagaacaatgtttca

SEQ ID NO: 34764 - DNA, 3162 bp, Arabidopsis thaliana landsberg
ctcatggatgagtagaagcttctattaagaaccatgttccattttaagcttcgtattttgttatgttcacaaatgtcatcgactcgtatttatactcaatacatcgaatcaaacgtattaaaatacttgctgacgagctggatgaaccgtggtagagagacgagttggacaaaccgagttgtttgctgaaggtctagacgagctgggcgacgagataggtggaccatgcagtcaatggacgaactgccgctaggcgaggaggtagatgagttttgcagtcgagggatgagctgatagctagacgtggagttggacgagctgactagctgacagctaggcgaggagatggtcactgagtgatgggaagagcttgaagacgagctgaggagcttgaggatgagccgaggagcttgaagagcttaaaggcgagctgaagagcttgacgaagaggagcgagctaacgagcttcttgggaaggacgagctgacaagctacttgagacggacgagctgacgagctacttgagacgggcggaacccgcgataatcgcggatttgcatctcacttctctaacttttgtcggcaagaccttggttgggaagctcttacctcggaccgaatccgagcatctggtaaaccacttcggactcgtcctgacctcgctatctcttcacctcccttttctcctcgtatattttgcaaagctgagatgtctggaccatcgtaccgagctgaaaagaagcgtgagagggaaagagctgatcaagaaaaggtcaggatcttgtctgacagggtcgtgatgtcggggacccttgaagacagcaaactccgagctgcagagaaggccaagcatccggtgaccgacagtaaggccaaatttcgtcaagagcctggaattttgacagtaagaccgaaggactctcgtggtccccggttctttgattttgcagctaatcttggaattcaactccgtcttctgcagccacgaagatcagctttttgacaaggatagcgaacttgacagctttaggcgaaatgaagacgagaacgctcatacggtggagagggccagcagggtgctgaagcggatgaaagacgccgagctacgggtccaggaactcgaggtgaacaatattgacctcatggcgaaactggaagtaggtaaaaatgcctatcttgctgcggtcgacaacgagagccaggcccgagctgaactcaaggttcgcgaggagaagctaaggaaacttgaagaggagcaagccgcaaaaattgacgtcgccaggaaggaagagaggaagaaggtcaaagctcggtttcacgagttctcgtcgaagtatgggaacttcttccgggagtccgaagaagttgaaacgctgaaggtcccccacttgttttccttaaaacttgaatttgtttaaattggccacggaggcccttttgtttgtaaatacttaattttatgttggccacagaggccttttattttgaagtaccagatttttgaggtcatagagaccatttattttgcttgattttagcttattttccgaattacgagctaagctcggtttatccttcgtatagaaaattaagcaaaacaaagatgacttccctaacgaggtagactcggtgttagtagggacgtcatttatgaccgcgaatcacaagtcttagacttagttcgggtatattcgaagcaaatgatgacttccctaacgaggtagactcggtgttagtagggacgtcatttatgaccgcgaatcacaagtcttggacttagttcgggtatattcgaagcgagggtttggacgtgaagatatccacccgaagcttatttcgaagatagaatttgataaaaaatctttgattcaagagagaaactttgtttttatttgaataatgaagagactggacccgaagtgcaggctacctacgtacccaaaggttgggaggcttttgttatagcgttaaaccttttagccaaaaaagcccgttcttcttcggcattgatccagtttgttgctcgatgaagggcgtcctgaatcgattcggggcggtttacggttagagattcacggaaacgcgactcatgccacaaaccatttttgagggcggattgagctgccgaatcagacaggttgggcacttggaccatgatctctttgaaggcagtgatgtaagtccgaagtggatcgtcagctccttgagagaggttccaaagctgagcctcagtgacgtcacttttgataaagtacccgtactgcttaatgaaagcagtggagagttgcttaaagttatcgatcgaaccctcttctaactgggtgagccaggtaagtgcgggacctgacaaactttctgagaatagcttgcagagccccgcgtcttcttcgtgtggctcgagcgggactcgacctgcgatgacctggaaagaagtcagatactcttttgggtctcccttaccgttataaccggggagtttgaagtctcggaaatcgcgaatacggagctttgagattctcgaagtgaaaggtgttctccttgttgcttcaacaactttttcgacttcgggggccgacgtggtagcctgatgaacctttgtgttcattgcccagatttgatcttgaaggttctgcagctccgaattgaccgtgctcggctctggtcgaggattagaattcgggagtctgatggcgggacctaatggagccggcgcccgagctattgtctcatctgagattgcagcaagacccgctgacggagactggatgactggattttgtgtcgacgttgctccgacgtcaaccggaggcgaaggagattgctgaccagaagcttcctgcgaattctgaacgcttgggctcgcggcgccctgaaaattgagtcgtgttcgagctcctgtagtccgtgccgttcctgcagaaagagaatcaacctgctcggcatacgcattgtgtgctgacctgatctcggaatggtttacagctaaagcggcgagctggccattgcaacgttcttggaaggacacgaacttatcgaaaagcgtcgttacggcgagctgctgtctgtcggttttctcggaaagttgctgaagcagctgcttgatgtcgtaaaaagtaaaggcttggccgccggaactcatgatcgtcggtgttgctcatggtg

SEQ ID NO: 34765 - DNA, 3018 bp, Arabidopsis thaliana landsberg
aacactcgttccctagatcagttagataaatagccacaattgccttaaactcatcccaaagctccaaaaagaccttgatccgcaactccaatttgttcgtaaataatgaaatcgataagcttgagaaacaaatcaagccctttaaacaaaggaggttcaaggaattaagattccatatctaagaattgaaacgcaatagagcccaatcagaccaaattttacgaaataggagaaagaaaattgtttaaacaaaagcaaaattcagaactactggatacaatggacggcgagttaaaacagcaaaactggccaacgccgcttatagaagccaatgatgctagacataggaccagccatcacgactgcggaagccggagataatggacaaaaagccaactaaatcgggataacaaaactagaagaactctggtcggcaaaagaaaacgcttctctcatctttgaaaatttttagagaatttttagagaaaagagaaagggaaaacttttttatagtttggagtcttgaactatatataattgtcataaaataaaaatgaccatccctattacataagacaaagaaaataaaagggaaaaaaagaatgacatgtccacgaaaaattttcatttttctagttgtccaagaaaaaaagcacaaactatcgaagtacattataagataaagcttaccaaatcaaacttatggaagagtcctaatacggttcaaattaccctaagaactactctctcaaataaaagatcaattgcaatatttaaggatcgaattccacaaagttcttttgttcaaacaatgaattcaatgtcaagattaagttagcaggatatgattgaaataataagaaaacaaagtaagaaaacagcaagatgattgtgttgtaaacgatttaataaagaggtaggaacagggtattctaagaaaactattggttagtagatctaatgaaagctaggttgttatcgaatcattcttaaactcaaactctaattatggaataaccggtgggcgtgccgtgaaactatcaacctaaatatgcattcttaacgagttcaattgttcatcttagtagataggccgattcttattacacacctataaactagactcatcatataatagatccaactacagatacctatggcgggcatatctattgtctggattcaagatatagttaattactatagatctagcattagacataattaaagatgaagaattctacagataacctagcaaagggggcaatctactaaaccatatgaatccctaatgagaaaccctattccgaacaagcagactactcagacatattggatgaagcaaacaacatatttgagtgtgaaaacataaacactgcaaatagagaaggggaaagaagggatctcttcactgtattaagatctgaatcaatctctgcaaacactcgatgagtagcttatatctctaagtaacagggtttgcaaaagcttgataagaacttgataaaaacttgataaagacgtgataatcggaaacttaggtctaaaaactatataaaaaccctataaaacgtccagggactaataatgcaaatagagaagtcttctacggcaaattttctcttttgtaaacttgaaagcgtcatggagtttgctgggtcgaaactggtgtcgatcgacaccaagagtgtgtcgatcgacactcctcgctgattcctggatccaaaatcggccttagcttcctttcctttagctcttgctccaaaatgtctccttatctccattgttgtcccattgcataatatacttggaaagacactaaaaagactcgagaaataacataaagactcaaaatcctatacctaaaacatagataaaatcagtgaaaaacgggttatatcaactcccccagacttagcttttgcttgccctcaagcaaaacacaaatgccaaacccgtggaagaggttttgaaaacaaaggaactcccaatattctctagcctattgccatgattattcaaactaagtccatatgcctaacaagtctaatcaaatcctaaccaacatgtatttctctgcaagcttacacaatattctagattctatacctaagttccacaactatacccaccaggctttcatcgttgggtctcatcaaacaagccaacattcaagatccttctagactcattcatgtactatacatgataaattgaccattctttatatatattttttttctttttcggtgttctttctctccccagacttgttctttttagagagtaaacaaaggggaacttgcatactggatcgacaccctcgacatttttccaacatctgtaattgatcattccaaataatgtataataagggtcatatgaaatattcctacccctatacactatctgaaagttgtctcaatctctcattatattttttctttttataaggggagaggaacatattctttttatcacattggtctcaatatcaggtatgaacaagaagtcaagatctatgaatactaatcatttgaggaggtaaaagaaagagcagtgagattagctccagccttagtggttgagttgaaaactaggatatcctcaagtctgttggtttgccatctagattttccaatagtcggattgactagaacctgcaacactcatcaattaggcaataaacaagagaaatatagatcatgattcctaactaaactaaacaaaaacgtttttttttgttttttttgtttttttagtgtgaataaaaaatataaccaaataaactgcaaaacaaaaaataataagaaacaaaaacaaaagcaacattagtatgaacctccccgagacttaaatgacactgtaatccagagaaagctggaaaataaaatcaaaaataaaagaaaataaaaaaaagaaagagaaagatcaaaacagtgggttgcctcccactaagcggttgttttgagtcaataactcgacttggtggagttcaagatgtgggtggagtggtgg

SEQ ID NO: 34766 - DNA, 1221 bp, Arabidopsis thaliana landsberg
gcaaatgcaaacataataatgctagattttgaagtttttttttaacttttttgaatagttacttacagtaagtgagtatgcatattttcgatgaaatagctagaagaaaccgcggtcatcgatgtcttgtggtcgcttaacatgttctgcatatccctgataatcactaaagggcttacacttttatgtcacaaaaaaaatcaaatagggcgaacgacctgtttcccctaataagttttatataacaccataactatacagaattcggatcgcaatcctaatccacaaaaaatagaagttaaagtccagtttcaccctcaattggaggttcgaatctttggtccccataaattcaaatttcatggtttatatttggtttattatactggactcgatgccaaaccgaaacccagtagattagaaggtccttactaatatcgttgctgcttcatctgatacatcagattttgctcctcgcaagcttaataaaaccccttcaacctccttttccctcccaactttagcctacaaacaaaattcatcaatgatcaaatcattgataagctagcctttggtaactttaatcgtattttatgggttggagatgaacggaagagacttaggctaaacaaacaggatctggttgtttttaatcgtgtacatttggaaccaagagtttagatgaccatcatagttcagtaaggttctagtcttatcagctttgattgttatattttccaaaagacaattggtataaacactaaaattttgttttcttataaggtaaaacacttagatgaccaacgagctgttggcccagtggtaaattttccaagtagaggtgttgggttcgaggtacgttgggagggatctcttctccaaaggagatgaatttaatttggtgtggattctgcctctaggatatgtagggtctttgtgtttgaacttctagaatcgagatattaaaaaaaagagcattaagatgatccctcatttagaaaagaagaccaagaaggtaatacatgttttcttagaaggtaagaccaagaatttaaaatgcaatgtttcgatccttacattaattgaagtttaacgggacctattgtagtgtataagagacaatgaaatcccatgaaacttaacaccttcgtaaacataagcgtaaatgcatatgtatttttgaccaaaccacattgatggcaatttgattataaaaaaact

SEQ ID NO: 34767 - DNA, 6105 bp, Arabidopsis thaliana landsberg
cttcttcttcttataatcgtcttctttccggtgggtttgattgtgtgtctcatcatcacacagcattgagtactgtccggacccgcagaggggaataagggaagcgtacagggttctcaagatcggtggcaaagcgtgtctcatcggccctgtctacccaaccttctggctctctcgcttcttttctgatgtctggatgctcttccccaaggaggaagagtacattgagtggttcaagaatgccggtttcaaggacgttcagctcaagaggattggccccaagtggtaccgtggtgttcgcaggcacggccttatcatgggatgttctgtcactggtgttaaacctgcctccggtgactctcctctccaggtcttttacctcccacttcaccttttttactttcttctctctttgatacactaaacttatcactcaaatgctgcagcttggtccaaaggaagaggacgtagagaagcctgtcaacaaccccttctccttcttgggacgcttcctcctgggaactctagcagctgcctggtttgtgttaatccctatctacatgtggatcaaggatcagatcgttcccaaagaccaacccatctgatccttctcttctaggacatgatcattgtatcattgtaaacccctcttgtggtaaagaaagattcgagtcctatctatgaacatgcggaatatcattaaccttctttctttacatgtattactagattttcatgttgagatatctatgctacttgttcgataaattttctacaaacttcgattcccaaactcaattctgccaacatatatcagtctcaatttgatcaatgttccacgatctgtaataatgcaactaaggtagagtattatatatccgaccaacataaaaaatatcattacctattattgcttgcactaaaacacggaaattaaaacaaaaactcgcaagtcagcagagaaaccaatggatgagagtgaccatcaatccgcatagctaaccagacctctctttcctggtggagaaggtgagtgagaagggctgagtgattctgcaggagaggtgcgtcctcctctgatgggggatctctgtggcccgagacgggatttcaggtcttggctaattggctgcctctttctagggctctggctacggctacgatgcctcggactctggctcctgcttccgtctctcaatcgtctacggtacccatctggactccgagaagtgctccttctcctccggttgtacctatgcaagacaacactcaatttcacaggacatccaacattgctataaagttgctcttttcaactttcagcattcaattagaatgttttgcttaaccaaaataatatcacaaaaagggtcgttctaggatataaatctaatgcaagtggctctaggtgctggtttacaagctatatcgtcccaagccaaagccagaatctgtacagagataagaaagcgaaccttggagggctccttcttctgggtgggcttctaaagcgtcccctcggtgagcgctcagagtaacttctgttgcttggatacctacataattaaacaaaatgaggctttagtactatccgcagagctatcgtcctttgttgtatgtatgtatagattaagttacctatccctgttcctatcctgaaagtttcttctgtcaggccaatgtctaggaggagaacgctcaggagaaggagtatggtacttccgagcaaaggaatagcgttcggtgaacccacgcccctttcggatgcgcttgggcacaccacttggagatgggcttctggaagatttccccacagtttcctctgttggcttctcacgaggacttctgcttccatttccaagatctctcacagggctcctactaggacttctgtttccatttccaagaactctcacagggctcctactaggacttttgctcctgctgttttggtttctcctacgaattgggctcctgctcctgtatagcaatagaaaatggcaaagtttgtcagtgaccacaaaatcagaccaccaaattgcagaagcaaagctgaaatacataaagccagggagataaaccttgatttcactgagtcatccaagttggcgtgttgatcagcgttatcaactttcactgactttatggctttgtggcccactttctcatcatcagaactgctgctactctccgtgtcacttgaactattcgtgcttggttttctatctggccgagctttctttttcccgcttcgtcctttactctttctttccccgcgtcggcctttgtgtcttgttgttgacttcctcttcctatgcttcccatcactggaagaactagactcataggaggaagatgaatatgcttctgattccgaatctgaatctgagtcggaacttgagctatatgaatctgacgaagagtatcttctttttcgttttatccttttctcgttagattcttttttgcgtgtctccttagcttcacggtcagatacgtcaccaggagaaaagttcttgtttgattttttcgatttccctaataaacattaaatatatctgcatcattattctagaaactccatcattattatagaaactccacattcaaagattaacttcattacctttttctctttcagcagcatcatgtgctcttatctgagacgtttcaccacagtctattattttgactgggctagtaggtttcccatcactcgtccccacaagttccattttcttgattactgccatcccttcaacgactttgccaaatacaacatgcttcctacaatatgaggataaggaaaatcaggacccttaacatgcttccttccaaatgcattaaacgttttgagagtcctttacaatgaactttgaatttctcaaaacaacaaaatctaggaacagagattacccatcaagatgtggttggcgtttaaaaagtataaaaaattgggacccgttggtatttgggccacaatttgccattgaaaggactccagctccatcatggtccaatctaaagttctcatctgtaaaaggataacgggatattgagaaaaaaaaaatcaataccagaaagccgtaaacagagaaaccaaaattatacctgaaaactgtcccaccatagatgctctccccaccagtgcctgcaaatcaaccagagagattatctctaattaaggcattacagcaagaaagacttcatccagaagttgtctcagagatgaaaaagggaccccaatacgcttttccctagtaaccaatttcattctataaacatatatactaagctccttgtgtgttaattaaactaaaaactagatcatgaggtatctacatcacacatattgtgatataaagaaatatatacggtttggagatttaatgtataaaggataacaggtttgaagaataccattcccattggaaaaatcaccaccctgcaagaaagataagcgcttatgaataaagagtttgctaaccatcaaatgcatacaaaaacaaattatatgtcagtgaaggacattacagggttgcaaaagaataatgcatacatacctgagccatgaatcctttgataacccgatggaaagatgatcctttgaaatgtagaggcttcccagtggactttccaacgcccgcctcacctgcacaaaggaaaaaacatcataacaataaaatgtaaagcccataatcttatcaaagcattctggagagattaaatggcagaaagtgttatgaggaagcccaaggcacctgtgcagagggcacggaagttttccgctgtcttggggacaacatcagcaaaaagctgccattgacagatgaaaaaaaacttaagaagctgaatgcggaaagcaaagcaaaaaatgcaaaggttgaggtaatacctcaatgacaatccgttgaacgggatccccaccaattgatacatccaagaaaacattaggattcttctttttagtcattgctgcagtgcagatgatgtgctaaattacaaggagaaatacaagatacaaggtgattcaaataagcacagaaaatcctaaacatcgaaaagcaaatggacacccagatcgattgaaaccaaagttataataacagatcgatcaaacttctaaaaccctaaaccccaaaataaacatgaaaaaaaagtagaagagaaagaagaatgatgagtgctccctctgtaataaggtcaaaggaaacagaagcaggaaagaagcgatgtcaagatgctcggagatacctgcttactctacttggcggatcgagccggagacggagatatgaaacgagtagcggcagcaatagttctcgagaggatatatcaagtaagaataatctaatccagtcggttagtacttagtagtatcgttatactaattatgttttggatcccccaaacttaattaattaaataaatataggtggatggcctcaatcaaaagcccgatgggcctttgaagagaaattgaaatgatggaagatgacgatgatttctcggcggctgcgactaccgttgtgttcgaccgtccgattccgctgctccggggacctgtaccctccggtggttcttatgttctagctttccgatcactggattcatggtcagccgctttcaagcgttgcgaaaccctaatcaaggaccagtgcgaggaaggtgctaaaattgggtgcgccgtctccgcctccaacaactgtaagccgccgtggtggcggggatctggtggtgacatgagggaacgagaaaagtgcgaagagcgggaattcgagggctgtgtggctgccgccaagggcaagtgcgctgctttcgccaaagacaagtgctctggtgcctttttagatgcgcgaatcgccaaggacaaggaggttgagggattggtgtggctagcttcaatgccggaggaaagcaggtggagggatctcatggggcttggtggttcactgcgtctgcacaccaacaactgctgctgcacagccagggatcttcttcttaaaccatagctcttaatttgttgcatgctgagagctttgttattactagttaccgttatgagtgagcttaattagttgtaatctccccttctacttattcctgaaccattgtttagtttcataagatgatggttagtctatttattctcgagcaagccattgtatttgttggttgggattttgttaagcttgctactgcttttggtgcaaacactcttgtttctttcttatccacatacagtaactcgtgatctaatgtatgtcactgagcctctctgtgtatgtatgtatatgatttgaggagtttctcgacattcacttcatcgcttgtatcggaattttatgccaaatctggtctcacctcacgtctagttttagtggaggtcaacttattttgtttgtttataaaaataaagtcaactgcttttatgtcttgctgtcgtcacatgaacaaagaaagagatgacagcgaaaatggaaagtgctacgaagtttcggtgatcaaactcataatgccttcgtcgtacacgctgctccattttattatttctaaacatagatttgtggaaaagtagacggattttgagtttgagtagtataaatttcacttgatagatattataccaaaccaagttggtgtggaagattcaatctaaatcctttttttcttctttcgctttactatattcgccatttcttttcatttgtccgtgcggactaagcaagttggtacacgcacgctattgctcctcattctacaatgacggcttgtccacaccattacatcatacggctgctttagaaattactaccaaaatctcagattaactctctcttgtagggcacagtggttccaaaccgaaacacgagacaacaggtaagtcaaaacacaagtacaaaaggatgtgcggcccatgtcctttgatcgacatgacttcgtgtttacaacgtttctgagtggttccaccgcctgaaaatattaaactaggacaagttactttacacgagatatttaatattttaaagcagataaatagcaatcaaaaggcggccaatacggatttaaatagtaccacgaagcttagggtattagagagagaga

SEQ ID NO: 34768 - DNA, 1981 bp, Arabidopsis thaliana landsberg
aaaaaacaatccacgctaatcctattatcaagggtaaaaatgtcatttgcttcgttttcatcttttctcgtagccattttctttttttttgtctgtgtcaagtcgataccacttgtctggtagctttatacccactttcatctttttcatgttcgtagttgttcctctggttatcctcatcaacgggacccttgaaaccgtgtagccatgtaagcctttgtctttgtctctttctcttgcttcagcaagttcacgtctgctctatttctaattttgttctaagattcaattctccttttttctatgcgagaaatttaagattggttctctagctctacctctttaaatttgttactatgtgtcggtgtccatcattcatcaaattttttccttttttatccatttgagttgatgtaatgatgttgcttcgcttcatactggtcagagttagtctaatcttcattttagcacaacttgacaacttcatatggttatgacttatttttacttgggtctttcaaaggttaagtattttagtcttattttgggatgatgcagcttgcttaatgattagagtcttaaagctgtgctctttcttcatcgatttgagcaagtgatcttggaaggctcttgagttctgaattccttgtaagcaatcatggcagggaaaagagaaaactttgtgaggttagtgctgcatccttttgttttaatacaaagatctgaagtttgaatgtgagaaacgtattgatttggcaatggttgtttctgatttgtttccttatgaaagtatagtgtgattgtactgaactatagcttgttggtgcatagtaatctgaaagtggtgttgttcataccttttatagggtggatgatttggactataggttaccatcatcatctgtagccttccaacagaactacgccttcaatttcagtggacaacttcatcctattcatgcaagcaatgaaacttctagatccttcaagaaaggtatccagaagggttccaaagggcttaagtcgatcggacgttcacttggtttcggtgtttatcgagcagtgttcccagaagaccttaaagtatctgaaaagaagatatttgatcctcaggataaattccttttgtattgcaataaattattcgttgcgtcatgtattctttcagtgtttgtggacccttttttcttctatcttcctgtgattaatgctgagtccaagtgcctgggtattgacagaaaactggctatcacagcaagtacattgcggacttttatcgatgtgttttatctcgctcacatggctctccagcttaggactgcttatattgcactttcatcacgggtctttgggcgaggtgaactcgtgattgatcctgcacagatagcaaagagatatctacaacgttggtttattattgactttctctcagtacttcctgcccctcaggttggttaatataagttttgatcatttcagtaaattgtgtgttggaaaacatcattgcttaatttgttgaaagggtgcagtagccagtagttggtgatcagacatctctgtcaagcgctttctagttctagatttacagtactcattttgtgtatgtgcagattgtagtttggaggttcttgcaaagttcaaatgggtcggatgtattggctacaaagcaggccttgcttttcattgttttggtccagtatataccgcgattcctacgtgtcttacccttgacgtcagaattgaaaaggacagcaggtgtctttgctgaaacggcttgggctggtgccgcttattatctgctcttatatatgcttgcaagtcatgtgagtttatatacctttttcattttaagacgttgcttgtactattcaatgcttgcccattcaccatgagttatgtgactgtggcaccaaaagtgcaaaacaaggaaatatttgcatatccgtttcactgttatgaacttatgttcaaatgtttagtt

SEQ ID NO: 34769 - DNA, 5626 bp, Arabidopsis thaliana landsberg
tcgacggagaaggacgagagagatgaaagaaaagagcaatgaaggcagatcgagaaagagggaataacagagaaacgaaggagatagcaaaaaaaacaaaaacgtgatttttctacttctacaaaacaaagcgcagtaaataataaaggaggagagaagttaccttaagagttgtgtgagttgatgtgacgtcaagtttcccggaggactacaagaaggacatagcgatccacctcttggagggcgatgcgcataactggtggcttgcggttgataaacgcaagggtgagcgtgtcgaggaccttcaaggacttagaggacgagttctacaggatgtactttccgtccgaggcatgggaccggctagagagtaatttcctgtatcttgtccagggtcatcgtaccgtccgtgagtacgaggaggagttcgacaaactcacgcacgacgtggggagagaactcgaggacgaagcgatgcaagtccgtcgattcctctgaggccttagggttaagttgaggactctttgctcggtctgtaccttcaacacgatctcggaactggttaaaaaggcggcattgatcgaggtgaatctcgatgaggaggaaaggatccgcccgaagtggtaatctgtagaatgaaaagaaaagaaagttcgaccaactcgacgataagaagaaatcgtcgggaagtcgggacgaatgctctcagtgcggaaagaggtacttgggcgaatgctggaaagcaaagggggcatgtgagaggtgtggcaatatgagtcacgacacccagcattgctcgcggacaggacaaaggcagacgagagggacgcgtgatgatgaaaagttgtgctaccgctgtggtaagacggggcattacataagggagtgcccgcaactacgggcggaagggctagttggtgagaaagtcaaccgcagaggtggtgagccatccgaacaggccaagagagccgctgtggcaccccgtgtgaatgaactgatgaaggaaactggcgaggccagtaacttcaatgcgttcttcggtaagtcactaagccatcctagtcaaatataaacattgcatggcatgtttggggtagggtactcagcattgaaggcgatgtatagggaccctacaaattggtggtattgagaccatggtcctattcgactccggggttacgcatagtttcgtgagcccgcggatgatcggaaaagggaagttccagaaggaaccaagaatggacccgaccgtagtgaatgcggcgggcggacaggctatgatccctgagggacaagtctgtgggataccggtgagtatcaaaggcatagaaatgccggttgacttgatcatcataccgcttgaaaaacatgaagtaatcttgggtatggattggttgggcaagtataaagcaacgttgaactgtcaccgaggaaaggtgcggttcgaacgagaaggagggaagttggaattccaaggaatccgacccgcctcgggaaagctagtagtgtccgcagtccaagccgagagaatgctccggaacggacgcgaggcctacttggccacaataactaccacggatggtggaacgagttcggaattggaggacataccggtggcaaaagacttcgcggacgtgttccagtccttgtcttgggtacccccagaccggtcagatccgttcacgatagaacttgagccgggcacctcatctctccaaggctccatatcggatggctccgccagaaatggccgagctaaagaaacaactggacgacctattggagaaagggttcatacaaccgagcagttcgccgtggggagcaccggtgttattcgtcaaaaagaaggacgggagtttccgtctatgtatcgactataggggaatcaatcgggttacggtgaaaaataagtataagtcgagttatttacgatagcccaagccatgaccaagttgactcggaaagaagcaaaattcacttagtccaaggaatgcgaaaagagcttcgccaagttgaagaatatgcttacgagcgctccggttctggttctgccggaagccgacgagccctatgtagtatacacagatgcttcaataaccgggctggggtgtgtactcatgcaaagggaaaaggtgattgcctatgcctctcggcagttgcggaagcacgagggcaattacccaacccatgacttggagatggcggcggtgatattcgcacttaaaatatggagatcctatctctatgactctaaggtgcagatattcaccgaccacaagagtcgtaagtacatattcacccagccggagttgaatctaaggcaaagaaggtggatggaacttgtggcggattacgacttggatatagcgtaccatccgggcaaggccaaccaagtcgccgacgccctgagtaggaggcgttcggaagttgaggcggaacggagccaagtggacttggttaacatgatggggacattgcatgtgaatgccttgtctaaagaagttgaacccttagggttaggagccgccgatcaggccgacctgcttagcaggatccggctggctcaggaacgggacgaggagataaaaggatgggcactaaacaataagaccgagtaccaaacctcgaataatggtacaatcgtggtaaacggtcgagtatgtgtgccgaacgatagggcattaaaggaggagatcctaagagaggcccatcaatcgaagttctcaatccatcctgggtcgaacaagatgtaccgcgaccttaaaaggtactaccattgggtaggaatgaagaaagacgtggccagatgggtggccaagtgcccgacttgtcaactggtcaaagcggagcatcaagtaccaagtgggttgttacaaaacctacctataccggaatggaaatgggaccacataacgatggacttcgtcaccggactgccaacggggatcaagtccaaacacaatgcggtatgggttgtggtagaccgattgactaagtctgcgcacttcatggcgatctcggataaagatggagcagaaatcattgccgagaagtatatagacgagatcgtgcggttacatgggattccggttagtatagtgtcagaccgagacacaaggttcacgtcaaagttttggaaggctttccaaaaggccttaggaactcgagtgaacctaagtactgcctaccacccacagacggacggacagtccgaacgaacgattcaaaccctcgaggacatgttgagggcatgcgtcttgaattggggaggaaactgggaaaaatatctaaggttagtagagtttgcatacaataacagttttcaagctagtataggtatgtctccctatgaggcgttgtttggcagagcttgtagaacaccgttgtgttggacgccaatgggcgaacatcggttgttcggacctacaatcgtggaagaaaccacggagagaatgaagttcttaaaaatcaagttaatggaagccacagatcgacagaaaagctacgccaacaagcgtcgaaaggaattggcattccaagtaggagatttggtgcacttaaaggcgatgacctacaaaggggcgattcacctcaaggaaaaagttaagcccaaggtatgttggctcgtactttgtgatcgaacgagtaggggcggtggcatacaaacttgaccttcctcccaaactaaacgcgtttcacaacgtcttccatgtgtcacaattacggaagtgtttaagtgatcaagaagaaagcgtggaagatatacctcccgggttaaaggagaacatgacggtggaagcatggccggtacggatcatggaccgaatgacgaaagggactcggggaaaatcaagggatttgttaaaagtcttgtggaattgtggaggccgtgaggaatacacttgggaaaccgagaataagatgaaggccaattttccggagtggttcaaggagatgggtaaagatcaacttgatgcggatttgaggacgaatccaattcaaggggggggagacttgtaacgcctgcaatcctcaataggatcgttgactaggacttggtccgagagaaaaaggtggagtctcggacaagtgagaaggagctggccataagctcggacaaaggggaaatcatgcaggctaagctaggatcgtaaagaaatcagctgggtcagctcgcccaaagctcaagctcagctggaaggagtgacggttactcaggtcgagtgacagtccagctcgggcagctggacgagtgacggttgagctcgaggtagctggacgagtgatggctgagctcgaggtagctggacgagtgacggatgagctcgaggtagctggacgagtgacggactagctgggcggttatgggcgaaaagatacaactctttggaaaggtgcaactcttcggaagggcacaactcttcccaaaggtgcaactctttggaaaggtgcaaggaacggatgtgttgattcgggaagcatccattcgccccctatataagggaggacgcccaaggcatcaacaacaacatccagacaccacaaaacattctcaaaacagtcccaacacatcctgaagttgttggtcggaaagggggtgcggctcggcgtgtataagtcgaccgaactgatgcgcatgctacctcctggtccaacggttcgatggagggtagaggatggagagggtagaccattcgccttagagacgaatcggatctggtagaccgatcgtcggttcagatcggccagactgatcgtcggatagatcggatcggccagacggatcggatctgacagaccgatcgtcagacgggtcagctgggacagtccgatcgtctgacggaacgggtcggacagaccgatcgtcggatgagatggatcgagaaaattgttcgaggaagcacaaggataagtgcattcgaacacacccaagggtcgcccatggatgcaatcttaccgataaagggagaaagcaccaagaatgggtaaggaacgtgattcaccatataggatcaacatcgcggccgccttcatgtatttatctcctcagtcatggtgaaaccgatcagagatcggtaagaccaaagggtgactcgacggataactaacgggaaggtccacggtgggaaccgatggacaaaacggatgttggacccgtgatgtttaacctaacgccgacggaggaaggatttcatgggctagcctacgatgatccggtggatgaatccacggacccttgggtgtgataaggatatcgttcggaccgcatggatggatcattaagccgaaagctttatcgaccaccatggaccggacgagtaaacggttagtaaaccgtgggcggtcgtagtgttaaacgaccggatcggaaacatggatagttcgataagccgagcgctcaatcgttcaccatgtagccggagggacgtacgtctggagaacggatggaccaatgagccaatagtttaattcggccatcgtgaaacaagggaatcgtacgatccccaatctctatcgttgtacttagatcagtggggttggttggttatatggctaagtaacgatatagattggtccatcaatacacgatcggattagaatcgttgaacaaatggaataaggcgac

SEQ ID NO: 34770 - DNA, 764 bp, Arabidopsis thaliana landsberg
  unsure (1)..(764): unsure at all n locations
cctataatgtaactttttggtttaagtcaatcatattataatttttgacctgatacttgcaggtgaagaattgattatttctcagtgctgatagcatagatccttttgattatgattcaccaaaaaatccaattatcacgccagatttcttaaacaatatcaagctatcaggttttttgacacaccatcaattacgtttgaagattgacgctctaattatgctacttagaaatattgatcctaaatgtggtatatgcaatagaacaaggcttcatattactcannnnnnnnnnnnnnnnnnnnnnnnnaaagttataactcgagatagatgtggtgacattgttttgattcccttaatcaacattacaccattggatacgaagctgccctttcggatgcgtaggaaatagttcccagtgtcagtagcattcgctatgaccatcaacaagagtcagggacaatctcttgagagagttggtctctatttaccgaagcccgttttttctcatggccaactatatgttgctctgtctagggtcacttctaagaaaggtttaaagattctgattctagataaagcagggaagattcaaaaacaaacaacaaatgttgtttgcaaagaagtttttcagaatatcatctgaaatctcctcaagaatgattcgtctttcattcttatcaaaaggtatgtttcattctctaatcttttggtgattagttgattccgcgttggcaaaccccaaaaagatcaaagttattcctga

SEQ ID NO: 34771 - DNA, 2699 bp, Arabidopsis thaliana landsberg
tatcatttctccaagacgcagacaacaactcctgaaaacctgtgtgtttaatccatgcttcctcaaacctaagcggtctcctcctcgggttcccagccaccccaggtgacagttggacaaagagtggtgcatgatcagacgcaacaaagggcaggtttgtcaccatggcttcctgccattaaaggcgggtatgcaggaaacacaaaacccgatctaactgcttccatacaacattcctttcttcccttcctcttctccaagtaaacttgtttcctttaaaacccatatcaataagagagagctcattaatctactttccaaagttgagtcggtttcagaatatctcgaaaagcaaatacaaaatcttaaatttcttaaacaaattagattatacgatcaatcacaatgaataatataaatgtttaagggaagattaagaattcaaaatgtaacaatatagttacgatagaatgttgtaaaagattgtaaatctcttagtttaggcaattttttttatcaaccacacattaattaaaaagtaactccatgactggttaccgaattaggaggaatagtgtctacaaagataacttcagaaaataaaattgtaaatgagggagctaagcagtccgctccaacattacatgagcgggagataagagaaagcgagaaaaaggggaaagagccgcataacactctaagatcgtctagcagattggtgaaagcgggtcattcttcagttaactgtcccatggagactagctctgaacaatcattttctaacgccttttgcaccaaacaatatcgtttgatcattttcttgaaaacaccaccatcctaaacccatatttggatccaaagatttccatgagccatcaaactgacatcttacagattgagttgggctgtccaaagaacccgtaatagtggtagagtcgattggttccaattgagcttcttcccacattaatttttcactcatagcgtgatttaatatatccgcagattcagattgtattcctttgaaaacttttttattcatatctttctatatgaaccacaaaatccaagcgtaacaataagttttctctcccccaaatgtcaagaatcaagtcaaaaataatagtaagaagtctctctctgtttcttaaagttttattggggtttaagatagagaaatgtaagtgtctttaagcttgtataagaatcttcaaatagtagtcaacagatgctatgtgaagagtcttgaatcttaaaaggtttaaggaatcttgggtttgagggtgactatatataggcacccaagtgacatgggaaccctagttaggcttatgggtttatcacatctttaaaattatattcctctttccagaattttttaaaactaaagtatagtgtccaattgaaaactaatatagcaattaatttctaatgatatatggttgttgtgaatgggaaagcttctcagatgagctaaaaggttcacagcctccacttcacatttgcgcctagttgtctatattcccttagtttccttaccagttacccattattatatatacatataagcacccttagagaagtacaagagtatttactatgagtatcacaaaataaagttttaccatatatataccaccaatatacgattattttaagaaccggtttaccatcttatagcttggcgtaactagatgtttcttcagactcaaaaaagaggaaaaattggagtagcaaaagaagtgcaaatgttacgatactcgtggaagaatcattgtcttagaaatttagaaatagagtttgggcttggcttccttctgtttcaggcaatcaacatgttgcgaattgttcaattgatatggctgaaaagtggtgctgccgtgatggatgtcgtagataccatgattgaggcatagctaaaacacatacatgaccaatttctctaatatacgatatgttcacgtaaagccttaaacattaacaggtttagttaccggtacgattaggaaaagaaaactaataagtaatatcgtaatcgtacgatattaatataatcacacttgacatattaatgaaccgtacctatgacacctacatatgttaaaaggctgctaattaagtacatattggtcgacagcgagagcaggctttaagtactccgagaccattgggtgcttattatattaaatcacttttgcattcgtttaatatttagattaacactcgagctttcaagccgcccttcaaactcctcaagagttgcaccttttatgagtatcaattatattgtactgttagtactaagaaaaagctttcattttaataacacaaaaaacagagtgtcctttgccactattccatatgccctaaggccaacatagcttgtgaccactaatcattaattaaggattaaaccaaatatggaaaatagattagttggctctttgctttcaaatcagctacaaccgtcaatttaaagatctagagaccagcatgatctttgcaagacccaccaccatgatttagacaaattaatattgccgttttttttcttacaatcttttaatatacacttgttaataatttttgaacaaaagacacaacctaccatagtaatacaaatcatatacaaaataaaaaaagatatgataaatgttttcttagtattgagcgtcggggagacagtaggtttaattttt

SEQ ID NO: 34772 - DNA, 1220 bp, Arabidopsis thaliana landsberg
tctgattggcagggcctaagaggtacaccacactccctagatccaggtttggtttgtgatcatgtcttcaggtaatgtggttgttgtggggagatttctctaggaacttgagtcttcatcaacaaggtctaagccaacaatagtgcgatcaattaactgaactggctatgaaaaacctgcaaatgacaccatataaagataacactcattatctgatagctaaagaacatgaaaacatcatcattgaccaaacaaatccacaattcagattggttcttattatgattgatgcaatcaagacgtttccattttgggcaatatctgaacaaatgaattttcatgttccaataatcacaaaatgatatatcaatgttttggtttaaagtttatgaaattaaaatgaaaacttaccaaattcagctacagatccagaatcattaccatataacataagtacagtataaagctcttttcttttaagttcttttggtttgacgaaaagatatggattcatttttgaaaatttgaacaagagccaatttttttgatggcattgcatcaaaatttaccaggatcgtgcaaccgacaacacaggaaaatgaaaaatcaaattttgaatcaaactcaagagagggtaaagagagaggtgggacctgtgagggaagagagcagcagcgacaccgttctgaaggcggacctcggcggtttcggtggcggagatggaaggaagattgaggtgagtggtcagaagaagattccggtgaatgaggaatccagttccagaagtaacaccatttggtccggagacagagattcgagccatcgccggagctttgccggtaaaaatggaacctttcatcttctcgcttttgcctactcctttacaaaagcaccatgagtccaatatcactcccattgtctctctatctcttgattatgctctcagatgggttttatgtcaaattccctaatttggcaatctgggttttggaggagagtgttttggatctgaaaaggatgggaatttaggagagaagtgtgaattggatgcgagttagtaataatgggattagggagacacaacacatgtatgtgtctgtgtctgtttgtgctgtaaaaacatcaactttctccggatttggtctcgatgaagacccaagaatgggagaaaactcgagaagaggtaagtgacagagaaacaagagacaggggaatcgtga

SEQ ID NO: 34773 - DNA, 1391 bp, Arabidopsis thaliana landsberg
catgccactcgggacggtctataaacaggagtggtggctgctctgcccaagctatgtgcatagcataatcccaacccgtgcaataatagaatatctttatgagatcttcatcacaacaaaagcatggtctggactgaattatacacgacttctgcgagacaagctgaatacaatgcttgggatgtggaaggtgccttacctgaactggtgtctcatcacatactacatggtcctcgccgatgcaatctttgcaaaagaagtgggaagcctcctttcctttcgctaagtagagtctatgccggttttcgggatgacatttccccttttctttgttcttccgctcgatttttcccgtgacatgaaattttccttgtacaagttgtactttccattgaggggacaaggacataagctgatctagcccccattccgactccggctctgaatcggtataatcaatgataaaaattatttgagcaatgagtgtatacagctctgaatctcgatccaaatagtagagaagagaaaacgtgtgtgtaaagagtgccactagctgcattggtggctcccactctggttctagatctatagagctaatgagacggatcattccagtcatgcttgatatgaactcccactctggttctgaatttgatatagagttggcaaaagacattatttgcttaacgactgctaccactgaaatgaactacgactctggctccggctctgaataatccaaatcaagagagcgtacgagagtgattactttacttgtaagcgatatgaatgatttgaattttggcaactcttctggcccaccccgcaactccaactcttcatttgtagtaaacgcatagagtgagtacatttcagaaaggagtgatatcaactcctcctcctcctcctactcctattcctcctccgaatccaaatctgaatccgaatccatagagctgtggacaaacatcaactctgaatccacctccggctctggttttgactttgtgtatgtggagataaagagggagtatatttgatggatgattgatatgatctctggcctcggctggagcttgtatgtttcataaaaggttgacatgaactctgagtctggctttggctcataatcggaatctaccgagttgaggtgagacagtttttcaataatgagtgatatgagcttcctcagtggctcgggtagggaactcaaatccatggagttgaagagagagattgtttgagtaacgagcgacatgagcttcgactccggcttcggctgcgacttcaaatccattgagctgaccagagagattgtttgtatcatgcatgatatgttctccgagtccgtattgttgcgagacactaattgagaaatgaatgatatgagc

SEQ ID NO: 34774 - DNA, 619 bp, Arabidopsis thaliana landsberg
atctaccagagagcacgcgattctagatcgatccaccggagatagacgccggagtttttatccccgcggcgaagtaaaccatttcttcttcccgatgtttcagttaatttaagtaatctagagagggtataataatggtagtgtaagaatccatgcatcgtgttcctgatcaatcgtccttattacgatcaagtcgatcctaaggttaatcataactctttattggagatctccaatccaaagcctttagtttaagctctcacgggtttaagtaagggcaaaaaaaatgctgtgatttggtattcgattttggcaattgttaatatattcatgtaactttttgaactgaacattgaatcatttgattttggcagctctgaatcagtttaagcagcacaaactcccagcttgtaagccagttttaacaccaatatcggttagtaacattaatctttgtcacctgaaaaaaagctaagcttttcttctgattgtctaagaagaagaatcaaatgttttttgcaggttataacagtgtttatgttaatgggttttgttttcattcccataagaacacaaaacacttcgtgcttctcgtgatgtaagttggagaagttaactc

SEQ ID NO: 34775 - DNA, 4720 bp, Arabidopsis thaliana landsberg
tccggaggaggtgagatagactgattgaattactatattgggggatagttttttttacttttatagctcttttttcgattctttagctcatcggttttgttacaaatgcagaaaggagtatgagagactacgtaggcagtgcaaacggcttcaaaaacacaataacgggactcgtaagttatacaacggcagtgaaactatccaagatgagtatgattggcctcgagttcaagacactgacagttcatgttctgatgaagttgttagtgcccgtgagtctctctctagtgacgaagacattactgaagatattgggtatatgagtgaggtttcatgtacagttgagagagacgacggtagtagttcaagacgaatcaccaatgctactatctctacacttaattccgagtcatcagattcagattcttcagatgagagtgaagtggtacaggtctttcaatcttctgctactccggatgtgaatagtacttatccagccaggtcatctattccccggacagaagaggattttgtgacgtggcagcgtattatccgtctagacgccgtgcgtgctgactcagagtggacctcctattctccatcccaggcagttatatcggaggatagagcatgtcgtgccgctgaggcggttgggttgaaagattacaatcacctggaaccgtacaaaatctttcaagctgcacggctagttgctgttcttgaagcttatgctttgtatgaccctgacattggatattgccaaggaatgagtgatcttctctctcctatactctctgtaatccctgatgaccatgaagccttttggtgtttcgtcgggttcatgaagaaagctcgtcacaatttccagacttgacgaggttggaatcagaagacaactcaacatagtctcaaagattatcaaatccaaagactcacaactctacaagcatcttgagaaagtcaaggctgaagactgtttctttgtttacagaatggttcttgttatgtttagaagagagctgactctggagcaaacattgcatctctgggaagtgatttgggcagaccaagctgcaataagagctgggatggggaaatcttcctggagcagacgaataaagcagcgggctcctcccacggaggatttgttgctgtacgtggtagctgcttctgtgttgcaaaggaggaaagtcataatagagaagtacagtagcatggaggagattctccgagagtgccacaatatggtagggaaactagacgtgtggaagctcttagacgatgcacacgaccttattgttaccctccacgccaagatcgaacattctatcccacaataatccttttcattgttattgcggtttataagaactgccttggtgcttgtgtttgcgcaactatgaaatgtggcttcctggcaagctatcaggggatatagtagccgcggttggaacagaatcaaaccgaggatttgatttaccgctatctaaatccaggtttaacatatcaaatggcctgaatcaagataggcatgatttgtgtggtgtgttgggaaactttcagaggtgagtttctctgctttcattttcaattttgtatatggaaacaattttgtttgtgccgggaaagagaatctttcgccggtaaaagaagaaaccaactctctttctgttcattcttattccaaaagtataaatattacataagacatgtaagtttggtttcatccctctttaactgtctactcctaacctaaccacatctagtatacatttctccggcggtaagttcgggttttgtctggaaaatctttctgccttaatgagccgcagtgaagttcatacagataggaggtctaaccttagccagagccagcaaagaagaaggcagaatccagagaccatctccacatatcaaacctgatgcaacagctggaaccatcacatctgccttcttacgattcacctttttccaaacgtataccactaagctcccgatacacatatcgattgcgaacgacccacccaccaggaacggtacagccattgccatcgggagtgggatccacttccctggcttatctggtaagaggtctcttgccaagttggcagcaaccgcaaaggcaaagaatccgtagcaaagctctaggcaatgcttggggagagcggagagaccttgaacaccgataatagccatgtttctgtatatcatagcataaggagctttgtattcaccattttggtttccaacatcaaacgccttgtagaagaggaagaaggtgagtggcgcaaccacgcagcctatcgctgtccctatggcttgtgcaacaagcatcgagcggggcgaggtttgcgtaagatgtcccgtcttgaaatcatgcatcaggtcagctgagacagagacaattgatttgatgagaccacaagcaaccatcccagccaccactccatcgttttttcctgccagtgccgccatcacaaagagcgccgctttaccatagttgtaagccatgttcatatccgttaagccagctccataggcgttacagaagctgagagacggggcgaggaggtaagctacgaggacgaagtaccatttcagctgagggaacatcagagggatggcaatgatggagacaagggagaagaataagtatccgacacaagccatccatagcggaatgctctctcgaacgaacactttattctctcgtttcaggttatcggattctttcgtgctatcttctggaacttctaccactgcaatcagtcaattggttattacttttacatcgaaacaaatgcaagacactgttagctagatccttccacagataacttacatgtgctgatgctgttggttttggagagtctagagtggaagcttcttccagtgaaaaagagtatcttaacgaagttataaagcccatctcctaagatcagtgcaatgcatataaacacctgcaacaacacaaacaaaacttatcgcatctttttgctaccacagctgtaagatatatatatatattaaaaactaggatgaaatcagaccttgtagccgtttaagccctgcatgctattatctttcaatgttgcagggaaccattcgcctttaagccgggctatgagaggccacatgattccccacgagaggatggcaccgaagagcaacgacagattcaccaaatgagaacaaatcatcccagctccaacatatgtcatactgaagtcaaagtagaatctatatcccataaagagataaagcttcttcaatcaaacatgtttaaacatttgaaggattatataaaaaaaactgaggaaactcacgttttgtccaaagcttgtaacccaaatgtagggaactgagagaatccgcatttttcaccacctgaatagaaccatccaaagaatgcccaaaagaaactcaaaccaaacgattttataaacccgcgaatctgtttcctgtatcgaaaacgacgaaaaatatcgatatatatcccaatcaagtaagaaaaaacaagattcatcaagaacatatatagaaaacatacttggctgtcttatctcctttgctagtatgaaatccatttataagaacagctgttgccgttccactaggataagttagcttgtagtctataatcatcacctgaaatttatacaattcattctcagaatttaatcacaccattgaaatcaaaaatttactctgttttcataattgctagatatcagtacctttcgaagaggtaccaatacaacaagtccaatgaagctagtaacgaagaggaatgatgtcatccatccaacaccgggctcttttataccacgaggattgtttccttcggtgttcactcctgtctcctcgtaagttcgtctattcaaacccaacaaatacgatgcaaatccacctgcaagagagatgctgtaacaagcaacagcacaagtttgagcaatagtgttctcttgacgtgtgaaaggcgtcgtggcgattccggctttttgaagaactttggtccatgatttgaggaaaacaaaagccaagagagctgatgagatgttgagattcggtacgagtcctgtcgttagattcagcttcagacagatcacactgtagacggtccctatcaataaactcgcgacgatcgctcgaaccgtgatctgtttcctccatggcggtggttttctcgaatcgataaactcgtcttcctgaaattggctctgttctctctcaaccctgtcgttttccatttgaagaaaacgaatctcaataacctaaatcagctcttccttcacctggccccaaatcgttaggttgcttcttgtacacggaaacaacgttttgagcctagcgaattcgaagaaaatatgcgaatctgagaatcgaatgattcgcagactcgaggtttggcgtaagatggaagaagaagaagaagaagagagaatcgcatattagtgatgttgaattgaagaatttttttttatagaagaatagaaatgaatgaagagagagagaaagtgtactgcacagaagtacaaattagggtttgcattgtaattgagagtacatatattatgtgattcagattcaaccaaatgtggaaaaaacacacgtttttcagataaaagacagagcgggttgatatatggttgttggtatgaaaatcactaaccgtgcaattttttatattttagtatatgatccgaaggaaaggattata

SEQ ID NO: 34776 - DNA, 3100 bp, Arabidopsis thaliana landsberg
  unsure (1)..(3100): unsure at all n locations
atcccgaatgctatgtaagaacgatggttaaatctcatgtaagaaagatattttgtaaaagcacttttgtaaaagacataggcaatttgagagttttttaatcacaccactcatcaacccaacttcaacaactactccactcagttctaaactctacaaaagagagaaagagagaaagcgagttgtgacataaaatccatggctgaagcttgcagagttgggaggatgaagctaggaagccaaggccttgaggtatctgcgcaaggccttggctgcatggccctctccgctcgatacggtgctcccaagccggaaactgacgccatcgctctcctccaccatgctattaactccggtgttactttctttgacacctctgacatgtatggtcctgaaaccaacgagttgctcctcggaaaggttcgagtttatcttgttttgttcgaaagagtgatcaagatactttagtttgttctgtttcttgattctatggtactaacttagaccacaacaagattttgtatgagaaagtttgttgcaattcattttcttgtcaggcactgaaagatggggtgaaggagaaagtggagcttgcgaccaaatttggattctttatagtagagggggaaatttctgaggtaagaggagatcctgagtatgtaagggcagcgtgtgaggctagtttaaagaggctagatattgcctgcattgatctttattatcagcatcgaatcgatactcgtgtccctatcgaaatcactgtaagccctcttcntgtcaatcttccttcatggtttgccaacttttcaaatgaaatggaagttatatagttcttctccgtgaccttcacacctttggctagggacatgttgggtataatatagagtccaaaagtttagctttcactttcagaactatgttttctgcttgggtcactctctctgaaattgctagcttattcatgaagaaccgttgtctggtgatatgatcttatcatcccttaagaatttttcgtttgaatagactcttttaggtttggctctgagctctaattggtttgccacacttcatgacctttatagaaagccagcaccttttgctgaacttagcaatttcttttgtttgtcaatttcaaagattggagaactgaagaagctagtggaagaaggtaaaataaagtatattggtttgtcagaagcatcagcttcaactatcagaagagcacatgctgttcacccgataaccgctgtgcaaatagaatggtccttatggtcgagagacgtggaagaagatatcattcctacctgcaggtatcaagatttcatttcatcctccttttttgatgcactatctatcaaatatgtaacatcttctctctctctttcttcagggaacttgggattggaattgttgcttacagtcctctgggacgaggtttctttgcttcaggacccaagcttgttgagaacctagacaataatgacttcagaaaggcaagtacacagcctttatatgacttgtttgattgatgaactgttggtaatccactcactgtttatctgttcaattctgtttcttattgcagactctaccaagattccaacgggaaaacttagaccacaacaagattctctttgagaaagtttctgcaatggctgagaagaaagggtgcactccagcacaactagccttagcatgggttcatcaccagggagatgatgtttgccccattccaggaaccactaagattgaaaacctcaaccagaacattagagctttgtcagtaaaactcactcctgaagaaatatctgagctcgagtcccttgccaaaccagagtctgtgaaaggagaaagatacatggcctcaatgtccaccttcaagaactccaacactccaccgttgtcttcctggaaagccacttaaaaccgcatgagagtttctctagctaaacctactaaaattaatatgctaagggcttgtgtgagcccacacaaataatatgtaagagtttgtgttgatgttcagagtgttcaatgtataattttctctgtatctcacatacagcgaccaacctcaaaatcttgaaacattaccttttcaaccatttggaaaaatttaatacatggaaaaagaggagccataccgtatggtagctgatttgaagataagtaaaatatgacaatgcctctgaaaaccaaaccttacaaagatgtgttcttgatacaaactttaaagtaactctcatctaaaaccttacagaaacagctaatctatacaaccaactcttaacatggatctgtgcaacgaattttatcttggattgacccgccaaagcattttggcaccggaaaaataatcagttttggagacgtgaaaggatttgcaaaatgtttttttggctagcctgcggttcagtgttaatattagccgacagcacaaagggttccacaagatcccatcttcttcaatcctgtgttttgcaagaggtttagcagttgacaaaaccatcatctttcatgtgggtcacggtgaacagctgccatttaccagaggtttcttgtgctagttcctttagcattggtcaaaatccagtttcctcccccatcagtttcttggctcctgcttcagatagatgctcgagggaatggtataagatctcggctgagagacagacagataaaaacattatattttaacatcaaacattgtgtttccatcattcaccagatttaaagcaatgttcttgtacaagatcatagttccctaaaatactagaagccgatttttaggggttatggaagtcctattatttgaagcgattagacaatttttcatgaaacaaaggcaaatttggtaggggaagcatttgaggtttttaatcccttacatattcaggaatatccacgttcagagaaaatgcaagattgcttacctgtgtggcacttgtcattaaactgcttgcaagatcattattaattgagacaggcagaggcggcatccggctgatgatcccaggcatctccttcatgctgcagtaatgataagtaaagagtatagtaaatcaagctttcatagacgagaaggagaaagacgacagag

SEQ ID NO: 34777 - DNA, 681 bp, Arabidopsis thaliana landsberg
atctctctctgtctgaggaaagctagttgaataagttacgaaccttttgtcatttctagtgatctaattaccagatcaaagcaatggctgagaagtcaagttttctcgagagtcctggttcttcagtgccgttcttcttacttctatcaattggcctgagctttggaggaagagtttacggtttgattattttatctagttatggaggatataggattggttaagcaaggttggatatggatgcagactcataaacatctgggttagtggttttgaactgccacacagtggattgtggaaaagacagaagctttggcagagcgtcattggccactagtgtgcagtggatgtgggaagctattagggttacttagtttatcgtttgtttactggaaagactgcattttgaggggtttccagtccagtgttaaatttggttcagctgctttgctcctcataatgtggagttgcttccttagcctgacttcagtatcttgcttggtttatgttctcctcggtatggtaaggcctcttgaccccttttttaatttatttttattctgggttctagatctctaaatagtgtagattttatgaaaatctcaccacttatcaggtggtatcgagttatgcatatttgagttgagtctcacctatacttgatttaccatcgcagggagc

SEQ ID NO: 34778 - DNA, 1438 bp, Arabidopsis thaliana landsberg
aatggcatctcgcagaactacgggcaagcggagatctttcaaaattcaacatagaggacttcgtcaaacaataccacgagtcaagggataattccgaagctcaaaattcgaagagaccaagactgactaacgtagaggaaccgagaggttcaaaaggaaaaatcaatgtgtttcttggaggttccaaactttgccgtgattccgttagtgcaatcaaaaagcatagacggaatgttcttctaaaatcaagtttaagtgaagaggtacattttaaaggcgcttcaatatcattcgacgaaaaggaaacgcagcacctcgaaagacctcacgatgatgcactagtcattacgttggatgtagctaacttcgaagtttcaagaattctcgtcgatactgatagttcggtcgatctaatttttctaggcactttggaaagaatggggataagcagggcagacgtagtgggacctccttcccctttagtagctttcacaagcgagtcaacaatgtccctcggaacaatcaaattactagtcttggcgggaaaaatgtcgaagatcgtggattttgtcgtctttgataaactagcagcttataacatcatcatcggaagtccctggatctaccagatgaaagcggtcccctctacgtatcatcagtgcctcaaattcccaaccccaaacggagtggaaacaattcggggagaccaagaagcctcgagaacttgttatttagctagccaccaattgaaaatccaatagcaattaacgaagcccgcaaagaaagaagtagtcccgagctttcctagcgggcaaaaggtggacgatgtcgtggtctgagtaattctagaagcagacaaaccggatcagaaagtttggattggagctactttgtcaggcgaaataaagggagctttaatcgagctgttaaaaagaaacaagaaatcatttgcttcgtcagcagcagatatgcccggcatagattcgaatataatttgtcacgagttgaatgtggacccgagcttcaaaccaataaagcagaaaagaagaaaattcggagtggagggagcaaaagcagtaaacgacaaagtggataaactcttaaaaataggatctataagggaggtgcaaaacccggattgggtggcaaacaccgttgtggtcaaaaagaagaatggaaaggatagggtgtgcatcgacttcacagatctcaacaaagcttgtctaaaagatagtttcccactcccatatatagatcgtctcgtggaatcaacttgccggaaacgaattgctatcctttatggatgccttttcgggatacaaccaaatcatgatgaatccagaagatcaagagaaaactttattaatcacggataggggcatctattgttacaaagttatgccattctggttgaagaacgcgggagcgacctagcaag

SEQ ID NO: 34779 - DNA, 1479 bp, Arabidopsis thaliana landsberg
tgggttttttggtagttcacgcggcttgaggcagggttgtttacttctaccctatcttttcgttatttgcatgaatgtgctctcacatatgattgatgaagcagcggttcatagaaatattggctatcattcaaaatgcgagaaaattggtttgacacactcgtgttttgctgatgaccttatggtgtttgttgatggccatcagtggtcaattgagggtgtcattaacgtcttcaaagagtttgcaggtcgatcagggttgcaaatcagtctagaaaagtctactatttatcttgcaggagtttctgcttcggatcgagtccaaactctctctagtttcccatttgccaatggtcaattgccggttagatatttggggcttccattactaacaaagcagatgactactgcagactattctcctcttatagaagcggtgaaaacaaaaatcagctcctggacggccaggtctctatcttatgcgggaaggctagcgcttctcaactccgtcatcgtcagtattgcgaatttttggatgtcagcgtatcgtctacctgcaggttgtataagagagattgagaaactctgctctgctttcttgtggtctggccctgttctcaaccccaagaaagctaagatagcatggtcatcaatctgtcaaccgaagaaagagggtgggctgggaattaaatcacttgctgaagcaaacaaggtcagttgtttaaagctgatatggagacttctctctacgcagccatcactatgggtgacttggattcggacttttattattcggaaaggaacgttttggtctgcaaatgaaagatccagtttgggttcttggatgtggaaaaagttactaaaatacagagagctggctaaatcaatgcataaggtggaagtgaggaacggaagctccacttctttctggtacgatcactggtcacatctgggccggctcttggacataacgggtactcgtcgggtcatagacttgggaataccactcgaaacaaatctggaaactgtcttgcgaacccatcaacaccgtcaacatcgggctgccatctacaatagaataaacgcagaaatccaacggttacaacaacaagaacgagaagcgggccctgatatctcactttggcgttccttgaaaaatgatttcaacaagcggttcataactaaggttacttggaataatgtcagaacgcatcagccacaacagaattggtacaagggcgtatggttcccttattcaacgcccaagtactcttttcttttgtggctcacagttcagaatagactatccacaggcgatcgcatcaaagcttggaattctggtcaactagtcacctgcacgctctgcaacaatgctgaggaaacacgagatcacctctttttctcctgccaatacacctcttacgtttgggaagctcttacgcaacggctcttgtccaccaactactcccaggactggaa

SEQ ID NO: 34780 - DNA, 2524 bp, Arabidopsis thaliana landsberg
  unsure (1)..(2524): unsure at all n locations
cgttcctctcattctcccaacagcatcaatctcatcaatgaacactatacaaggtgaattagcctttgccttgttaaacaagtctctagccctagatgctcctacaccaacaaacatctctatgaactccgaaccagacaatgaaaaaaaaggaacaccggcttctccggctatagccttggccaagagtgtctttccggttcctggcggtccggtcaacaagacgccttttgggattttagcccccaaagctgagaatttctctggggttttcaaaaattcaacgatctcttcaaagtcttgcttggcttcgtctactcctgctacatcctcgaacgttatccctgtgttaggctccatctgaaacttagctttgcttctgttacaagaaaacatacttgtaaaactcaatcttgggttgatatatattcaaaattgatccttttaccttccaagaccaaaaggcaagttaggtccagcagggtttcttcttgaagaagatgttaaaagcagagagacaagcaagatcaaaggaaaccctaaattccccaagaagttgagcaagaaagctccccagttcacattcatgggatgagcagcgaaatcgacgttcttctccttcatctccctcaccagatcgactggtaaaccgggaaggttaaccctaaccctctggatctttcctactactggattagagatctctacgatcgcaaccgttccgttctcgatcaagtcaactttcttcacttcattctctttcagatgctgcaggaatctcgaatacgacattctattggaagtggcttcgatgggagcttctggttcagcttttgcggggtgagcaagaacagttcctagcgctgacgtaaatcccaaggcagtcgtcaaactcagtaaatttctcttagtgaatttgtggtgtaaaatttgggttttgagactaggtttatgtgtgtgactggatttggataaagaagccggtttttgaaattgttgagacttcttactacaggttgggatgttggagagagggaaagacaaagctgatgatgatgatgccattttcatcaaagttaagatatttgttcttcttcgagattatgcgtcaaatgctattaattccttagaataagttttggtcttttaatgttttattcgatgggtgtgtacaagattgttttataaaccaaaaagatgatgatgagtcatgactaaaacaaagaggatgtttctagtttcttttgtcttctctggaatatataactgtcttcttgaatgatccagagattgtactgtactactgtagaacaaaaaaatctataacataaacacatagtccatgaaaaaatctcaaccttcgaatttctacactctcctttttcagattactttttcaacttaaatttaaccatacacttggaagctaaaatgacatatagagtttcataataatctctgaggccccattgctccttagactcgagccaagtccatggaaaagactgcctacaagggttactatgtaattggttatcggtcctcactagacataacaattctaacatttatgataaaactgccaaccaggtcataaaccagaaacacataaacgccagaatccagagcatatacaagggtttggatcactaccataagaccatgagagccagaaaacagaatcaagaaatcaaagaacacattcaaaaacttaaaaaacaaaatcatttattcttcactgttaaccattttctgttgcaatatccttgtaaagcttttatttaaacacatggagatttaacatagtattagtttctgtaagaagttcttctgaaaataactaaacccaaaagaaaaaaaggttgtttataaactaatcaaagtaatcatcatcatcatcataataacctttacctcaaaaagattgaacctttatacttcatttcttaaccttcctttgctgcagttgctgcttcttaggtccaggaacctctaatctcccaaccgaacacccacatttagcccgaaaaacaagcacggctcgcccattaggtggagccatcttcttcaactccgcctctaactcacggtgatgatcacgaggcaactcaaacaaacccttcttactaacactcttgccactattagagctcttaacacaatcctcagtctctaactgaatatcaaactcagcattagctttcctaagccctttacagttcggtttcccacatcgatgacgactacacagtagtataacaatcatccaagcagataacgcagtacacgagatactcaaagctattaaaccgtagacaattnnnnnnnnnnnnnnnnnnnnnnnnnnnnnnactaaacaagagagctcagagaagatttcaacagatttgatagtgatgaatttgatgtaagggaagattaaaaacccggaggatgtgatcacagcgattaagatcacaacatcgatagcagctgatctagatccgtcacagcaaacagagaaatttaagaacagctgacgatg

SEQ ID NO: 34781 - DNA, 3543 bp, Arabidopsis thaliana landsberg
catatatacataaattgtttaaagccgactttcgtgaacaaaaaacattcaaaagcgacaaacataaactctatagagcttcttctagtagttcacagatgaggtttgcctgtttccattttcgtcttcagcttcatccccttcttatgaaccgtctgagtctgcgttggctccacgagaagtaaccgcgacatcacatacgccaaaagctcttcacggtgagagaaggtaaaatccaaatgagcatactcaaactcattgtaagaaacatctactcctgaatctctcatcaccctgtaatgtttcctaaccattgaaggtctaatcactttgtctttctttccagctactaaatccacaggcacatcgatcaacccataaaactccccaagatcgagcggctcaggggacccgtaaacatccatattagctgaactgctaccgtaatcaaacatcttgaacttaccgctatgtttaatctgtgcaagatgctgagccacacggaaggatatacctggcatatcgttcatgttatagtgaggcaatcccatgactccaacccagtttgagctatctccgccaactacataactcatcaatgtttggactaatccaccaacagcaggatagttatggaaatctcgagctaacttgttgagaagcatccggaagaatttagtggggatgtagaaagcaggaacaatccgagatagtacaggacccaagaaaaggaacgtgtactccatcaacgtgaaacacatgttggagtcatagtgaaacccagcaggcgaaagaaggatcagtctcgagagtctgtgcggtttctcttcgattttacgggtgattacatacatcagaaccgcggcaccgcctaaactgtgagatacaacacaaagcttatacggttgatcctcgtttactacctcttccatagtaggctgataaagtttcagttctgaagttttgatttcgtgaatcttctctatcattgctgggatatcttccgttgcatgttcattgatggagtaacgccagaaactgcatgttttgaggattcatcaataagaactatacaaatatcaaatccataaagaagccgtttattctatactactcactcttttgaggatatgttttttttcacatgatctcttgaaactaaaccacgaaagttccctaggaaaacatcgtagcctggcaagaaaagcagagtaaaacatcggtaaatcttaacttcatatttatcatacagtaacttgggaaactaggaatattttggcacggaccttgatcataagctgcaaaagctggtgatccaacaacaccatttgatacccatctgaagataaaggtccagatgagaaaccaaggcaaaacatttcctgacaagtcatcaacgaaaaagacaatgaaactcaccccattgaagaatccattacaccatgctgcaaataaacagctttcctcgcatctcgtctggaaagacatgatgattacattttaaaggaacttacagaaacataacagactatagagaaacttactcaaccataatagattctataccttggtatcctttccaagagaagaccatatccatcagatgtaacaacacgaatagcttcatatggatacctatcaagattataagagaagttaaatcgaaagggcaaatagttgagtaacagcagaagtaaaaaacaactatgcacgaaatatcttctacacattccccccttacccaagctctgttataacatcttgacaggtccgggtatctgtattgtataagctcgttgtggttcttctttctgtaagagatgaatcgttatctcctagaatggcagtctgaacgatctcatcatccgaaacgtcaccatagtttcctttagagctgtgactggaggaagagaaccatgataaaactattccaaaagtttctgatggagaaagaagaagatgtgccgccttgtgaaagaaatcaaatattgtttctataaagatctcgataccaagctgaagatcctgccaaagtagaacacataattgcgtaagaaaactcaaaaacaagaaatgtgatttaagtatgcccatcaacactaacctcaatgactccgcgtcttttatcagtagttcggttgggcacgtcatgctctttccctgggatagctttgctaaaacaaggtctagacgaatgttggtaccttcctgggctcagaggctgcattcttgaatttcttctagctaaaagacgtaaaagatataatggtacccatagaaggatccgggcaggtagtaaagcccaccagacaatgaaggttatccagtctgtccaatggctttcgtaattggcaggaagactagcccaagagcggagtgagctttgagacaagggtgatggaggcgtggacatgccatcactatcatcatcaccagaggaatagtccaagctagaagtatcagaatccacagagagttcgtgaatgaagtggttgaaagaagagactccactgcaaaaccacagaaatcaaaagagagtcgaataagctgctataaggtaaccacaaagaagtattagagagttgaagagagttttacttatgcatccagcgtggtaaacgaggtccacgcaatgtaggcctaagctcccatccatgaagaccttcaagaacattggactttccgggcaaaagtgtcaagagaagcgcagaaaatccattaatgcatcttgcaatgttgttcaaagactcataagtcagagttttcactgacctgcactaaaaaccaaaatcattagttagcttaaaactattttagactaacacaaacaatcctaataccaatcaaaaacccacaacgaacaccaaaaacccaaacagacaagcattaaacaaagaaaactatccgcagatacaacgagaatcgctgtaattattacaggacaaagagtcaatatgtatactttcttcaaagagacaacaaaccttcaacaactaactaaaaatggtaaatcagaaatgtatccccaaattagtaaaactatataccactaaatctcaagattaatgtaaatcagaagatataagatatagacttagctcctagctccactataaaaccactggctcaaaatttggcaacttccatatctaaagcaaatctaattactatttgagaaaatctaatcgaattaaaatccaaattaaggaaacaaaacagttgaaatcacatatcaaattactaaaaccactaaacatgcaactaaaaaaacaaatcagaaatcacaaaatcaataagcgtgcacagactaatggtgaaatcgaaaagagagagggactcactcttttgtgatagcaagagcattatcgacgatcctctgcatgattttgtttcccaatatagaaatacaacaaaataaaataaaaaatctgaaaaatgaaagaagatagaatccaaaaaccaaaagcccagaaaaactgagaagagtcccacaaaatcaaaagccgtaatcgggaatcgaagagaaaagaaacgttttttttt

SEQ ID NO: 34782 - DNA, 705 bp, Arabidopsis thaliana landsberg
aaaaaaaaaaaaaataacagatcaaacaacaaaaatgatataaagctctttacatccaaacccggattctactttaaatatgcggatccggttacatactacaatgctgtaaaggaagcattttcatgatgaacctgccaagtatgacgtgtttttaaagctctttactgacgttcgcgtccaatatatagatatgagttgttttctctcttgtaatgttaggcatgctcatcatttcataagtaccaatccacagaacaaacacactacgtgaactgatcctgatgttactaaggtctctttttgtagagtgtatgtcgctagtgacatttctagaacgaaggaactcatcaaagatcacgagaatctgcttcttcgtttaaatgccttcctttccagctgagactcagagagtcctacatcccaatattgagcaacgggctgcatctgatgataacaaaagaagttccttgtagactgacaaaacataagcacctatgtgctttgattgagctttgaacccacaagagccaagatttagctaatactacatatgaaccaattgcttcctctactaggagctgtaccaaatcttattatcactgtacaaagtttcatattgttaaaaactaatttacacaagattacttacaacaaataaagttaaaacaaaaatagattatagagtttggaattggtacttta

SEQ ID NO: 34783 - DNA, 5496 bp, Arabidopsis thaliana landsberg
  unsure (1)..(5496): unsure at all n locations
aaatggtgctgctttcttcaccgattctccaggtgttaatttgagttaaagagcctaagatttcttaaacatataagataaaataaaatcatttcaaccacactgaaattttgttttctctttttagatcagtttccccgattcaattccgaacaatttgctctaagtaatagttattctattctagaaccaaaacgttaaaagtaaaattccttaccgagatagccagacgtcattggagactgttgccgacgacatttacttcggtgatgaacatgacgaacacggcaagaggaattcggtttttctcctgcggcaactgattcggcaagacatgctgaccaagaggacttaggctgtttttgttaacgttgtttttacttcttagtacaaaaaaagcgaaaagtaaaaaagttctcacatcgttaaagtttaaactttataggcacaccaaaagatgaacaaatatgaagatacataaaatacaaatgaggacaacaaaatgttacaaatgaattgaatcagtaaacacagttaagaaaaaaagaagaagataaaaaaaaaccatttgtaaactgtaatcattacattacaataccaactatatacagtagcattataaatcaaacgatttttaaaaaatttggcaaaaaaatgaagcagaagtttcgatttaagaaacctctcaaacaaaaacaaaaaatgaagtggtggtttacttgttagaccactggaattctatctcaaggtttctgggaccacttttgctttctggtaacaaactatattcacctgcgactgctcccagcatcaccaccctatcgatttggatcgttactttcccaaaggaactctgcagaaagaaagaggcgaaaagccacagtttcagttaaaccggcaaattttcaaactgtaaaatacgagtgaagtttgatgacatacctttcccattttgcttttgttcttgcatgaaatgtggagtttttgacctttgggagggctctcaaatgaccatgagaagctctcgtcccactctggattaggacctgtcgatatcacctgagaaaatcgaaagatacggttgatatctaaaggaattactagtcacagtgaattgacgaaagggtgataagtcttttcctaccttggtctgtctaggaggattgttgccgagtgttatcttgcagaacacgctcgggttaccaacggattgcttcatgttgttaccacgtttgatagtgactaccagagtacctggcaaacactgcaagaggaattcagctttctcctggaaccgtggtggacctgattggattaggtactgaagtagggggatggcgtctgcagcagcaactgattgggccctggaaacttcggcaggacaggctgaccaagcttgtctgagaagaaacaatgcatccaaggcagcttcttgtgttgcttctgatcctgtcttgagggatgtaactagatgtggtatacttagtgttgcaggctctgtagctcttagacgcgggaagttgttaaacaaagagtttaaggcttttaggtattcatcattcacggttccagtggcccataagtctttctcaatggcagctgcaaattaaaaggaagcaacatctgagatataagatatataataagaatgagcagatcgtattgatacaaaaggtacagagattttctcaccagttattgctctgacggtttcgctagatgcgtactcttgaacggtgtgattagagaagagtagttttacgaacattgcagcctgaacagacgtttcaggatcactggaactgatcagatccaagacgacctgcacaccacctgcctcggcaactgctcttttgttagatcggctatacatgacgagattttgcagagcacatatagcaactactttcatttcttctgtgggttgttcttcaaggacattgactaaagcacggcaagcagaagctgcatcggtgcttctagcaagagcttcattctggaaaagatcaccaagggccaaagttgctagtaaccgcgcctgctgagcttgagtttgtggatccaagaggtactgagacaatggcaagattgcagtcttggtggcttttgaatctctaatcttcacgttgttgagcagtacctcgagcagtctcgctgctgtgtcctcacactgatgagaccttaaaagatcaagcagagcttctatggcaccactttcagccatggactctgcactggttccatcatcgctttccaacactagaagagcgttaagtgcaccaaccacggtgttttcagatgcagaacgaagcagtcttacaagaacagcaacaggaacttccaggtaaaattcggagctaaattgcaagatgataaccaaaattgatgctgcagactcccataacacattggagagcgatggatcagcttgcagtatcacctttgacagctcactcacaccaccttctttagctatttcatttggccatgttagagcaatgctgacgagagctttcacagctctctgctgtaataggtgtatgccggatccctgcacatggattagaggaccaatcgcaagttgcgttaatggatctttctgcagatgctcctcgtagagaagatgagatagaagctcagctgccaactgctggactgctggggatggagattccagtagcggaattagaggctcaattacttggtgcggtgtaagtgtataatcagcgcggcattgtggatgttctaagatatttaccagaacttgcagagcactgtgctgtccatcagctccaaactccaacctcgtcagcaaatggaaaagtggctccaccactttcgcagcagattgtcccttggcaatagtcgcattatttgtgaggattcgaagcagttctgaaaacgcagcacatagaaaatctggagcttcgtggagaatatcaagtacgcagtcgataactccagctttcaccatttccagtttacaagcaggcctgtccttacccaactttactagagccctggatatagcctcatgaagcacatagtttttaccatagagaaggccaacaagaggtaccacagcgccatgagctgcaactagttcagccagttgttcatcgtcgacaagcttgtccagtgcacgcacaactgaatgctgagcagggctgaactcagtcacaagaagagagacaagtggctcaacacaacgcgctgcagcaactgtagatctaatccttgtatttgcaaacagaacataacacagctctgcagcatctcccttcagttccatcgtatagtttgaagaaaggatcctgcagagaacatccaccgcattcatctccacatctgcaactgccagagcccgtgatggattatcactcaacaacctaacaagtgcagcaatagcagcatgctgctccctctctgaaccagtgttgagaatctctaccaatggctgaacagcttgtctagaagactctgcatttcttatatggtcagcagtaaagagactatccaatgccttggcggcactgtaccttgccccccttccacctagacgcaaaacagctacaagttggctgaccgcgccaaatgctgactcatgccttcgaatttcagcactgctaaataagatgcctaaaagacctgttgcagcttcctcttgctcgtcctgaggtccaagggaaagatatttcgagagaccctcaagagcacctgactctaccatgacaatcatattttgtggacagtccccagcaagctgagttagaagattaagtgaaagtagaggagcaccggggcggtctggaattggtttaagaagttcaactagtaagggaatcgcctttcgagaagtagccccaactctaatatcttcaactcggaaaagcctttcaagggcaacctggtctgggtaccgcactaaagtgaactcctgcgacagctgcagaagttcttttatgtcatcatcagaacaaccaagcaatgatataaacccagccgcagcaccggagtttgcaacagatagaagagttccgcgactaccgttacagacaagactagctagagcttgtgctgcaaaatatctgtctgcgtattcctctgacttcacaagatttgagagcaccggaacagccttcattgttgcatgtgcgcgagtgatttctctgtcttggaaaagtatggccagcaataaagcacaaacccaaatgttggcatcttctccattatcagcctgaaatgtaaaaaaggtattaaagcaacataaacgacaacctagcattccaaaatgagttagaatgttaaacgctatcacacattcataatatggttttttttatccatacttctgaaactttgataagttgtgatctcaaagattttaatctataagagagttgaatacctggagaaaacggttgcctattctgtcagtaatcaactcaatgccttctgactccaatattactgctctgctcttttcatcatgacaagaaagaaccgagagcaaccagatggctaaattgtctccagaaataactgttgcccccgtggaaccctccctattttctgttgcctcttcttcttcatcttcttccttttctttgggatgaatgcatatgcagattttatctttctcatccttttcctgatcttgcacagaatctaggatccccacaagtgcttgaacgaatttggcacacaattgtgtctcattcagattttctatcatcttctggtcgtcaactttggcagcacagataataatagcagctccaccaatttttattttcgggtccctggtatttatcacccttttagctatagatgacacgcaatctctggcattgttgaccatgtttcccaaaacaataggctgatctcggcaaagtcttgacaaaacttcaatagctttgtcctgtagtgaaggattagcaacactcactatagatgagactattggggccatactgttgggagattcagccaaaacagcccaagctggttttacatttccattagctcctgaccttgagaatatagcaagcgcatctagggcctctgatattgcannnnnnnnnnnnnnnnnnnnntctagaagagacactaaggcaagcactgttccagctcggttcacagaatctgtcaatgcagaatcaattcggcgacgactaaggaggcgggcaattgccgcagcagcaagtgtcttcccagacacnnnnnnnnnnnnnnnnnnnnnnnnnnnnnnnnnnnnnnnnnnnnnnnnnnnnnncttctctgacacttcactgtccaatataagattagccaaagcgcacattccttgctcagcaacttctagaacagaagagttggctagagatactatggtaggcaatgcttctctggcagaaatggccacatcgcgattctcattaattgaaagtaaaattgcagccaggcagcggcaagatcaacaaggatcctcaccgaatccacatttaacagttttat

SEQ ID NO: 34784 - DNA, 5411 bp, Arabidopsis thaliana landsberg
  unsure (1)..(5411): unsure at all n locations
gtgagggtgttgaagaacaagaagagattgcagacggaagcgaaaagtgaaggtcattggaatgagaagaagatggacctaggaggaggaggtaaaggagtgaggaatggtttgattcatgatcatcatcatagacaaaaggcaaaacagatatggaggaaacatgtttggattgttttgatgtttgatctctgtatctgccttgttctctttggaatctggctttggatttgtcaagggtttcaatgcatcgatgggtaattatcttcgatcatctaagttatgtgtggttgaatgtttaaaaaaaatatccgaggtgttgtttccagggtttaaaaagaaagcctggtttacacgtttgtgatgatgtttttgtttgtgtttttttgaagttgttcttcatgaggtaaaaagaaaaaaaagtgtttgtaaaaatctcttttgtaatgatatctcttcgttttctttggatgttttgattacacttgatttgttgtgtgatattgggcgaaagatgtggtctatgcagttcaacgtctacgaattttaaccccaacatgaccaaaacactcatatttgtagttcttagatgtaaatttttactgcataacccatcttttccaaaatgtttgtcaaacgtaaattagcatttttgtccgcaagatacaatgactttagcatgaaccaaaagggaaataaatctcaatcaaccaccgtattaattattttccgaaattcatatgtgaatataggagttgtttggcaattcagaaagaaatactaatcaaggtttataattacagaaatctggaaatgtatgtcggtcacatcagaaggaaaactgaaagagatatttcttgaatcttcttcttcacatatattttgtcacattgtatagaaaaagattgttcacttccgctacttaacggtcaagacaacgaccaaggccaccaggccccttcacttcttttatcttcgaaaaccaaaattttcaattatttattctctcctccactcacacgaaagtagcaaaagcaaaatgaaactttactctctactttccgttttcttggtcatcctcttggcaacaagcgacagtgatgcctttaccagaaacaattttccaaaggatttcctctttggagccgccacttctgcttatcaggttcgaatctgcttctttggtcttcatctttttatcttaaattattttgtctataaaatcgagtttttttttgtctacgttggggaatttgtggaaatagtgggaaggagctgctaatgaagacggaacaactcctagcgtctgggatacaacctcccactgttgtaagttgttttgttttattttccactttgagtcatcattcggcgtttttgtgagaagattgtatagatcattgttcaaaaatcgcagataatgcaagtaatggagatatagcatgtgatgggtatcacaaatacaaggtgtgtctctcttctttgttgaagaagttatcgtaagtctctggctctgcattcatagatgttattgtccaggaagatgttaagttgatggcagaaatgggcttagaatcattcagattctctatctcctggtcaagacttatacctagtaacgcctattcttggtttcttaattcccaagtaactaataatgttggctctgacctcttatattagaccctttttgtctgtgtcatttttcagatggaagaggacgcattaacccaaaaggtctattgttttacaagaatctcatcaaagagctacgaagccatggtaaggtttttgtctttttacttttaacggaactaaagccaattcatttgcttctcacaaaactattaacaggaatcgaaccacatgttacactttaccactatgatcttcctcagtctcttgaagatgagtacggcggatggatcaaccgcaaaatcatgtaaaggatacaaaagattctgctctaacaatgtcattttttaattatatgaattgtaagtaaaaaaatgttgtttgttttttatattgcagagaagacttcactgcttatgcagatgtatgcttcagagagtttggggaggatgtgaagttatggactacaataaacgaagctacaattttcgccattggttcttatgaccaaggaaccgcgccgcctggacattgttctcctaataaattcgtcaattgttctactggaaattcttctacagaaccatatattgcaggccataacatattgctagctcatgcctctgcttcaaagttgtataaactaaagtacaaggtatatacacacattttttgctcttaaaacctgaacctcgtatgatcatagttcattatgatggtgcagagtaagcagaaaggatccatagggcttagtatatttgcattagggttatctccatatacaaactccaaggatgatgaaatcgcaactcaaagagctaaaactttcttatatggctggtgagaaaaaaaactttctttctatgtttcaataacttgaggaaaaaatctgaagatcactatgaaaattcaggatgttgaagcctttggtatttggagactatccggatgaaatgaagaaaactgtgggatcgagattaccagttttctcagaggaagagtcagagcaagttaaaggatcatctgactttataggaattttttattacacaacattctatgtcacaaaccaccaaccttcagcttctctctttcccagcatgggtgaaggcttctttaaagacatgggagtatatataattcgtaagattagtgtttttttcatcattaaccagtataaaaatgcttctgatgaactcttttaactaagaattcttcttctttggatagccactgggaattcttcatttcttgtggtaaggtcatgcaaatctgcatagcacatttatattcttgaatctcgtgattttcctaactcagttgctttttttgaagtgggaggctactccatggggtcttgaaggtattcttgagtatataaagcagagctataacaatcctccagtctatattcttgaaaatggtacaacacttcattcttttttgttttcttactctgctttgtctgcttgaaagcacactttcttgttctttaagattcttcaacttgcaattataataaaataaaatacaggtatgccgatggtacgcgattcgacactacaagacacacaaagaattgaatacattcaagcttacattgacgctgtactcaacgcaatgaagtatgattctccttctgcatcttttagtccccatattactactatataaggattgattggtataattccagtattacttaactctctctctctgtttgtgactaatcaggaatggatcggacacgagaggttactttgtatggtcgatggttgatttgtatgagatattgagtggatataaaagcagcttcggaatgtaccatgtcaattttagcgatcctggtcgcaagaggtcgccaaagctctctgcttcttggtacactggttttctcaatggtacaattgatgttgcttctcaagatatgactcagttgcagagaaatttctctggctcttcttcactgtaatgttataatattaacgattctggtctagttgggatcctgatttggtttaatttcatcaattctatggaaaaaactcagtgaatttgcaaatgtatatggattctggacgtttagtaaaataataactttttacgtgtttggaatgaaacaaacatttaaaggctacttcatatgtttgataatcgattcgtatgacaattacgtaggaatatctgtttcttcttcattgtgtgatatacttataaatatatacgggtcttgaatcttgaattcttgatcccagtttgttttgagtttagtcatcttttttgaatactaaaaagcaaatatttcattaagaaacatcatgtattttacttcatcaaatatgtttgtaaactgtaaacgcaaacaacatttctgcgtttacatttaccaatttgttttgaataaaacaatgtaatagcaaacgcaaataaccaatgtagacccaacaaaaacttgatatcatagaaaacaaaaagacctagagagaatctttgagatcaatttgtggtgggagcaacggtcaagcctggagagactttaaggaaagccggacgagaacagagatcttcccaccacgccttgacattaggacggtcgttgatcaaaccggcatgaatcgtcttcatgaagtagtaagtgtaaggcacgtggtggagatcggcgagtgtgtaagtatctccggctaagtattttgtcttcccaagtctctcttcgtacacgtcaagtattttccctagattctccagattctcctccacgatggctgcattagaagactcaccttgaagcggcacgccgatgagctggtggatccgtctggagatcgcagggttgaagtggtgagcctccacttccgaccataacttcacaatcgctgcttctttagggtcttcgtgtcttgtcaaatccgttcctttgtctctatgcttctctgctatatatgcagtgattgccctcgactctgttttcagtagacaaatatttgttaaactaaactaaaatcattatgtaaaacaaatttatacgaaccaaaaagggtaagatcgtcatcttgtagagctggaactttgccaaagggctgcatnnnnnnnnnnnnnnnnnnnnnnnnnnnntcatacatacagatatgtgtgcatgatagtaatgtgttgagaaatatgcgcagcgcgtacgttcatggagagaaaagaagggagcttgtggtggcaagcaaagagattgacagggacaagctcgaactcagtgttcttctcatgaaggcagagaagaacacgtgccacgcacgctgacatctcatctccatatagcttcatcgccatttctgtttttgttctttttatcaaagaccgcgtcacactactcgtaacgcggaagagagagtgagggagatcacaacgcggtgcttctatatatatgacatatgctttgaatttcgtaaaacctagccagtatgtatgtggtcctgtttcttggactttttaataactatgtactgcaatatcgaacctaacattaggttatgtacgtactcgaatctttccagttttatacacattatttcagaaattggttattttgaggtcactgaaatttataggattcctttttctcgtgcctcgaaactctggtttacgagattcatctgccatcgttaatatctaattaatttgtgtgcacgaggcattcagtacacgtggccaaactaaataaagttgactgatcgatattacacaattggtttagtcaagttgttggaagacacaaattgacgagccgt

SEQ ID NO: 34785 - DNA, 813 bp, Arabidopsis thaliana landsberg
  unsure (1)..(813): unsure at all n locations
gcttgtcgactctagaggatcccctttcataaaatcttacacattaactaataattatcaaatctgtttttttttataagtcgtattagggctataagttaaaaaaaaaaaaaaaaaaaaaaaacgagtttcactaaatggccccattggtgcattatcaccccattggtgcagtatcacatgaaatttcttttcttggaaaaattaaataaaaatttgataaatattaatattaacgtagaaaattgtctgtattcagttaattttggtatcacacttatgttctattattcgtaaaaataaaaatttaaagatattcctctgctttttaaagaattaacaactagtattaaagtaaaatataaaaaaaaatacccgtaaagactatccacaaaaaccataatcatgctcgacaatgaaattaaataacattcaatggttaaatctcgtagcttcttggccatcaaaatcatagggcttagtgtatgccaaagctaatcatctcttcatgtacgaaaatgaaagtaatactaataaatgagaaccatatatgaaatgcatggtccttcttttttatgatttattaatattgtaattattatacgttattatcagataataaatttcagatcatgcaacttatacacatccncacatcgatcaccatcagacatatactacgctttagccaaaattaaatgcatcacgaacataacatttgtggttgatgtgaatagaatagaatacagaagtaacaaatctactcgaccaaaagttgaacggtaatataatttactattcaatattttcaat

SEQ ID NO: 34786 - DNA, 160 bp, Arabidopsis thaliana landsberg
cacactttttctttttacctccacatccaccactgggatgccctaacaacagatcaagccagcccccggcgaccgctttaggcgcaagcaaacccaatattgtgctagctgaacgccagtcaagggcttgcccattagggattttgctgaatcacggaaa

SEQ ID NO: 34787 - DNA, 2187 bp, Arabidopsis thaliana landsberg
agattgtgtaatttgtgggatgagttgaaaaaattatcaaccaagtgcggtttgtgctcatggatcgataatttctgcaatggtcagggaattagataatgagaagcttcaccagttcataatgggccttgatgattcaagatatggtgggctttggacaagtctcattaacatggatccgctgcctctctttggcgttgcttattccaaagtaatcagagaagaacaaaggcttggttcttcacgggctcaagaacagcgacaagaggcaatcggttttgttactcgtcgcgagaactcttcgatagcatcttcttctacacagtctgaagtccaatatgggaatcatgttgattcttctattatcaagtctcgtcctgttcagtgttctcattgtggacgtacgggtcatgagaagaaagactgttggtccattgtaggatttccagattggtggacagatcgtaatggtggcggtcgtaactcgggtggacgcggtcgtggcggacgtggtgctggtcgaggtcgtggcggacaaacaccagtggctcacgcaacaagcgccaatccaacttctttctcggactttacatcggatcaacttcaagctctctctctaatgattcaagagaaaacatccaccggcacctctgataagttgtctgctaagacgatgctttgcaatgttatttttgacacaggggcttctcaccatatgactgggggactttctcttttgactaacatcgtccctattacaccttgttctgtgggttttgcggatggtagcaaaacttttgccttaagtatgggcagtttcccgctgtcggagaaacttacattaaccaatgtgctttatgtaccaacattgaattgcacattaatttcagtctttaaactcgttaaacaaacaaaatgtttggcattgttttctgatacaatctgtgttttataggatcctttttcgaagactttgattggaagcagtgaagagcgtgatggggtttactacttgacggatgttgctaccgcaaaggttcacacagttagtgcctcttctaatcaagctttgtggcatcaacggttgggacatccaagttttttagtattgtcgtctttacctatggtttcttcttctggatcttctgttagctctcgttcatgtgacgtatgttttcgagctaaacaaactcgtgaagtgtttcccgatagtattaataaagctttggattgtttttctttaatccattgtgacgtatggtgtccttatcgtattccttcatcgtgtggtgcggtttattttttgactattgttgatgatttctctcgatcagtatggacgtatctcatgctagcaaaatctgaagttcgcactgttctcacaaactttttttgcatatacggaaaagcagtttggcaaaagtgtgaaggtggttcgtagtgataatggaacagaattcatgtgtctctcatcttatgttcgtcaactggaattgttcatcaaacttcgtgtgtcgggactccataacagaatggtcatgtagaacgtaaacaccggcatatacttaatgtttctagggcgattgtgtttcaagctaatcttccgattaagttttggggtgaagcagttctcacagctgcatacttaatcaatcggctctccttcatcgattcatcatgggctttctccttacaaaattcttcataactccaagcccgattatgatcaactgcgggtttttggttcgacttgttatgttcatcgtgtctctcgagataaagacaaatttggggagcaaagtcgtttgtttgttttcgtcagttacctgtttgccaagaaaggttggaaagtgtttaatattgagaagaatgagttctaatctctcgtgatgttgttttccgggaagacattttcccttttgcgactagagacactaacctagttcttgtgtctccggctcctcttgttgttgatgaagattggatggtttctacgactaatccggacagggggagctccattattgtgtctaataacaacacgaactcagactatgttgccgaagaggactctgtttctaaaccggcatttgtagttgaaccggatttggtagatgatatggattctgtaattgaaccggactctgtgattgaacccgcttgtgttaatgaaccggacactggttc

SEQ ID NO: 34788 - DNA, 447 bp, Arabidopsis thaliana landsberg
agaaaggttgttttcagaaatgggttttttggattttggcttgaaattagggaaaaaaatttttagtatatagtgtttgttgtaaaaaaccttataatgatgggttgtggatttcacttccgttggttcttcttcttgatcagtggccttcaagctcctctgtcattgtccctcacttcccaaggttagatctttataatcattatcttcttgttcatgttttaaatgatatgtttagggttttcgttcatgctttaatttgtgttgaattcaggatccgcattgttgaagttccgggcaagagtcaactcagatcctcatgggactcttgcgaattggaatgtttctggtattaatgatctctgcatttggtcaaggataacttgtaaagacggtaaagtgcagattctgtaagttcaatggttttagagttggatagggtggcct

SEQ ID NO: 34789 - DNA, 2442 bp, Arabidopsis thaliana landsberg
agatactatctcacataatctattgcatcacggcctcgcgggtacttctttcctataaaggataatggaaatgttcttttaatttccttctatatgataaactaaacttactttgattctttggtttatgcataatgtattattgtacctttagatcacagatgttatatgaggcaatagaagaaaattaaattatatacacatactatacatttatttccagtctcttttgatgagtgttagacatgaatgtataataagctcaatgagattttcattctctggtgtggactgtgagatgagacaacaacaaggttagtttttaacacttgtgctatgttgttgctttaaaaaacgacatgtttggatgctaattcagtagaaaacgacacacatgtcatcttcttcctagtgtttaggttaccgtcactggtttgcagtctagtggctcttacttagcgtgcgagtcaccaataggagccacttcttttcttttcggacccactgatcagatgtaaaccgacatacgatagaagatttatatcttctcattttcaaatcttgatggtgttataatttcttagaaccaaaccaaatttacataaatgttttaacttcattttcatttctattttaatgaattttgtttgaatatttgtttatttatttttacttcatcttttgttcccattattcatgaatatcatgtaatccatgatccatccatatagaaaaaaataagtttatgtttttttggtgatttaccgtttaatgtgacctatttttgggaaaaggatacaaatgttttgtcatattacttgtatccaatccaaacttgaaatgaagaagcaaatctttatatatgaagaaaaaaaagatttgcatgtaatattctagaaaaaataatctcttgttactaaaaaccccacaaaaaaaaggatgaagaaatagagaatctccttaaaaaaaggcagtttaaaaaacaatggttaatataaatcttgattcccgcttttttctctgactttgctctaagggaaaaaaagaagttagttattcgtcttctttcggagcaacaaacattgaaacaggaagaagagaggagagaaagttaaagaccagaagaagaaacctttcacaataataaatcttctatcttctatcttcttctctcctctcttcttgttcccagacacaactagagaggtctggtaacacctgttcttattcatttcaacatagatcggtaataatggctcgtcctcacccatcggacgatagccacacgctagtgaactcgacggtggtcgccattgacaaagacaagaacagtcacttcgctgttcgttgggccgtcgatcatctcttcaatatgatcattaattccaaaatgattctactccatgttcgtctcaaaaattctaatcgtaggtatcttctcctcatcttttttattctctaatcatacacaaatcgcatcttctaaattggatgaatcaagaaatgttgttgcagatggaggaaacattgatgatagtgaattaaatcagctttttgttccatacagaggctattgtgcacgtaaaggggtatcatttctcattcaagcatttcgttgaactttacatgcattaaagacttagtaattgtttcttttgtcttacatagatttcaatgatggaggttattctagacgataccgacgtttcaaaagcagttttggattacgtgaacaataaccttgtgaccaaccttgtgttgggatcatcctcaaagagtccatttgcaagatctctcaaattcaccaagtcacatgacgttgcatcttccgttctcaaatcaacgcctgagttttgttccgtctatgtcatttctaaaggcaaagttcactcttcaagaactgctcaaagacctatcaccaatacacttgtccctcctcgtgtaccttcttctacgtttcatctacctgaccctgaccatgatcgttcacctaggtatttattagccaaaactcttgggaatgtttttgctatgttttgtttgtatatatataacaagtgttaagaatttgttcttgaggatattgtaggagtcagcgtaatgggagaaacacagttccagagaggtattcccatgaaaataaaggcttcaaacctgtgagagaaatgcataaaatccctacaaatggatcgttggacttcaattatgagtttaggcagggaaagggtcaaaggaactctactggaagaagttcattttctgatgaatcgtctgatgttgggtctatgatgatgatgggttctattgacctaagtgctgacaacttggatatggatctgatggatcagggtcttctgatgagtctgattcgcagtctacggcaagttaacaagtatagcaatagactttatgatgatatcgagtttgataagattagtatgc

SEQ ID NO: 34790 - DNA, 1207 bp, Arabidopsis thaliana landsberg
acagattaagtaaaaacgttgagtttcattggttcagcaaacactacagctaaaataaagaacaaactatgtggttctctgttgttatcaacataaaccactgtacttggtcaattgatacatacaagatgaatctattgataaagaatttgatatccatgagctgtattttcgacatagacctggtctcaattaacaaatatatatctctttattaaaccatccaaatttgtctatatctagggtgatcatatccattatactattatgcatctctttcaattttggtattggccggtgagtcggctcaaatgttttaacaaggcaatgaaatgtataaataaggtttaattgtgtatatacagatgctcgctaaaagttatgtgagattatattggtgaattcttgcacatgtgaccatgtgaaaatcatcaaacgaggtcagtaaagacaatgacccgcattctctattcattaagtatgcaacaaatccttaggacaagtcctttaactctgccccatcttgtaaatcctttcatagacacaactcttcccttgcccattctatataagtatcaagtatgcatatatctacttgtatatgtttttgtgactgttttattttctggaaaaatgagccacctaacaaataaaaatgctttaaatgggctatttgcatgcgaatgagaccatctccattggggtatctcataagagtttctcacaattaaaaaaataaaaataatgaaaatgaaggagagagagtgtataaagtttctcacttgagaaactctgagatattctgtacaacccatcatgacaattctcatcttactattggttcaattttttaacaaaaatatttttttaatcaaataatcaaattataatataatattaatatttttttttgttaagaaactttgtgggtttctcatggatggagatgcccttaaaatgtcccgaccatgttataaacacacacattaaatgtatcattcaccaaaacttaaacttgaccagccttaaaaggattttatatctttgatattggaacttgaaagtctcatcacttagagattgtactaataaaatatgcaaaagacaagactaattgacaataaaactgcgcctcccttggatcataattagattctcgtggataaataaaacccccacatgcgacagctgaagaggaaggaaacac

SEQ ID NO: 34791 - DNA, 3777 bp, Arabidopsis thaliana landsberg
  unsure (1)..(3777): unsure at all n locations
tagagtacatccagaggtaatgcatggtcataactacgaagacgtatatcattgctgacaaattgaagacaaggttcacaaagagagcccatcttgagattgagaaaatgatagttggggttagaaattgcgagagatatatgtccagaaacaatttgtatcaaattgatgtgaatggtgttagctactatgttgatatggagaagagaacttgtggtcgcaggaagtggtagatggtggggatcccatgtattcatgcgacacctgtgataataggacgaagagaaacaattgcagactatgtgagcaagttttacacaaaggtaatctggcgaaaaacttacaaagatggtattaggcttgtccaaggtatgctattgtggcctaaaaccaataggctccctgttttgccaccaccatggacaaaaggaaatgttggaagaccgagtaattatgttaggagaaaagaaagaaatgagacttcttcttcttcaaataagaacaagatgccactgcaaaagagaatcatgacatgctctaactgccttcaacaagggcaaaacaagcaaagctgcaaaaatgccactattctgattccaccaaagagaccaagaggtcatccacgaataaatcaggtttgtattcttgttttttttttatatgttttacaactcacttaatcatgcaactgttcagactgtcatatttaacttaggaggaatcacaagtgctaagatcacaacctcatcaaagttcacgatctcagtgctcgaatcgcaagagcaaatacacggatcacaacctcatcaaggatcacaatctcatattcgatcacaaggaccaagggcaacaggcggaacatcagaaagaccaagggagacaggtggagcatcacaagtacaatcccaaacagaaccacaagcacaagcacaaactgagccacatgctcaaccacaaggacttggtggatttgcatcatggtttgagtgttcaagacaagattagtcacaagtttctttttgttgttgtttgaacttaagctttctcataagtttatttttggtggttgacataatggatttgtctttatgacataagcttagtatcgatttcattttgtggtttcgacttgtctttgtgacacaagttttataatgtatgaatgagtttcattttggtgattctcattgttaaacaagcatttagtagcatttcattacaatcacaacactaagacaaaacactaggactgattatcattgccaaacaaacatttcagtaccataaaatcattttattacaaacacaaaacactagtaaccaagaacatgcttatggtttttggtcttatagaacattatgatcacaattgcaatgacaattaaaccaagacacaccaaagacaatgtgctcatccatttccatttcttgatttcccttttggtccacattccttcttccttgagttcttcgaccatagcctttaacacttcaatctcgattgtaacctcaactttagcattgtttatctcactgtcaatgatggagaattttggtaaagcgtctgcaaccgcttcatacacaccatcttcaacccatttaaacaaatggtcctacattatgaatcgaaaattttaagatgaaaccaaaaaagaccaattttaatttcaaaactacttacatcttgtttcgttggacagcaaaagaatggtcttccagggttagtcttcgacgccgaggtatagattacgacgtctaatccacattcacactttgaaggaaacccacgtccccaacgacctccgtcttgattacgaggatatgaattcccagaaatgcaactcattgttgtcgctcaagatggagaattcgggtatgaagaagaactggagttccaatcgcgtttagaaatgatgaaaaagaagaagattcatagaattgggattgaaaattgattttagggattttattggatttggggtttcgattaagtcgagaacgacgcagttttggtcactaacagagagatgttaacgggtctaaacggctgttaatgagtccgttatcagatttaacgacgagtatatttaggcccggtcaacgaaataatcaagccttatataaaagtcaacgcaaagttaatgtttaaaacgaccttatacaaagttcgtgtttaaaatggcgttttcggacaagttcaggaattaaacgacatttttcccgaataagttaactttctaactgaattattaactttacttcttgaatttgggcttaacgtggcccagagttgacataattgcaatcacacattaataaattttctccgatcatcggaaaaagcagtaatcgagatccagaagctcaacgacttcttctccggtgatggagacggcgaaggaacaaccgatagtttcctcgaagatggatcggagggtctctgttctctctccaccacccaggtttctcctcgataccgatttcgctagggcttatttttgttctctcgtttaactcaatcaatcttcttcgatttttgcagagaatgtacggattcgctgcgtctttagccgctggtctgctacttatgttcctggtataatatcaaattccactaatagagagagaaatttgtgattgattagaatcacaaatccgattttattgttcttataggcttttttagtgattgatgttcctgttcagcattagaccgtatagaagaagtaatttcatttatctgtttcttcttatgcagtctatgattgtatttggtatccccatcaagtttgcattgctcttcacatttggaaatgttctagctgttggaaggtatgtttttgtctcagtggaaacttgctgtttggctaacatttggccatttcatagctttgaatggttctctgctcatatctgaatcttgttcttgttgtgcttaggatggatttcagttagactttagtcattttgatttctgatgctaactggttctacttcctgatattgtttaggtgaaattttcattctgagatttgtgcttagaaacatgattactccagtttacagttgaagcaattttacatttttcatcgtgctttcgtgtcaagctaaccgaagtatttcatagtgtttcttcatgattcgtaccttggaaatgttttactttgtatgacatattatggcttctggaattctttttggaagatcaaattttagagctatagatatgttcttgttttaagcttgcttgctttttgtaacttcagttagagcaattggcaagaatctgatggtattgtcttgtatcttacaaagtctcttgccatttttaccttcacaatgttaattcttttttaaaccacaagagatcactgtttttttttggcagcacagctttcctcatgggacctgagcaacagatgagtatgatgtttgaccctgttcgtttcttagctacatccatttatatcggatgtgtcgttgttgcactcatttgcgctctcctggtatgttcttgctctcttatacaacaaccaataactatgttttagttcaaagattagatctttaagtaattgcaagacataatatgacacatgtccaaaatctgcaatgtgtttgttctcaatacttctcagcttgaaattactgtcttttcaaaaatctttctcgtctcttgtagatccatagcanaatcttaactgtcctggcgatcctatgtgagatttgtgcactgatatggtaagttaaatgctaaccttcaacccaaaacagggt

SEQ ID NO: 34792 - DNA, 897 bp, Arabidopsis thaliana landsberg
tgaatatataactttttgttgctcttacaatgtttgtgttgttgtctcatacaacactccattaagatccaactctccatcccttttttcaaaatctttctcttgtttggtttagttatacttttgttttcatgtcttttaagctttctcttgtgttgtcttcttcccttggagatccaatattctgcaatagagaatggagatggtttccggcgagtctctctctaataagtcctctactcgcagttatgtcttcgaagttgacaactagggagccatttgtttctaaatgttcttcaatcttccaacttgagctttggctcattttttctcacagatctgatggatatgattctctctcaggttttctccgaagatcttttgcaaactttcatgccgacatttcgaaaatcacatatcgctcgttggcctcgcctttgatttgtcggatgacgtttgcttcaacgtcgatcaagtctatgtctccttttttctcggctccttcaccaccatctccccaactgaagtgattctagggttctgtgtgatgggcctctattcttacttaggcccactatgcttatctaggcccacttacgaaggctgtagtccagatccgataactacttggtccaggtccgatcttaaatatctgtcaaacccattaatcttgatgcttcaatactatggctcgaatggtcgaggactccactcttgccttgaatcaacatctttgcaatggctttgtgatgctcgtttacaaaatttgctgccaagctctcctatggctacacccgatgaacacataagcttaaagagcttcggtcccatgttataaatctcaattccttggtggcgtgactcttgtctataattagctttgtctgatccttttac

SEQ ID NO: 34793 - DNA, 868 bp, Arabidopsis thaliana landsberg
ataaagcctaacgttaacatcaaatcggatgcggattagaagctaaatgcacatagttaagcgtaatctattttgagaaattaattaccactttttggttcattgttttaagttttatgattcaatgaatacatagcacgtggaacctctctcccccacaacccattttgaagggaaatgaataattaaaagagacatacacataagaaagcacatggctttaccattcctctatcaattaccaacacatttgacccttatccacatgggtcttcgtctcctattataaaatcaaaatctacacacaaaatgttataacattttccaactcacaatatacaaaatgccatgcataaatatgtcttcgcaagacaaatatgtaacgtttaatattcgatattatctgagatttaaccataaaactaatatttctttattaatcaaattacatctacgagcaaaaatgataaaattcaacttatgcacattcaatagtttcgtaacacataagagtacttggaaactctaaatatatcttcattttggaatcagtgattcaataaaatagtacttatatttgacaataagtgtaccttttaagccattttttacaccatagcgttttttctttctgaatcgaaacttttacatcatactttcaaaacatctaattaatctttttaagttaaaagattaatacaatcaagtagaaagtaaacctaaaaaataataattcaactttccacatcagaattttaaggacaaccacatttatatttaaaatatatatttaagaagtatcttatttatgcaaacaaaatgggatttaacaatcatttagcactttgatatttttcttttataaacc

SEQ ID NO: 34794 - DNA, 824 bp, Arabidopsis thaliana landsberg
cagtttagattttggagacattcataaggacacattatgattctcttttcttcgcatagacaatatttttttggggaatggctaaaaaatatagctcgggcaaacaaaaaaaagaagacggctttataaaatgaaaacttgaagcaaccgcttcataaaaaaaaagatctttcaaaagacagaaaatttaggccaaatgggagctaaggcgatcatgaccagacaaccagcaaccatgttaactaagacctaattttgaagcaatcctgacatattttaaaattatatgcgacagtgcatatatgcgttaatcaacacacatctaatctgtattaatcatatctatatgtaaaatgaacacacattagtttttaaaattctcacgcaaaacaaaagaggtacaagtagttgtagcaataatagatagactttaattaagatcgttaaaacctcgttatcgaaagtgcgtacgaatattatattgaagctttctcattttaagtaatgaaatggaatattcgattttccacaatagtttagtataagactataatgtactgattacgtataactcaagtttccgttaaaggcatgcaaagacgttgtttgactgtcttcgttatggcctcgatcctaatcaattaaatatttcagattttgttgttatccatctcttatattaacaactaggtgttgccaacgccactcgcatcagttcactatttctgatttaacaaaaattttgttcctgtccaagtactcaaatggtacgtataaataagaaaagtagactatcaaataaataagaaaattttgatattatg

SEQ ID NO: 34795 - DNA, 1393 bp, Arabidopsis thaliana landsberg
  unsure (1)..(1393): unsure at all n locations
taaattcaatcaattcaacccctacttcacgccatgaactcgttaaaattaaaacttcaaaaaactagtttctcttttaaatcttgattggatggggtttctaaacaaccaacccaaattttaagccactccacaaactacagctttttttttatgattacactacttttcatcacaaaaaattcatcgcattttcatgttatagaagaaaaataacaatgaataaacaatatatgtgattgtataaacctttgattattcaccgccaaagtgttatcaattttaagtatacacttgtgttgatttttcgcaacaattttttttcttctatttttttaatttttgttaggcatgaattttatttttttgagctagttcttagatattgggaaatcctttgagctaaagaatcttaaataacgaaaacgataaatgactaacatccagaaacaatactcgtnnnnnnnnnnnnnnnnntagaagcaagagtattatttttgttttgtcaacctaaaaagtatttatagttagtaataaatgttaaggacagtttcatttaactaacaagaacctttcatataaatcataaatggattggccaatggttacatcgttgatgactggaagcttgatcaaacagctggacttttagaacaaagagactcttaatactttcttggtgtaatttccgtaaaatctcttatatcaaggtcacctttaaaattgattactactagtatttacctatatagattgacaaataagttcaaactcatggcgtagtctttgttaaaggcttatggagtagtattaactgttcagttgtaagaactatccacatatatattactagttttagtagtatcaattattaaggggaggcaaaaatgcgaataaactgctccccagttatattatgtcatgtgaacatttaaactccagtactccactttctagtgtgttttaaaatgatgctcttaaaagtatatctaaattttagttaattctatttggatattattttacaaacattatggttcttaactggtactaagctatctaataaatgttaggctaaagatatttaattgacaaatttatcaaaagctacaatattatttaaaaatcaactaagtataaataaaatgtgatagtaaagctaaaattaaaattgtaaataaaatgtgatagtattgctgaacatttaaacatgtgagtgcacattttctccaacgtaaaaaccatataatttaatgtaacgtcgcgtgtgtttttctatgttggtgtcaaatgtgtatgcatctatttatttgactatttttgcgtaaccttgtattttaatttatcatgcaatcaatccaaataccgcgttacgagatcgttggaacggacc

SEQ ID NO: 34796 - DNA, 820 bp, Arabidopsis thaliana landsberg
  unsure (1)..(820): unsure at all n locations
tgttctcaaccatctttatgggtgttctctggttaatcagctgcaggtaaaccaacatttcattagcggacacccaagaatttcaaggtacttactcatatcatatcgagaaaccagactctcacctctttcactgtctcagccaactccaccattgtaaactcacctgagaaaccaaagagtcggacacaaagcataagttcaagagatttgttgggttgtgttttgtcaaatggaggaatattgcgggctttacctgggttaccgatgttgatgggaccagtgtcatctccttccatgaggcgcataagtccatcaaccatgtcagatgcataacagaacctgcgagtctgtgtccctggtttctgaacagtcaatgcctcacccctacatatttatgtcaagaataataacaagagatgagtaatcaatcgggttatagctcggaaaaggtattttgtttgttcgattgagtaaaggggctcaccggagtgcttgagcaatgaagttgctttcaacacgtccatcatcaatgttcatgcgtggaccataagtgttgaagattctggcaatgcggatttctataaagactgaacataacacaagcacataaagaactcgagaaaatcttgatgaaattacaggcaaaaatgttaaagtgagagctttgagaaattgcatctgacctattccatgctgcctgtggtagtcaaacatcaaggtgttcagcaacgcgcttgccttaaacngcagactcctgacccctattgttatagcaacccagttataagactgtgaattgtcacgcacataagttcag

SEQ ID NO: 34797 - DNA, 743 bp, Arabidopsis thaliana landsberg
tgaaatattaatacataataacgtacgttcagttcacagacgttcttaaggttctgcaaatagcaggattactattaatgtttccctataatgtgtatacacatgatttatctgcagttgcgtcaaacaatcataactgaatttgtatatataaaaaggcatgggggatcgatcttcaaaactgtggatatgatttcctgaaatataactcttacaagtttatgaaataatccatttgatataaataaaaaagttcactaaacgaacaaatagatatagagactttacagcctttgacaaaaagaataagaagaagaattggaatgcaaagaataaaaaagcaataatggaaaccggtacgtaggaggaggagtgtggcacgtgcggtagaagaagcaaaatcctgaaaggccgtggaggagagcacgtgatggtccaacaccaaatccacaattcaaggtccctcgtttgacttcactctctcttcttgagattcgcctcacaatttatcttcttctgacttttttccccaaacgaatcacataaaactattaaagataacaacgaatatgatatgaatggcaacttgtaatttcctaaattccatgtcagatacacgaggcacatataagcattggattctcacggtaaataatctcttcgtaaaacaatttatgaaacttacaagtttcttgtggcgccatattatcttattgagatgtgccggtggcttaaccaagact

SEQ ID NO: 34798 - DNA, 1371 bp, Arabidopsis thaliana landsberg
taaaccttttattcctcagataattagatcctgacaaattatgtcttaatccacaactaatctactttcatatatggcattgatcaatatctttatacactttcaggatgtaatggtctctaactctctctatatataagatatgctcgaatatgtagcaacaattgttaacgagtatcatataatcaataagactttaaaaaataatcagaatcagattcttactaaccaattactgatgcgtaagaagagaaaaggtgaaaagatcataattatatctgatcttgctatgaacatattcatgtgaaaatagacagactttgatacgaagaaaactaaaacagagggaaattgatcttgtcagtttgtactataacttttgaattcttgctagatattttactctagcctctaaatgaaaacgtaaattttgaaggtaaacaataagacgatcctaattataatttgtaagctaagattctcatataaataatatcagaatagttcactcaaatctataataggcatagggatattggatggcttcacagattttaattttgaaaggagttcacaatttgtcgaaaaaacgttttccttttggaattgacgaatgagtcaccttaattaggttagtctaaatacaagaaaattatcgagtgcccattcgaatttttttattatttttcaggaaatgaccaaaacttatttagaagtcaagcacgaaattactcaccaaaatcctttaatctctgcattagtttatttctccctaaatttatattttctccatctaaatgattacggatccacctgccaaggaaaaaaaaataactgtgttacgaaaaaattaaaaatcaatacttggttggaaaactaaaactaaaaccgaacaaaaatccaaatatgacattcctattctaattcaacaatagaattaattattagcgttggaacaatctatatatagatattaaagctttgtgtgtgtaagatagaagagttcttaaaagtctatttgtgtgggtaagccattgatcgtttagtgactaaatgatacaacttctaatcccctttatcaaactttatccagtctttgtttagctgtacttttcactgatatattttctcttcttatgttacgtgaaaataaaataatactattgaaaagtaatttgattgatcaattccaccatgcaattaattaccagaactttctgctttcaattatatcttcttaattaattggttattatttcaacttcataactgaatagaatcccttatcgacaaaatgattactcttgtattgttacattattgtcattgtttccttaataattatcaatgatctagtatcataaatgttac

SEQ ID NO: 34799 - DNA, 417 bp, Arabidopsis thaliana landsberg
aagctgacatcgaattaataggttgttcgatacttgtggtttgtatgttaggctcttgagttaatatggcctcttggtgggccttttacattgagtttgagttgtggttgtactttggtttgtgttcttctcattataatatctaaaccatggaatttccatgaagtgttttaaatcgttttaaccatggaatgaagtatttggttggtgcacaaaaagaaaaaaaaaatgttttcaaattttattgacatcaacaaaaaaatttctaagactacatgcacagctatgtttctaattcttaattaagaatccaatttaagttgcacacaacctcaactttttttttttgtgataaattctatagactgatctgtttaacctcagtaaaaacgcaccaaagtgatttagagtggactt

SEQ ID NO: 34800 - DNA, 812 bp, Arabidopsis thaliana landsberg
  unsure (1)..(812): unsure at all n locations
aataacatatggacatctgctcaacaattgggaacaacaattagtatacatacaaatatttttaccgtcttgaggaggaaattcccgtctcaaactggttttacatatttgaatagaataaatgcagctgctactggttaaagcgaaaaacaaacctatactctgggtcaccaaagcaacatgtgcaagagatttctgcccttgtaactttgactccaagttagacttcttccctttaaggtccttgttgcctatgattttcaaaattgctttnnnnnnnnnnnnnnnnnnnnnntttattgccacaaacaaggaagatactccatacttatttccaagaaaaggagcatcctggtttgcgttcaccagacatacagccatctcgaaatagtgcccttcaatcgcgtagtacagagcagtatttccatctttgtccttgagaacatatgggttcattctctcactctcttcattacacagtctagctgaagaaaatgttaccaatgcgacaaaagcctcaacaatagtggtatgaccgctatgagccgccacatgtagcggtgtctgatcgcttgagttttgctccaagagaagacgcgggcattcagagacaatctccttcactagttctagatgaccccatgtagcagcaagatgaagaactgaatctcctgtatcgctcttgagacgttccattggcgttccatggcttctcaacttctccagacattctttgttcccatcactcatttcgctaaaaatctccggagtcatctggacatcttcaccagggagagtgaaaagatccgata

SEQ ID NO: 34801 - DNA, 734 bp, Arabidopsis thaliana landsberg
aatgctaaaagctacaattactatttaattaatcgtcttaatcaattcttgttacgttgactattgtgactcgagaaaatagcccgtggactttggatgaggtattttactgcagatcatgacatgttaataggacttatctaatactacagattttagaaactctaaatacaaaaggacttatctataaataaaatcgactcaacaatctcagtgtaataccatgaattcaactatcttagcaaccctttataataccatgaatttaacattgtcatcgtagttaataataaacgttttttttttcttttatacaaaaaaaaaaaaaacacaatcgtttaattaatggacaaaacgactgtgttttagtttccgtctaaaatttaacaccgcttatttgcaacgtttgatagattatgcatttaatttgttcagattttgaagataaaacgtcaatactttttaagtttaattttatacatttttattaaatttttgattatggacaaactagatttttgtaaaattaaacattacaatcataaaagtgatattttgaaaacaaaagtacattggactaaaatgatactgaaatttgaaaaggatagaatactagtcctaatttagtatagaatcgattatgaagagagaatcttcttccctattccctaattgtgttcataattagcataagataattagcataatataataaggaaataatggtggctctg

SEQ ID NO: 34802 - DNA, 1129 bp, Arabidopsis thaliana landsberg
ggcaaccctcttacctttgctactaactcttcacaactcgacaattctattttttcggagactcaattcaaggagctggatgggattcactttgatatctttgatctatcctcttcttttaccgtttttagatgtgtttttattcctcgtttgcaaaacaatttagtagattcccatgccaagaaggtcttatcatcttctgtaatgggcctagcccaatcttaaagcagaaatgaatttttttttttttttttgtctaaatgcagaaatgaaatctatgttgcaaaaaaaaaagtttccttatccccaaatcgagctgaaatcttcaagagtgtgtcttcatttatctactgttcatcattctcgtttaggacaagcaacgaatgttaaaacgggtagcctgattaattagttttgtttcactaaacgaaaactacgtcgtttcagcttagggtttatcaattaccagaatctaccaaattcacaacacgagagactctctcgatgtcgagaccctaaatccaatcttcatctcgaccacacgacgaacctttggaagagttcttcgagttctccacaagctaatttgagctgatttgatatatttcttcgagttctcgatatgctgatttgaggtcattctcgacaagtttctgggtttagactagtgtaatcgatgagatattgacattatatgaagctgagattacaattctgttttgctttgaaccgaatacatgctgcagttcacagttttgacaaaaaaatgagtgaaatgaatctaccatttgaagttggtcaaactgtagaattgaaatcttttgaattgggttttcgtggtgcttggtttcgttgcaaggtactctaaatctccattgctgcttaatcttaatttctgcatttgcaatcgaaattgatgttaaaccatcattattatcagattctgaagatatttcagaaaaggaaagcattattctttgatgttgagtatattgattatccaggagaaggtacttttaattttcaccattgttatatgcttatttgtacatctcttaacgtttttgagtgccacaggaaaacattcaacaaaagtatttcaacaactcgaaggcggaaacgagaaatg

SEQ ID NO: 34803 - DNA, 2474 bp, Arabidopsis thaliana landsberg
  unsure (1)..(2474): unsure at all n locations
ttagtcataagagttagatttatacagaaggtttagtaataaaaaaaaactgttatctaagaaatttgtcagagaatccttttttatcgcagtaaaatctctgaattttcaggctcttctaaaactgttcttcaacttttctcgaattaattcagattcagaaacaaatcttaaacataagagtttttcaaagaatattaaacaatcaaatctaatttctgtatatcatcaaaaggaagtgaaagcttctgaatgtagtagagagcaacaatgttcatcataccaccagagtaagtcctaatgcctgtttatatcaaatcttctgtaccgtttttcgcacttcttgttccgagctattggtttcttgttcacgattatgattcagtgagcactaattcctgtgaaaagaatacccaaaaagtagactctattgtcaaaacagattctagtgactcaagaagttcaaaatgtattgcgaaaatggcggattttaaacggacacataccttatcgcaaactggacacgcctcgcttttttccatccatgcaagaatgcaagcgagatgaaagtcatggccacatttagtgagcaatttcgggttatcaatctcatattctgcaaacaaacaagatgaagatatctaccaaaatgttatatttaacatgtaactttgaatgataaacaaaataccttctaagcaaattggacattcatcgatggcttctcatactgttctttagctaaaatcagtagatataacatgccatgtttcttctctggaacaacttgtgnagtcccggggatgcttactcaattgccctgattcttggcaatttcggcggactagttgaagatttatattcctgatggctaaaggaataggcggcgaaagaggtgaactgtatgcattagagagagagtttggcgcaggacgagatatgggaagatgctcatctataggtcttgagctctacacaaaacattataccgtagtatgactgaaaccataacccaagatggttgcaaacaagaaagacgtggaggctttacttcaggtatactcgggagacaacagcagcaacccattctttggtatgataaagttttgacagttctcagatcagtgtatagcagctctttaggttaccaaaagacctgtagtatccagaaaaaattcataagactcctaattgaaactctaatgggaggcaaaatctagctctgtgatcatactaagtaactggaaaaccaaactcaaacaccacaagcacttcaatgtaacatagctaactatacactaacaatgagagaataatagtcacagagattaaagcaatacaaatatgtgtatccattgtgatgacaaatataagattaaagactctcgtgtacttatgaggttcattatgaagaaagtaaatttcatgttgagtactcatggaaaatcatatgatcctaagaacatcttgagctttcaaatgaaaaaaaaaacttggtttaccataacagagatactattagttaccaaaccctaatagacgaagaactgaaaacagagtggttaaaaaaataaaaaacagtaaaacctggaaactaaaaaagtgggctgaaaaaaaaaaaaaaaaatctcagaacaaccaaacagaacaaacgaaaacagaaaagaagaacctcacaaacagagttagtgatcctacaaaacaaaaatataaagtgacttttgtaacggagaagaaaaaaatcattagttacctaaaaaacagaaacagaagcttgatatagtccttcttttgataggatttctgggaaaactttttgaggttttgtgttgaatgagaattttctgatggcgacgaagaagactagctgcgacgaaagaggcgactttatcagagagataacatcaagggatcacaattttctttactttaattgttattttggttgttaatcaaacttttttgtatttatattcattaatcacaaaccatatcgtacaaggaaactctggattttcttaagaatatttcccattagcccttttataataagattttcatgatttgaccaccaaggtaattagtattattttatgggatatacaatattaaccatataagttataactatataagcaagttttaaattaatgattgcactacttatagtatcttaaatctaaaaattatgattcatacttttggttcaaaataaaattaaaaactgattaaccagaaaaacaatttttttatatttagtaaaatattggatatgaacagatttaaaacattatctacagataaactgatataaagtataaacccttggtggggacaaataataattattctatttagtaaatgataaaattgtcttaaaaagtattttcaagcttggacctttgttgtacttacggtctcaactaaaatgtatagttttgatcaaattaaaatacaatggtgagctttcataa

SEQ ID NO: 34804 - DNA, 1237 bp, Arabidopsis thaliana landsberg
  unsure (1)..(1237): unsure at all n locations
ttcgattatcatgaatttagtctagagttataaggttaattttagttttgaatcaacgttttaggatgtaccttgggaacctgaagagtatcatgtcacgactcgaaagtgtgaacccgatgctggaccggatattgtacaaatttgtgagaggtaatgatgcttaaatctcttctccgaaggagataaatttaacttggtgtgagttccgtctctagaagatgtgtggtctttgagcttgaacttccatatattcaaaaaaaaaaaaaatgtttaaatctctctcttatgtgattgtttctgatgagtttatctttcactaatttttggtgatgatcatcatacaggttgagagatgagaagggtaatgttttagagcagactcagccgatttgttgtccatgtggaccgcaacgaagaatgccttcttcttgtggagatatttgtatgtgtttctcttttgttacgtttaaggaatgtatctaaatatggattctcatttcttctcttgactttgtgattagttgataagatgattaaagggaaagcaaataccgcgcattgccttcgttttccaggtgactggtatggatctttacttgatgtttatcatctgctcctgtgttcaaagatagaaactattgatttctctcatgtaggttccatgttttcgggattggacaacggtcactaggatttagtgtgcgagttgagttgaaaacaggaactagagtttcagtatgttttacttcaatgaataccattttgtttccagtcactcatactcagcctaacgcttcttcttnttttgatcgtaggaagtgatcattggtcttgaaaataggacagctactgcaaatgataactttctcaaagttaatctcataggagactttggtggttacacaagtattccttctttcgaggacttctatcttgtaatcccaagagaggtaactgcttatccatttgaactcttttaacttgcaccgcgctgtaagactaaatgaatcggttgaaaaaggcggctgaagcgggacaaccagggagcttaggcgcaaattactcaatgtggatgctgcttgagagagtgagatttacattggatggcttagaatgtaataaaatgggtgttggttatgaagctttcaacacccccccaactttctgctcttctccatattggagtagaatgaaaaatcaactatggaacttccgtgaggttagtatttatttg

SEQ ID NO: 34805 - DNA, 1060 bp, Arabidopsis thaliana landsberg
  unsure (1)..(1060): unsure at all n locations
caggggggtgtatgttcatatttttattgtggtcgaagtttcgaatcttaagataatatctaaaatcgacgtgggctctgtggattatctatgagtaaatctatcaaaacaacactaatcattaataaatttaccaaaaagaaaaaaaaaaccatccttaatcaactaacatacttcgagccagctaaattatttttttcgtgatattttttatttttcatcctactatattatttgggaagtacattttaaacgtaaccttaaattttataattaattacatgacaatgccattagaaaaatttaatcaaaaacaaaatcctttaatgacgttattaagattaccaaaatcatttaacgataatattcatttcttaattatagggcttattggatctaaaaacgggtcatcaaagatttcctaaactgaaacaaaatataccaaatattcaaatatctatctgttaccaaattataaacaaataagttaataagtcaataactatgtggagggacgggtttttgaatcaacatttataaaaagtaaaatataattaatccaccgtttcaatacgggttaaatctttgatttattattttttaataaacattaatatatataaatacttaataataattataaactgtaaaaatataaatattttataaaaataaaatttgcaagttttaatatatattacttttaaaaaataaatcatcccgcagtataccgcgggttaaaatctagtctctaaagtatttttgtagtcactttttggcaggtgaataaaagtgtatttggatacaaatggtaccctctttgttaagcaaatttgttcataaaaaatcatttggatccgactcttacgccagatattttcatatttaccaaaataattattttgaagatttggtttagatttaaaattatgaatatcctgtaatccttgtttgattntttaactgttttaaatcatcatataatatctaaagtaaagagaaatcccnaaaacaattatgcatatattatgattcgaaattntaaaaacgaacatatata

SEQ ID NO: 34806 - DNA, 1258 bp, Arabidopsis thaliana landsberg
aaataagaacgacattaacttttgaattcacattgaacctccaatacatttggaccggtttagcacacaatttactataaaaacaattagtagtaaatctaaactatcacatcctgataatgattttatgatcaaaataaaattttaaattatatcattatatgagtacaatatttgttatcttgattcaaaggtaagttagaatattcaagatttggtttgacaaaaatatttttaaggattttgaaacaaaagatacaatattttaagctgttttgggctacatgatttattgtaactagagatgtgaaagtgagatatctcgttcaactcggttcatctcatgtcagaaacaatgcttatatagacaaacaaagtccatttatttctgaccaacaaacaaagcattgtcacagcttgtacaaaccgatcttatttccagcaacaattaaaaacaaacggtaataaaacatttattaatttaaatctcactcgcgagcaacttcaacaagttgttcccgacgttcttaccatggaagagtccgatcaaagcaaaaggtccattctcaagtccttgggctatatcctcaacatatgttatctttccttctcttacatatggaagcacaaaatacaaagacttgagagtatttgtcaaagaattcgacagctgtaaaatcttgaactctatccgtttgtaaataatggtggctaatttatgtgcaccttctagttcctttagattatatgatattgtggtcccaattcttttgtgtatccgttcaactcatccaatttgataatatactcttctgctctgcgagcctttccttttactggaaactgtgagatcattccagatgctgcgattcgcccccatgtgtcttcatgttttcgagcactgcgtctaacatttttcctcccacgttctcaaagtatatgtctattacttctgggaaacacctgattgatccacaaacaccaaaaccaaaccaaactgaatgtttcttacaaaacgaacattttttttaatggaatgaatgttaaatttactcaaccaattttttttgcataaattatatgcgattttttaagttgaagccggataggaaggtatacaagcttcataattccatttataggtttaaaataatcatcttcggttagaagccggtccaaacaattttcatacctaaacaaaaaaaaatttaagttcactaaccaacaaaacttagataaaaaatccaaaaaaaaggaa

SEQ ID NO: 34807 - DNA, 2814 bp, Arabidopsis thaliana landsberg
ctggcgcgtgtcaccccgactacgaggcgggtcttttaacgttaatatccggtataacacaagatccttcgggcatgctcagctcttggaagaagggtacttcttgctgctcggggaaaggtatcatttgctttaacagtgaccgcgtcaccatgcttgaactagtaggatttcccaaaaaacccgaacgttccctctccggcactctctcaccgtcgctagccaaactccagcacctaagcgtgattagcttaggaggtcatgtgaacatcactggatcttttcctaagttccttctccaattaccaaagctaaggtacgttgacatccaaaataaccgtctctccggtccacttccggctaacatcggcgtgctaagcttgttggaagaaatctttcttcaaggaaataagttcaccggtcccatcccgaactcgatatcgaatctaactcgattatcttatttcatttttggcggtaatctcctaaccgggactatacccttagggattgctaatctcaagctcatgcagaatctgcaactcggcgacaaccgcctctctggcaccatcccggatattttcgaatccatgaagttgctcaaatttctcgatctctccagcaacgaattctacgggaaacttcctctatcgattgctacactggcaccgacactcctggccctccaagtgagccagaacaatctctctggggcgatcccaaactatatatcaagattcaacaagcttgaaaagttagatctctccaagaaccggttctcgggggttgtgcctcaaggtttcgtcaatctcaccaatattaacaatcttgatctctctcacaatcttctaaccggtcaatttcctgacttgaccgtcaacactatcgaatatcttgatctctcttacaaccaatttcaactagaaacgattccacaatgggtgaccttgttgccgagcgtcttcttgttgaagctagcaaaatgcgggatcaagatgagcttagatgattggaagccagcggaaccgttgtactaccattacattgatttgtcgaaaaacgagatctcagggagtctagaaaggttcttgaacgagacgaggtatctgcttgagtttcgggcagcggagaacaaacttcgattcgatatggggaacctaacgtttccgaggacactaaaaactttggatctgtcaaggaacttggtatttggtaaggtgcctgtcacggtggctggtctacaaagactaaacttaagtcaaaaccatctttgtggagaacttcctacgacaaagttcccggctagcgccttcgccggtaacgactgtctttgtggctctccactttctccttgtaaagcttagtaacaagagaactacaattttgtatttggatttacttttacacgtagttccaaattagatttgtattaataacaaaaaaattgttttaagatataaaaaggctcagttacaatgatttatattagtgaaaaactgaaaatactatttaagttttgaacacttctttaatttattttgactttcatacattggaattgttaggttaaaaagtgaggacttgttaaaaattgtagaatcactaagaaaattatttgaaactaaataaatgtaaaagaatggaatttttagcgtctcttggcttgaggaaatgtagtatgtacggcaaaacgattcaatatttttggaatgatttggtttttcttgatgactttgagatttaaccttttttttctttttcaaatctttttttttatatgcctttggggacagttgaccttgataacatgaaccaagagactttgaagcagcaatacctagttgcaaagagaagaacaggatttgatgagttagaacagagttctcatttgccggttcggaatttgttaaagattgtctcgtctcttacttcactggattcatttcctcttgaatctctaatccaatgcctttacatttcttaattaacttccccaataacaacaagagaatctcttcaagactctggtaacaaccattgacttatagggatgcctgaaaccgttcaagccaatcgtagaaatgataaattcgaccacgattataattcctctaattacggatactactaatcactgccacatgcaaatggatcggtcaaaatcatcaactttcttttattaaacaaaaaaaattatgttactagaaatagaaaatgcaaagaaatattaaaactttgactttggagctctcaagtcgtctccctccctctattaaaatagctaccaaatgcttctctcactcccacaacacaaacacacattaccaccatgaactcttgctccttcaatttattcatcttaggtgctattatctttctccggtgttttcgttccaccggagctgccacgtgtgatcctgatgacgaagcgggtcttttaggtttcaaatcgggtataaccaaagatccttcgggcattctcagctcatggaagaaaggtactgactgctgcttttggagcggtgtcttttgcgtcaacaacgaccgcgtcacacaactaagtgtggatggagacttttctcttgacggaaactctccctccggcactatctcgccgatgctggccaaacttcaacacctcgagaggattcttctcacctctcttcgaaagattactggtccttttcctcaattcattttccgattaccaaagctaaattacataaacatccaaggttgccttctctatggtacccttccagccaacatcggcgagctaagtcaattgaaaactttagttatcgacggaaacag

SEQ ID NO: 34808 - DNA, 4336 bp, Arabidopsis thaliana landsberg
  unsure (1)..(4336): unsure at all n locations
ggtatgtacatgtactaaattaaaacggtgttctattttgcgaaaaatcgctaagaatttactgatatttctaactttttcggtggttttttggcggatttataaggtttatatagtgtatcttggccaaagggaacacgatgatcctgaacttctcaccgcttctcatcatcaaatgcttgaatcacttcttcaaaggtactttactttaatcatcttccaagataaaatctctattaaacattaacctattaaactttatatatataattatctccattatgtattcaagacatctgctagaattgatatatatattacatacgtttcttgggtgccaagaaaactgccgcccatactctgttcttcacggaactgaccttctctgtttatctttgttttgttaggagcacttctcttacttggtctctaatgatatatacagcaaagacgacgcacataactcgctgatctacagctaccaatatggattctctggtttcgcggcgcttcttacatcttcacaagcaaagaaaatctcaggtactcaacaaaactcaaactcacatttaagaaagtttcatatctttgagcattgaagatttttgtacataaacacagagcatccagaagtaatccatgttatcccgaaccggattctgaaactgaaaaccacaagaatttgggatcatcttggcctctctccaattccaacttctttttcttcatcatcatctgcaaaagcgaaaggtctacttcataacaccagcatgggcagtgaagctatcatcggcgtcgttgattcaggtctctctctctctctctctctaaatctaactctctcgctctctctccttggcgcacatcatgtatgtatgtatatgcagggatatggccagagtcaaaggtcttcaacgatcaaggtcttggaccaatacctaagcgttggagaggaaaatgtagatcaggagaaaagtttaacgccacaatgcattgcaacaaaaagcttataggagctaagtactatcaaagcggtctactcgccatgaatggaggaaaatttaacagaataatcatccgtgatttcaaatccaacagagatgcaaccggtcacggcacgcatacagccacaatagccggtggctcatttgttcccaacgcaagcttttatggtctagcacgaggtagtgatatagcaaaaaccttatggattttattcactaaaaaagttaacttaagagtcaaggtaccggttttataagacattatttatttttcttaacggatgtgggattcttgtcaggtacggtccgaggtggagcccctcgggcccgaatagcctcatacaaggtatgttggaatgtagtgggattgggcggtatatgcacagttgctgatatgtggaaggcttttgatgatgctatacatgatcaagtagatgttttgtcggtttctattggggcgggaattcccgagaattccgaggtcgattcggtcgactttatcgcggcttttcatgcggtggccaaagggattacagttgtggctgcggggggtaatgatgggcctggtgctcagaatattaccaatgctgctccttggctcttgactgttgctgctactactcttgaccggtcttttcctacaaagatcacacttgggaataaccaaaccctcttcgtacgttttacacccaaaaaactcaaattagttaaacagttgaacgtttggagttatttttttaacttgttgtttttttttggtatctaattaggctgaatctctgttcactggaccggagatttcaaccagtttagcattcttggattcagatcataatgttgatgtgaaggggaaaacaattcttgaattcgatagtactcatccttcttcaattgcagggagaggtgtagtagcagtcatcttagccaaaaagcctgatgatcttcttgctcgatacaactctataccgtacattttcacagattatgagattggaactcacattttacaatacatacgtactaccaggtctctctatcttgatgccaaaacactctgttacataagtccatttacatttcttaaatatatacattattgatccgtcaaacctacagatctcccactgtgagaattagtgctgctacgaccctaaacggtcagcctgcaatgactaaggttgctgaattctcatctagagggcctaattctgtttcaccagccattctcaaggttatatccattgtgtctcttatctatgtttacttcaaagtgtggttaaacgtttttgagtaattatgtggtcaagctttattctgtagcctgatatagcagctccgggtgttagcatactcgcggcagtgagtccgcttgatcctggtgcgttcaacggatttggactttattcagggacatcgatgtcgactcctgttgtttctggaatcattgctctcctaaaatcactacaccctaactggtctcctgctgcaatgagatcagctttggtcacaacaggttcttgcttcttcttcttttcttctttttcaagaacaaaccgactaatcgatttcctttgtagcttggaggacaagtccatccggagaacccatttttgctcaaggatcaaacaagaagcttgcagatccatttgactatggaggaggacttgtaaaccctgaaaaagctgctcaacccggtcttgtctacgatatggggatcaaagattacatcaattatatgtgttccgcgggttacatcgactcttcaatctctcgtgtgcttcgtaaaaagactaaatgcacaattcccaagccatcaattcttgatatcaacttaccttcaatcacaattccaaatcttgagaaagaagtcacacttacaagaactgtaaccaannnnnnnnnnnnnnnnnnnnnctatagagccgtgatcgagtctcctctcggtataactctcaccgtgaacccgaccactctggtgtttaagtctgcagcaaagagagtactcactttctcggttaaggctaaaacgagtcataaagtcaacagtggctacttctttggaagcttaacatggactgatggtgttcatgatgttacaatccctgtctcagtgaagacaacgatttcgatgtaataaaaagagccatatatatgatgctcatggtattggttcttattatgtaatttgttgcaactctaagttcaaagtgtcaaatcaagattcaagatcatcatcataataaaatatcaaatctcaattaacttagaatctcttacacaaacatacaaatagagataacagtaatctttcctcatctattcatcacaaccatatattatccatataataaaaactactaaaaccgaatcgagacaaaaggatcctcatgatctcataatctataggctataacatagaaaatacataaccatcataatgactatatattataaagatgatgtgatctttattatatcttaacaataagcgatacacttcttcttacaatccatagtacatcctccaccgccacctccaccgccgtatcctttcccggagcggctaaaagatttgaaacacttagcaggacacctaagcttcttgccgttacaaggtcctttctctttgcaagtaaccgttggtctcaccacacctcctttcccaaaccctccgctaggaccaccaaaccctccaccgtatccaccaccaactccagtccccggaaacccgtttccaaacccgggtataaatccggatccgggtacaccaccgaatcctaaaccatcgttcccgcccttttgacgagctgattcagttgcagagacgaggatgatgataagaagagaagccaaaaggatagattttgtgaacatttttggtaatgtagatatttagtgggtttggttgaggagattaaataaaaagctggatgatatataaagatagagaagagcattaaattggaaggtatgaaaatacagttaagacaatgattcgtggactttagtgtgtaatacaatcactttaatgcccgtactactactctactttgcaaagaagactcttgtgtctttctctatagtctctattacttgcgtaactagttgagagactgttcaaatatttttatttagcagcacttggcgttggcgacatttaatttaagcatgtgttattcaaagagcgacagatagtttaaattaagatttgatagtggaggacctttgacagatgtggtccttattaaaaaattaaggatttattaccttaaggttggaataatacccccaatgggaatcctcggtacccatcggccaaaaattcaaaaatt

SEQ ID NO: 34809 - DNA, 5231 bp, Arabidopsis thaliana landsberg
  unsure (1)..(5231): unsure at all n locations
aactgttattttttttatgtattaatatagtcttgtaatcctagtcagaatttataaaacttagaaacctgcaaggctgtaactgatgcttgcatctccattctccaaagatcatttctatcgaacaaaaataaaaactatttttgtttctcttgttcaagagaaatctctccttttctaagataattgcctgaagacatttattccatagtatgaagatcgagatctagaagttgatagtattgagaattgtctattggatcaactggattgttttctcaaacaaatgaaagtcaatattgaaagacacaagtgctttttcttccaagcaggagcttgataattttgcatttggagcttgtgcagatgatttatatattaatttaagttcgtgaagatttaggtctatggttgtagatacctcacacaaagcttacatagtagttacataggaataataccgaacatcgtcgcttcatttgagatgttgggttgatagacccaacaataaaatcatcctaaaagaagtaagctacgtacttattatttataaaggcttgtcctcctcccttccttaaagccaaagccaactctttaagtctcgctctcactgcttgtggcgaaagctcaagttgaggatgacctctcagaaaatcatcgcttccatttccatattcctcagattcaatcttcttaaagcacatatacaatagcaaaacggaatctagaattttatattataaaaatgttgccacgatttttaccaatatcttattcaatgtcgaccaaattaactattgaaaccctaatatcactgcttttatggaagtttgtttttcttgttcaatcatcgtggtctagaagttgatagcattgacagttgctatatgatgaaactgtatagtttttgcaagaaaatgagagtcaatattgaatacatgaggaatatgaatacttctcaacttgcaaagttgtatttttacttcgcaaattaacaatcttttatgaaattttaaacaagttttttgaaaacatcaacatagatggaacatctgactaggaatttcacagaaatatgtaaaatcgatttctaagttcttgttgttagttttagatgttatatagtaatgttcaggagataacgtcatcaagcggggatagctcagttgggagagcgtcagactgaagatctgaaggtcgcgtgttcgatccacgctcaccgcatttttctaaaaccttttaatcgatttaaacgacatcgtgttaaaaaattaggtcgtaagaaaggcccattatgaaaagatccacgacataatccaccaaaccgcattcttttgtactttaaattaattttaaacgacatctgttaaagaatgaggcaaaacgacgacgtgttagagaaaaggcacactagaaaagatccacgacatgatatcccaccaattctcgccggtgttaaccgttttgtaattccgatcatcgggtaattctcgaagagagaagaaagatgttagattctctaagaccgaagactcttatcggttaaattttactcgggattacgatgcagttcgttggtcgtgtctcaacaacagtaacgattcatgtccccatctcaactatggagcaatctacgaatcatcagtctaattgtgagtgtcttcagattcgaattcgatgattaactctattgaaatgcattcgaatgattagtctgattgatcatacttattgtacatgtcacaaaacatagtaatctatatgaatttgcatatcaaaaatcttgagttcatgccaaaccaacaagcttctcgctaacctcccacagtttctttgccttctccgcatcacttgcttctttagaaagctgattctcaaacgaagacgagttattgttccaactccaatacactcctgacttcccaagactagggtcactcacaacctaaaacaaaaccacatcctcagtatcaatcaataatctgttatacatatattagaaaggatttgcaatgcaaactgacctgtgctagtcttttgccagcttcctcttcagatacgtaacctttggtgatatacttttgaaaaggcggaaaaagaagccgaaacagcggtatgtgttctctgaacaaccctgttgtagcgatgcaaccagggtaaagagaagcaaacgtgactcctgtttcctcgtggtaacgtctgtgaagctcctgcattgtcagcatattgcatactttgctgtctttgtaagcctttgctccatcaaactctcctccatctatcattgaactgttttgcccattcaatcctgacgctaagcctcttaggtctccaaggtttgcctttggcggtacattcccagccaaagtatttgtgtttcctgcaagaacatagaaaagaacattcattgtttgatactaggaactatcttggtggaaatggacaagttgtctgtgttatttacctgttatagatcctacgatgatcatacgttttgatggataatcagattttttcaggtcatcaagaagcaatcttgagagaagaaagtgaccgagatggttggttccaacgcttatctcaaagccttcagctgtaaaagaaggctctttagcagttggttggtaaaccgcggcattgcagacaagaacatcgagtggttgttctgttctccggaaattttcaacgaattgcttcacgctttcaagcgaagcaagatcaagatgcatcactgtgtaatcttccttggacattccaacagatctcgctgccttctcggccttgagaaagttcctgcaagccatgatcacatgccatttccctgtgtctgctaaagctttggccgtagctaaacctaaaccagacgaagctccagtgatcactgcagtgccttttctctcagtcttcttttgctccggcgatgcttcgtttgccggcggcgtggctgtaactgtctgtgcacgaataccggtggaaaatcgcggtttctgtcttctctgttcctgcaacgaaacagagtataaacctcaggacgttttcgatatctttttttgagaatttcacatcgtatagggtgattgactttaccttgatggtcaacagggtggatatcttttcagctctaagatggtttgaaaatgaagaaccagtaaaagtcgtctcctttagagaagcattgaatttgccctgcaaaatcaccattgcattgaggtaaattcttcattttatcgaaaacaaatcataacaagatggaaatcattactaatggtgaaaacatacctctttttggattgaaatggtagaaggaagaagagaataggcagcttggagagccattgttgtacggaactgaaggtgctagagtgtcacagtgtcttcgattttccccgaattgaggagcgacagaagataaggtagttttgggttagtgacacgtgtcttccaggctacagctttttccctcaaccaatcagatcactagtttcagattcttcatctctcgtttattgggccttgagatgggctttaatattgttttgttaactctcaactgatctgatcaccgttgataggtgaactgtaatgaatctggaccgtccaaatgtgtcaagaacaatttggtggaagagagaagaaggcggcaacttaacggtcaatggagaggtgggagaaagaaaacaaaaccgaaaaaagagagagaaaaaaaaacacttttggatcacacagctctcttcatcttctacaatttctaaaagttgcaaaattccaatgaaaatttccatttttgcctctattttattttattttcttcttctacttcatctcttttcttttcctcctccgtcgtcacggtttctagaccatctcctcctcctcctccattgtcttgttcatatgcctataacaggtaactttttcccccctcatctttttaatcaatcataacgatttttgcttgtgaaatttgatttgatcatcattgtttgctaattatattttcaagggtaatttcattgtaaagttttaaactttacataaaagttatgaaaagaaaacatcctttaattgcgctattatgttagctacaacttttagagaaacctttttgagcccaattataccaaaatttgactaagtgaaaatggaaatgatgatggaacttttgaatatttagaaatcgaattagaactttagctcatttatatttagtcattttgattctatcatcttcttgtcattctctaaattaactcaaaggagtaaataaaaatacaaatacaaaatttatacagaacaacccacaattctgtctagtttagttaaacgtgttaaaatagtcacgcaatgctttttctatttttaaaaattaataagctctgacctgtacgcaaccaaataaaacactaaaacttatctgtgatcaacttagctctgtataaaaatcttcctcctctttctttctgtccaattctctacagagaagtcttagcttttgcaaaatcattaactaatctctgttttgatgactagataacttggatgtaggattattatacctaaattctttctttccatgcatttatgtcggttttgacatctttgttctcttagtttaaaagatatcaatattagttatcttctattctttgaacatttgtgtccatctcatgaagttcaggaagcgtaggcaatactttcctgcttgttcgtctcatcgccaagtaatgatctcttcgtcatcttcttcttctccaaactcatatcaaatttgaatcttatcatcaaattgagagtaatcaacgacaccactgcaatcttgcatatacattgttcttgtgtattccacccgtttctttaatcttcaatgtaccgtaattgagtgtcgttttggttgtaacttgtaagtgaattaagctcactcaaactttctgatcttcagagttgatctttttttttttttatgttctgcagctaatgttatacgcaaacatatgtctgaaaacgtttgcaggtagaggaggatgaagcgcgggaaaggcgagaaaaaggccacaaagagccgcgatggcagcggtcaagtagtttcgctcacgtaatagctcatttggctaaatattngttttaatgagtatatattgctagatatatcatagggtataaatgacacaccatagacatatgcatgtgattcgnttattagatacataatttagatctattatctcatatat

SEQ ID NO: 34810 - DNA, 2563 bp, Arabidopsis thaliana landsberg
cgaattttgattcctactatctctgcagcattggtcgtttttgaaagacttgtcctcttacgttttctaaaaggataaaagagcatgtcttcgttctcagttaggttcttcaagtagatttaaagtcatcatatttgattcaatttagaactaaacaaggtttttctgtgataaaattccaaagttaacttctttgtaattttcgttgaatttgcctcagttctgctacaaaacctctattgggtccattttgttttcgggttttgaagactcttgagtttctgaaattctggtaatcttgtaaaccttgaaatgattttggtcaatttcttcactatgtcatgtgtttatgtgtacaaatgagcaagactttaatgttggtttgatcagtaaatgaattgctgatgatgattgtttagtattcaaaaagtctagaacaagcaagagttatcttcattatgatactaaaagtattattattactagtccgaagaaaggttctctttttttgaatgcccattttgtgcaacttcttaaagattattatagatcaactatttagttcaaagaagtctaaaaaaaatcacgatgaaaattgaagatgaagaaagattttcactttctcaacagaatagtatagcaaatcgtttttcatcaatttcaattcttttgagtgaaagatcaatatagtaatcataaagattctgtttttacaatgcccatttctctatgacatcaaatgagactgagagaaatatcaaaggtttgacattagaacagtaacactcatcactcagaaacacaagaagaaaacgtagctgaaagaaccgcgagagggacagagctaaaagatgaagatagagaggaagatcgattatgttctaagcttcataactagttcatttctccttgtaaagaagcagaaaacaaacaatggagctgagagatgagggagattcagggtttggtcgaaagaacaatggagtattggtttggttgatttagggatgccacgtgtacttcatctgtttctctcgtctgttggtttcacctttccagtcttcttttttagttattataatacaattatcaaaaaaactactagcttcttatgagtctgagaatgtggtttagccttatgagtcaggttaactggaggaagtcaagatacctgctgacctgggaccaataagcagaacgaagaagtgccaagtctagctctaatgatgcactacccggagctaattgagcagatgttgactacaacaccaagttggccatgacctgttgttgtaaatcagagctatttcaaccagcaaacaccacttaggcttccccataaatatgtggttaaagcttattcaacgacaattgatgcaacttcagtcttagggggttaatgctggactatctgaaggcaaaatcaattctctgttttcattgataaagcttaactttacaagagagggttttgcttgtttatatacaagagctgaaacatagataaaccctaatgagactagacaggtgtcaaacatcaagctgagcactctgaatcaagggttagaaaacgattctccagcttgatgtccgtacgagcattaggtgagattgtctggggattgtcagctccatctttgtcgtttcttgatgttgaagcagatgaccgttgcctccaaatctgtgtcgtgggctgcttgggcttgagttgggctttaagctgcttctttgctgtgttggctgaaacgaccgtgttttggcgtttgccagagaaacactctgttctactcagaggctttacttgaatggtgttgatagctggagaatatcaacaccattcaacgcagcaaaaatcttcatcttttcagttacaggatttcctacagaagctagttggtcacaaatggtggtgatactatcttctgaccaatgtccaagagtagcagagcagttgagatgattttcgactttggtttttactctcacaaaacataattttgatatatgtaaatggatatgctgatgactgtttattcaagatctatttcaagtttggaagaacgaaaagttatattctaaacagttattgattagcaaacttttcttcacagttcattatttctcttgatcgttgtccactttcgtgtaatacacattcgtcatgcgcgcgtgagatatggtcgattcaacaacggtcacgcgcctttttgcgtgtcagagagtttcagcttcaacgtttttcgttaaagagactattcaacgttaagctaatcccatcattaaagataaaaaccatatgataaaataatttaatcagattgattttgccaacaatttaagttaaaaccctgaattttaaaaactaatcaccttttggattctcaacgcttctgtttctcatttcttctctcttcagagtccactccgaatctaatccatttatgttttgttcttcgaagaaattgacatctttctctctttgtgtactccctcattaactttgtttttgtccaaggacaactctgccctaatttcacgctcctgccgtaatttcattcagcag

SEQ ID NO: 34811 - DNA, 3399 bp, Arabidopsis thaliana landsberg
  unsure (1)..(3399): unsure at all n locations
cagttgtgcatccgacttctgtagaagcatctggctcagtggagcatcggacttctgagaaagcatctggcctctgacgaggcatcaggctctagatggagcagtctaactcgacagaacatctggcttctgaagaagcatctggcctctgacgaggcattaggctccaaatggagcagtctggctcgacagagcatctggcttctgaagaagcatttggcctctaacgaggcatcaggctctaggtggagtagtctggctcgagagagnnnnnnnnnnnnnnnnnnnnnnnnnnnnnnnnnnnnnnnnnnnnnnnnnnnnnnnnnnnnnnngtatgagcatctggttccctgatgggacatctgaggcaaaggagaattctggtacgtctgtcttctacatttggttggtacttctggtattgtgttaatccatcaggtacaacagtttggtagctgaatctggtacatctgtctgatgaggaagtctggtacaactgactggtacatctgtctgatgaggaagtctggtacaacactgtgagcagtgtgtcaagtacatctgtttggaggattcaagtcaagatagagatttgttagatatgacttgaattggattgggcccttaactttagggccaatcagtttagggttaattagggtttcttttgtataagtacttttcttaacctaatctccatgtattttgtactctgttttctcaatcaataaatctgtatctttgcccgtggacgtagccaacagcaagtgttggtgaaccacgttaaatctgtgtcgtgttctttatgtttttgttatcttgctcacatctgttataacattactaaagcttaatcattttttttttgagagatcccctattacttaagcctattctgaaagggaccttttttgtctcttgaccttttaccttagccaaatgagttctttgatgatgcattgcttgattcacattccagaactaatgaatgttaaaaggattggtagatttgaaaacttgtgtaggtcgagcatatgagtcggattgattgattgatgaggcatggctaacgtttttaagtagaatttgatcttgcagcttagaactttcaacttggacattgatttcatctggtctatctggtgttttggctctgagtccccgcttccaaacctcacctccagcttgttcttgattgtttgcttgagggcaagcaaagactaagtttgggggagttgataagtgtgtattttgcatgttttgagcatccatttgtcatcaatttagcatcatatcatcactgttttataccatttcacatcatttgtcatcactttgcatgtttaggatagttttgcatgcatgttgcatatttgcgttgatttcaggtgatttggagctgttgacgagctatctggaagaagcggacctgatcatgacaaaccactcgaccaagaggccgagtaggagcttcaagatctcaagagaccactcgaccaacatggccgagtatcaccatcatcattcactcgaccaatcactctaccacatggtcgagtaccttcatcaccttcactcgatcactctaccaccaagccgagtctcacaatcatcattcactcgaccaatcactccaccaacatggccgagtatcaccattatcagtcactcgaccacttcactcaacctggaagtcgagtatcttctaacaccactcgatcacatcactcgacctccaggtcgagtgccttcaccttcactcccagaccactactcgatcataccactctaccaagaggttgagtatcaccatcaccatcactcgactacatactcgattgctagcttcagagtcttctccattccgcactcaaccaggcactggagcacaaggaagaaaagaagactccagctaatcactcgaccactcactcgaccacatgggtcgagtactgttcttaatccatcccaatactacgtcgttttgagtattagggtttcgggatatttggctataagtagcatgtacttctcattttcgaagacaagaagttttttacctagttttatttccgcagaccttgtgttctagactttttgtaatccggatttctctttatctattcagtattcagcttttgttcttgatttcgtttactgttgttcattctgttatcatcttgctattactctgttgttatcatgttttcaacttgttcaacgtatatgttctctacaatgatgtctgagtagtgaataggtttctgaggatgggttagagtagtttagtgttctcagtatgctaggttgttgagtttgactgatagatcccttctcgattagttgttcttaatgcctattgctttttgatcaattggaatttgagcctagacatttttgtacccaaaaggtgttcgacgaaatttttgaaccactaattccagatatttgtggctttgtaccaaggtattggttacatggagcgttttggctttaacttgttaattcgtaatgcctgttaggttagttatcgtcaatggtgattgagtctgtgactagtttaacttgagggtctccattgcggtggcacttagatttggttatcgatcttgttgtctagaggtagtttattgagcatgtcaatcacctttagattgaggaaactaactactcgattaccccatcctcgggaatttttcatccaattgatttctttgcttacactactattgttcacttgttcttattactcgttgcttagtttttgcatttcatacctgttatcattaatatactcgaccacacccagttgtctagtaacagactgtgcagtcgagtatctctgttacattttctgtctgttactcgaccacacccagtgcttggcaacaagctgtgttggtcaagtgttttaattgtctgcttgaatttctgtttcctgcatgttcacttaggactgctagaacaccccaaaacctgttattgcttggcttgactctgtgaactctgattgcatcttgattgttagcatcacactcatttggattgacaacctaaaatgctacaagggcatgattggtgttataggataattgaccccaaacctattatcagtataaaaccaaacccgctagactcttgaatcgttttaaagaagaaccccttagaacttgaaccaaaaagagaaagaatgagacaaagggtagagttaggacatctatgggactgggatcatcttctgagctatcatactatatatcattgggtagatgggagtctgttcttgtatttgtccattggcttttacctttagcattatgctgaagctcaatcttttctctgagcgttccctgctgctcgaacaaataattagagggaccatttttgtctcatagggta

SEQ ID NO: 34812 - DNA, 8226 bp, Arabidopsis thaliana landsberg
taaatactaacaaaactattaaataataaaagaaatcttttacataaataatattatagtagatttttcttttagtgtgagttatggtgttatggttggagaggacacaagttttagcgctaaaaatggtgtaatttgaacaccaaaatggtgtttagccttggggatgccctaacacacattattacatgataaataaataagaaaatcaacttataaccctcactttctttctctaaaaacacatctaagaaccctaatatccagcagacaaacaaagatattttgggcaaaaacataggaggcctatttataggcaataatatgatgccctagttaggaaaaagacaaaataggaaagtcggcgcacaaccactaaggtcttggccgagtagaaacgtcgagtggcttcctcttggtcacatcactcgggtcttagccgagtggcttctcttcttccttaagtgaaccactcggcctccagccgagtgccttggtcgagtaaactccttgtccttcacgtgtgctccactcggcctccagccgagtaagaaagccgagtatacttcaagtccttcctttgacccacgaactcgagtttgtccatcccttgtgctagaaacctccaagttgagtccaaaagtacctgattcacctgtaaaacactccaaatgcaagtatgctatgcaatgcaatgcaaaatgtgcaaaggaaggaaaaaagattaagaatgcatgaaaagagacatgaaactaagctaaatgcatgaaaaacaagggcttaaaaaatgttaaaatctagtgttatcagttattataacgagatggctgacttagttaaaatagattgtacaacgaagtccaattcaaaaacagacattacaaggaagtccaattgaaaaaacaaatttagctaagctcacatatacttgttcaagctctcatacttcttctctagcgtttcaaatttcttttccataagaaagttcttttccacctaaggctcgacgtgcttattggctgcttccagatcctgcttcatctcattcttctcctcttttatcatgtcaagctcgtcacacagtgcaacagtccaccatctcttgaaaccgcatccttgaccgggacccttataaaaaaaacaggaggttgattcataggaatacaaaatgaaagaaataaaataaagaacattaactcaagaaaagatgcttacatctgatatttcgtacggacaattgaaaaaaagtttttcggttgtaacaggatcaagagaagtggcaccgacaaccttagcattgcaatcacactcgatcggaacgcccttatcgcgcctcctgttttcgccgtacctcgttcgcatccttatttccatacggttgagctcctacattaacacaaccatgatgtactcgacgttagatgggcaacgatttgtactattcagatgtggagataaatacctcatcaacactagattcgccttgaaaaagagacctctgagccatcatcttcactgcaattagtatggtactaaagcactggttctatatagtcctgtctgccacaaaatgtattaatcaaacgacggcgtatttgtattggctgaataaatttagaagtggctgacttgtcatagcattgcggctgggttttcactgatttgtggctgagttatgtcgtcatacagtatgtcactacttagcgtgttgctttaggttgggtttatcgagattatttattatatcattatcgagataacaaacagcaactttatggggaaccgccagtaatgatttggtccacatgcacaggtacacacgcccgtagttaatattcaaaataattcaaacgagttcgaaattattccttaactaaaccctctaataatcaaataacgtaacggctgagttattcaataagatttcgtgttttggccgagttatgagataccatatgttattatgatatatcaaaccgaccaccaaattgttagttatattattagcttgaagatgtaagtatataattgatttgtgggttttattggtttcgttgttaattgcggatgtgattgaatatacaggaccatttgtttaaatgggtcgaagatggtacatacgaagtggttgtagacagttggccgaaattggccggcttcgacagtgagttaagcgcggccaagtccgaggtttctgtcgagctagaagcattacaggcggtggtgaaagaactgaaagaagaagtgatgaggagcgaaagggaaaaccagaaatggaaattgatgatcaaactttgctgcttttgtcttgcctttattatcattgtcattgtttttggtatcttaatgttcccaaaaatcaacgaacagaggctttttctgggctactagtttgttttatgtttgtatgatttgtttgctactggaatccattatgtgtttgatgtttaactcagcgtatagggttaattggtttttttggttcaagtagtagcttgcaatgaaatggaactttgtcttcggacaagctaatccaatatcgttgactgagttatactggtaatgttgtggctgagttaatcatacgctatggctgagttaatatctgttgtgtcttctgaaatataggttacggctgagttattataatgttgtggctgagttaatcatacgctatggctgagttaatatctgttgtgtcttctgaaatataggttacggctgagttattataatgttttggatgagttaattatacgctatgactgagttaatcatacgctatgtctgagttatgatagaatttaacaagtaacctcaagcgataaacactgactttactgagaaggcgatcgtagataatattagatataaagccatcataacaaaaaaaaaacagagaaacatattgagttcataggaatgagataaagggacgataagtaagagacacaaaagcattcaagacatgaaaccgacatcatccgggccaaattcagtaaacatgtccaccaaatcattccaaactgttgtcgtcatccacctcggcttatccaaaccacgcgcccatccctgtttcagcgcccgcatattgtcccggtacaacgttctagccaccaaattaaactgcgtccacaccgtcagcgtgtgccttgaatcccaggtgtgcatacgctacaaagagagcaaatagtaagaatttggtctacggtttacaggaagtgctttatataaaaactcgatgcttatcgtaaggaggaaaaaccaccttgccttgaaaacaacgggaatcatccggtacgtcggccacgcatggtgaaagttgcactggagtatatcaccaatcgcgacaactagttggtgattgaatttgaaccacgtaacagtggttttgtcgacccatgtacccaatccagggtttagaactgggagatctgcacgatcaggagcggtgagcacggcttcaacatctcttagaaactgtccgtcgatatgaggcaccatgtcgttaagatgtgaggatgagacgtctaaatgatgagttcaagttactgatttatagaaaagaaaagacaggttaaggaatgcgagaggttcgtgtctgttcgtttggcgggaaaaatttccgtactacggctgagtttggcggcaaaatatattgttacggctgagttatacccaagatatgtaactattatacggctgagttgtcaagaattattaaaaaggacaggttaaggaatgcgagaggttccgtgttttggcgggaaaaatttccgtacgacggctgagtttggcggcaaaatatattgttacggctgagttatacccaagacatgtaactattatacggctgagttgtcaagaattattaaaaaggacaggtaaaggaatgtgaaaggtttccgtgtttggcgggaaaatattccgtgctacggctgtgtttggcagcaaaatatattcgttacggctgagttacacgcaagacatgtaactattatacggctaagttgtcaagaattattaaaaaggacaagtaaaggaatgcgaaaggttccgtgtttggcgggaaaatattccgtgctacggctgtgtttggcggcaaaatatattcgttacggctgagttacactcaagacatgtaacaatgttacggcagagttgtcaagaattattaaaaaagacaagtcaaggaatatgaaaggttgcgtgttacggctgagtttggcgataaatcgtccttgttatggctgatttaaacaacattacggctgagttgtcaataaaaacatgaagttcaattcgatttactgactaaccgaggtacggttatctccggcccaattaccagcgttttaatacgcctataaaatcggcttctcccataaacaccagaaggctaaactctcacacacagaagctaacgagttcaaaatatttctttaattttcaacgactcggaatttcaccatgggttacgacggcctccgcgacttgaatccttgcataacttgctggacgattctgtgttatggttcttaggaagtacatctcgtttttcacagataactcattcgaactacgggtcgtctttgtcgatgagtgggtaatgggatcttcactcgtgatacaaggcatacttaaccttgtgcttgtcttattccctatataactcaccctccaatgttgttttcatagggtatccaaattgaagttataatcggaagtcggttttttcaacgttactacgacatgcttgaagagaatcagtggaaagaaatcagaacctttggtgtcatcgaaaaatgtggttttgtccgatcaacaacccacaaatacatgattgagttcatgaaatgcaaatgaggtaactcattccgacccaagggaaactgtattatttaacagattcacaccttttgactacattattgaagacaccgctcatactgaaaatttggtcggtaagtaatacgtatctaatgcaaatttcatactttcacaaatcacatgcctgtttttaatctttatttcatactcccagatttggttggtgcactcatcgaggtcggatgtctgagaaatattacagaagatggttgggagatggacggattcagacttaccttcgagattatggcaaatagtataatttcttttgtttctttacttctaaatttctttcttttcatcatgtatttttcttgagttagcttaagtgtacgactgttttatatgtttcagtaaggagaggttgaaatgtgaggctcttggcgaattggcggttgacttgcataggaaatttcgatcttttcgcaatgacagtattgttattgacaatatatttgttgcactcacatggtggaagatcttcaggtatcatactggccccaaacacgtgaagatccaaaattatgccgggatatcagatgtgactgtcgaccccaatatcgaagaagtgcaagagttaaaaatggtcctcgagtaatgcaagatggaaggaatcgggttattaccattgtttacttttcattcctcctatatatccttcaaacaactatttctgggaacttcattttttctttgccttcaaaattcagtttgataactcagccttattataattaaataactcagatactaaataacattatacgaatataactcagtcgtaagttaacatagtttatctataactcagccgtaacaggtaaaatgaactcaactcggccgtaacatgtaaaatgaccgaacctttccacttccctaattatataactcggccataacatgtaaaatgaccgaacctttcgacttccctaattatataactcggccataacatgtaaaatgaccgaacctttcgacctccctatttaaataactcagacgtaacatgtaaaacggccagaatattttggcaaataactcagtcgggatgttaaataaatagcaatattacggtacttagagtctacaatgtcatgaaatacataccacggttgccaaacaagggaaagaagacacataaagagtacaaacagtactatgcacggcaagttttaacattgtgcgctgtttcttcacatcaagaacatgcgtgttccttcctagggcgtttagtctcaacggcgacttctagtgctgatttcatccttagtttattgggcctgcctggctggttcgcaacaatcggaggcaaacacggttggtcaattacaatttgaggaacagggacttctgtatctgaaggcatgattgcaccagcgtacgcattgaccaaatgactgctcttataataaggactgcacagggatatacgagacacacccatatgctctgcagctgcgattgcatggatgcatggtaatttctctttgtcgaaaagacggcatgtgcatttcttttcatccacatttacaacatgcaaagatgctccataagctacttgaacgcgggaagcatcaatcgtttgtacatccagaagtcttgacgaggtgacgcgggtctattagagagaggagacaagaaacaaaacaaatacgttatggctgagttattccctttatggctgagttattctcgttatgactgggttatcgttattcgacgactgagttatgcactagttacagctgagttacctgtaagagtttctcaacatcacgtgtgagctgagtatgctgtttgctcgcatcatctctctgttcagcaaaccatctagtcatcatctgtcttatcgcttctaacagtcgaactatgggaagatttttggcttgtgacagtgctctgttcattgattccgctatattcgtagtcattaaattgtatctatcaccggggaaatgagcacgcgcccacatttcaacacccgctctttgaaggtatgcatgtagtagaggatcaagctcttcaatctcgttgaacgcgttagtaaaatcattcagcctataacaccttgccgcttttttcaccagagggaacaaatcttttcttttgaattttaccaaaatgttcttatagagatggtaagtacaaatcccacgagcagccaacggatacacttcaccaattgctttccctattgacttatgtctgtctgagattatcgccaggtccgttgcatcaggaataacaactttgagttgcgtaaaaaaccaacgccaagaatcatcattttcagtgtcaactacaccgaaagctaacggaaaaatctgaaaattaccatcctgagcaagggctgtcaagaacgtccctttgttactaccatggagaaaggtatcgtcgacaacaacaactctgcgcatgtaatgaaacccagcgaatactggcaccaaatgcaatgaacatatagttgaatcttccactctcatcaatttgaagacgcgcgagtgtacccggatttgcccgtcttatcatgtataggtaagaagacagttcttcaaaactactatcatgggtccccagagtgagctcccttgcaaacctcagcgtcttgtatgactttgaataactcatctgttaacacagacatattaatcgataagtcaactataatatatttacagcacagtcaaactataccacaactcagccacaaagtgatcttaagtcagcctttaaagggtcataactcaaccgaaatgtaattatatgtcagccatactatatcaataagtcaaccgtaaaatatctatagtcagccaacaaataaaaaataagtcagccaaaacattgtaattacctttactcgaaaatgcttattgatgattattccgactgtttttggtttaacatccggaccaacgtcaccaagatagtccctgtaaagaactcccagaacatcaggtgttgcttgttggtatcgattagaacgttccgtcagagaacatgtgtgttccgaatcgtatatacgaacataaaaataaggatcatccccttgtctagatacacgaactctccaacaacatccgtcaacccaacactcgtaatatactgtagtcgtattagacgttggtacatcaaaatcaaatccatcccttatcgccagaagtttgagtcgatactccaactcgaatttgctacggtattgttggcctaccgcgagtgttagcgtagacagctccaaccttaaattagtcgagctcccagcagatccgatcatttcaatggtctaagttctcttcttagaaggaagtttcggtgaatctttgtctttattctaag

SEQ ID NO: 34813 - DNA, 3773 bp, Arabidopsis thaliana landsberg
  unsure (1)..(3773): unsure at all n locations
taaatccggagaaaacagcaggcatggttttaaggtaggaggaaaagcaattgcttgcttgcaaaagcacattaaaactatgcccttactatttatatctccaacaagaaggaaataggaatggaaattatggactatcttcatagtttcaacagtttttgatgctgcggcaagtgcctgcgaagcataggcagttgtgtcacaatgattactacttatttccattgcctgatatatatagcacataacaagctacatatgcaaatggatgatcagcagggttgataaaatacatgagtaaatttcatacctgtccaactaactgcccaccataaacctttccataggtgggagcattgggtggagtgaacccccggaatacattcaacttcaagaaagaagtacaaaaaatatgagattcctcgaatttactggcggagaaagtagtataaaaggtaagaaacgaacacaaaatttgtagaaatgtggaagaaagaatgctataattctgattccaaggaatggtggtaaaagtgaatgattagaactctaatcataagaactgaaatggaactaaatgaagggcagttaggggagactcgtacatctaatggttctagatatagtatgtcttccacaagacagcgttccttctctgaatccgagactgactttatttcaagtaaagcacgatgatcagacatcaacagcaagcaggtaagctgcaagaacagaaataaaaacactactcagtatgcaattaccattagcatagcatgagctcaaggaaaccaaggccacctaaggaaagaagagagaatttttagcaaacacctctgacaatgcaacaacatctgctgagtaaacatccccaaaaatacctgtttgagaactaattgaagccaattcaataaccataaacaaaaattaacacactgaaacagaagaaaggccagtattgaaagattcttcctctcaccatggccgaagaaatcatatcgtttcaaaggtaactcttgacagttttcatctttagctgatctcagaacctgagcctgcaaacacaagtcaaaaatagttacaaatcaacacggcgcagtagccttagtctatctataagactatataacacagaagtaacctgagaagacaaacctgtccttgcaagagaaaataaactccatccacattttgattttcacgaaccacataatcacctctgtctgtgaagcacattgccaaagaagatcacattgtgtaaaaacataaatatctgtctctaaaatcactgctcaagtgcttatactcaagaacacgcactgacactgaatacagatcaacaaaacataacgaaattcccaatcaaactgacttcaagataagaacaaaagcaaaatcccagaatcactgaccataacgtttgaagagaacaacttcagctattctcttcaaagaagaactaggtaatcgctgcaacaaggtcacattcccaaggaactccacaactacaaaaccaaagtaaccaatcatatgaaaaatcatccgaatcttggaaaaactctcagttcaacatctctttcatttctccggcgatagaacaaagaaaaaagatatcggaattacctgattcagtgttcatgacggtgtagagactgtcgaaacgttggccggcaaattcaatcattcaactaaaaatctgctgaccaaacaaataaaaaatgcaacgaggtaattatccagtacccttgggtatacgatagagtctgtggacaccgctcagatgcagtgctgacaaatttaatgggcctatagctaaaagcccaaatttgttggtcctaaatcctaatacgctgtcctatagaaaacaaaagtttcttctacactcagcacagatccgacccgacccgacccgacccgacagcttccgaagacgaaatttctacattgcacgtctttctccgctagtctcgaggatgctaatggaatctttcgagcatctatggtgactggtgagtagattcttcttgcccacaagtttctttcattgtttcgtctttacgaactatggttgacttgaacatttcgtagataacaaattcaacttgtcttctctctctgtaattcgtgtcttcttcagcgccaaaagaaatcacttgattgttaaaaattcttctttttttattttagagtagttggtggtggtttcggacacaaatcttggaacacaagcttgatccgaccagcttatgattattctgtctttattcttagagcctcttgatccacactgactaatctcgtgtcagtgggttcttgtggagtactccgatcccatctccagaaaattcaacagaggatgcttgcttgcttcataggttctcatgtcgatactgtgttgtgttcctgtacttgaatgtgtgtactgcttgggttgtacccattggttgtggaagaaatgtttatactcagcaggtcacgagagtgagaattggggattagctacatctgatgagtttgagcctatccctaggatctgccgcttgatcttagccgtctatgaggagaatcttcatgaccctatgtgggcacctcctgatggttatgggattgatccaaatcatgttattctgaagaaagactatgaccagactgagggtcgtgtgacgccttacatgatctacttggatcatgagaatggtgatgtggtcttggctattagagggctgaatttagctaaggagtgtgattatgctgttcttcttgataacaaacttgggcagactaagtttgatggaggttatgtacataacgggttgttaaaggcggccatgtgggtttttgaagaggagcatgtggttctaagggaattactcgaggcaaacccgagctattccttgacgtttgttggacattcgttaggagcaggggttgtttctttgcttgtcttattcgtgattcagaaccgggttaggttggggaacattgagagaaagaggattagatgctttgctattgctcctccaagatgtatgtctctccatctagcagtgacatatgcagatgtcatcaactctgttgttctacaggtatgatgattgtatatatcagcctctattgactcgtttaggtgactcttctgatccattttacgtgctgctctggataaaccaggatgatttcttacctcggactaccacagctctggagaatgtcttcaagtcaattatctggtaatgaaacagtatgaaattcaaaagcagttattatgttataagcctaagtttagacgatgaaaaatatctcatgctcttgtataaatcttaaaccttcagcttgccatgcttgttgtgtctcacatgtttgaaagatacattcacattcgaggagaggaagctcaaagatgcaaggcgtctatatgctcctggtaggttataccatatcgtcgtgcgcaagcccttgaggtatttatactttatgtttactcatgtgcttcaaannnnnnnnnnnnnnnnnnnnnnnnnnnnnntcaaagtgaaaaccatgcccttggtatacagattaggaagatatccgcctgttgtgagaacagctgtcccagttgatgggagatttgagcagattgttctctcctgtaatgcnnnnnnnnnnnnnnnnnnnnnnnnnnnnnnnnnggaatcacagagagctctcgataaaagtaccttaaaatgtgttttgctttttgtgactgcttcagcttttggagatggtgagttctgacaaacagactttct

SEQ ID NO: 34814 - DNA, 5860 bp, Arabidopsis thaliana landsberg
ctcttcacacagcaaaacgcaaacctaaattttggctcttcgtggccgagtgtttttcatcctgtaaatttcatacagattgatttgtctacaaaagaaaactacccctaatcaagtatatatagcaaatctgccgccaattagaataactgcgtatatcattaactaataatacataagtaaaatattagaaaatatgggaacaaaatcatattttactatagatattccgaaacaaaaatttacatttttcccgcattaatatcttgtaacaaatttctaaaacaattgcaaggaaaaaagacaatttcctacatatgtaaaaacatattttcctataaatagaataccaatatcatattcatccacaatactacaaatttttcacaaacatatattacataaaatcgttttcacctttacaaaaatacataaaaatagtattactaatgctttaagcgaattatttagcaatattatttatcttataaagaataagttataatatcaaaagaatcatcattttatatactaaacatattaataaaatatgaatgttctgttctatatttgccaatatattattgatcatataatggatatcacatatatctatataaaccctaaagtcattatagattttggccactagaataacttctatatttaatccaatgttaaatttatttaataattatttttttctgcacaaggtgcgggttacttatctagttaaatatgtattatagaatagtatcgttgagaaaaggtatgacgatttatcaaggtttactttaggcttgagtttttttatttcttatttttcttcaaaggacttgagtttcctaatccttaattatatacgtttttcttttttcttctctacaataacatagatataattttttgttaatatttaaatcaagtcaatatgagaatggtgcaacttttgttcaagttcctgattcaagttggtgcaacttttgttgaactctcccgtaatgagattggtaacaagaacctattactgcttatacatcatgctggttcacttttgctctccatgtttggtaatgattgcttgatagctgcctttgataagaaagggtaaacaagttctctggtcactttgtgtccatttcatcaggctccttctctaattaccctgtgcagaagtttcttgatatgcttgatgaaaggtgtcttacgttgattgctgtagaattaggtattgaactaacttgatttcattgatgcacaaaacatgtgtatttatacaagcgagtcattgtatgtgataaactcaatctcctaaactatagggatttaaacatatcaagagaatatacgaccttatcacaatactccccctcacgttggagtgtgaagatcctgaatgcccaacttggacatgagataaagaaactgggaacggccaagtgccttggtaaatatgtccgccaattgttcattagtgcgaacatgatgtgttgttataatgccgtcacgaaccgcatcacgaacagaatgacaatcagactctatgtgcttggtacgctcatggaaaactggattagctgcaatatgaatagcagctttattatcacaatataagcgagcaggcgcatattgttcgatacccaattcttttaacaactttcgtagccacttaatttctcgaagagcaactgacatagctcgatactcagcttcggcggaagagtgagagacagtgtcctgtttcttagttttccaagaaatgggtgaaccaccaagtaacacaacataagcacttagagatctccttgttttaggacaagtctgaaaatccgaatcgcaataaacgtcaagttgtaattctgtgtccgcttttaacaaaattccttgaccaggtgaccctttcaaaaaacgaacaatacgcatggccgcagctaaatgagcctcacgaggagtttgcatgaactgagataagacatgaacagagtaacttaattcaggtctagtatgaaggagataaagcaaacgaccaacaagtcttcgatagggtttggcgtcggcgagaagcggaccgtcatcagtggccaagtgatggttttgttctaacggggttaaagctgggcgacatccaaggttgccactgtcggtgatgatgtccagtgcatacttgcgttgtgataaaaaaataccttcagagccccgacttacttcaataccaaggaagtattttaacttccccaaatctttcatggagaaacaccgtcctaaatactccttgaatttctgaagcatataaccatcattaccacaaatcaagagatcgtcgacatataccaacacacggagttctataccattacgtgtataagaaaagaaagagtagtcttcatgaccttgcacaaaaccaaaacgtaagagggcatcagacaacttcttaaaccagcaccgaggggcttgtttcaaaccatacaatgacttgcgaagacgacaaactttgtcgggatgagaatgacgaaaaccaggaggtagcttcatgtagacctcttcatcaagatcaccatgaagaaaggcattattaacatccatttgataaacctcccattggttagcagcaacaaggcgaagaagagtacgaaccgtagtcattttcactactggcgcaaaagtttcattgtagtcttccccttcaacttgtttgttcccttgaacaacaagacgagctttgtatcgttcaatggagccgtcagcattatacttagtcttatacacccattgactgccaatagctacctttcccggtggcaaatcaacgatatcccatgtcttattaatctcgagagcatcgacctctttaaacattgcatcattccaaactttaatccgaacagcctctttgaagtgtttaggttcgtcattagcagtgatcgcagcaagaaaagctttgtgtcctgctgaaaaacagtcatccgaaacataatcggacaaaggatagagagaagatgtaccttggaccattgacgaggactgagaagaagaatcgggaagagcgtgggggtttattggagagactgttgcattgtaaagaacgtaatcctgcagacgaaccggctgtctaatctgacgctttctttgacgaggaggcgtagcttcaacaaacggactgtcaacaacgaacaatggctgattattacgattaggagttgagacaatatcaggagaatcatcaatttgtttttaagtatcaccagaagcaagattcttatccggcgtcgatgaatcagatgaatcaactcgtgaattttgtaaatcggaagcaatagaagcaggtgccacgtcggaatcagagtctggttcgaaaacagagtcggtttgaagagcagaatttgattcagtgaaatcgtccggtttaataacagaatctggttcagcgaaatcgtccggtttagtaacagattctggttcagcaaaatcgtccggtttagtaacagattctggttcagcaaaatcgtccggtttagtaacagattctggttcagcaaaatcgtccggtttagtaacagattctggtgcagcaaaatcgtccggtttagtaacagaattcggtttagggtctgtgtttttatttgcagacaaaacagcagagctccccctgtctagagtggtcgtggagaccatccaatcttcatcaacaatgagaggagccggagacgcagacacatgatcagtgtttgtagctgcgtaaggaaaaacatcttccctaaaaacaacatcacgagaaacaagaaattccttcttctccatatcaaacactttccaacctttttgtgcgaaaggataacctataaaaacacacaaacggcttctctccccgaatttatctttatcacgggaagcacgatgaacataacacgcagaaccaaagactcgcaactgctcataatttggcttggagttatgaagaatttcgtaaggagagagtccattatgaagtgatgtaggagtgcgattgattaagtatgccgccgttagaaccgcttctccccaaaattgtattggaaggcttgcttgaaacaatattgcccttgcgacattaaggattgcctctgagtttgatagttactttgggaatttggtgaaagatcgtgttgggaactatgtagtccagcgtctcatttggggttttaaacgcaccggtattgatcttccgcacagtctcacctccgtcctcgtcacccgcaggattcatttgtgtaagcatagatatggttatcaagtcattgaggcctttgacagatccactcgtctagcttgactggccttctcttgtttacattgtctcatttttactgtgtataccaccactccacttgtggcactctttgtataaaaactttgtttagttttcaagtgcaagtgttatttagttgtaacatccatctcttgtagctttactgggtttatgaagcgtttttttcgattcccgaacttcattttcttacaaactcaccacatgtagagatcactcgagccaaatcccaaacctacacacaatccaaatgaccttccactgcacaagaatctcaagtgaagacaacaacaatctgaacctggtttaatttagaatgtaattttcattaggttaatttgtttttggtgttggttctgttttttggtttagctaactgtagacaacaatcttttagacttgagtttgtagattttaaatggttttcttaattgatttactaagcaatattgactttcctaaattgactatatagtaatagttaaaacactaactttagcttcttccatttaatggggtattcagcagtggccaaccatcagagacctttaaaaatgcatcaatacctccagctatatgagtcacaattttttcatctttgtcgtagtattcgaacgtgtgcctgccataggatcacaaaacatgcagtcaattggcttgctcagagaactcaatgacatgagttagctacgaaagaaaaattcagcctcttaagctactgaaagggaaggctcaactaattgttttcgaactcatcacaaaatcttttctcaaagttgttagaaataattctatcttgcactttggcgacaacccactggactgaagatcttgtgtctagcactgaagagtgtaaccttacctgcctgcagttttaagaataatagaatgatatcatcttatcgtccctgataacttattagtcttataacttacgtaccatacagtttcagactgataagtaatacaaatttcaggacataaagatactagagcgcaaacctgaaagaatcagctgcctcgatgatgtctcctatgtatatatcatttggaaacatctgagcaagaaagcagatttcaattttattcacaaaaaggaacaagaagcaagaaacagatacatttatctaggatttatgcaaaactaaagcataatagtcagcagtgaaagacggagagtgttcttacctcaaattttgttatctctgtagttttatccttaaggtatattagcaattcatggatcaattcagatggctcagtaatgtggtcaaatttgtgctgtccaagaaaaccgtctagtttttgaatatatgttcgcagttggagcctaataaagtttccgtcaaactcgagcaccttcaagcctgtcaatgcgtcctcaacttgttctgcagcatcaaacctgaaggtagaacaagtgaagaactctaatgaagacagggtaaatatgtaaatctgaaagtacgtttaaattaccttttacgtaacgaatccagatcttccaatgacataagaatcatccttttctcctccatctgattttcgagttcaaac

SEQ ID NO: 34815 - DNA, 4369 bp, Arabidopsis thaliana landsberg
cgaggtcgggctaggcatcgatttcgggcaaggcaacgattctctttgtctctcagctaataacctgtggatcggatcttgctcccaatagtgtttctctctatttatagggaatctgaaccgtaaattccgttctgtctcccttgcaaattatgattttgcccttctcgacctaatgggcctttttaatggcaaaaggccctcttctttgttgatatctgttttgggcctcctaacattgaaggggcaatgcccatgtccaacaatgacactcttatgtaaattcgaatttaacttctttacagagtaaagcagtcatcggtcttgcgattttgctgaagtctttgatgaatctcctgtagaaaccagcatgtccaaggaaactcctcactgctttaacattatcaggcgcttgaagacttgtcataacttcgatattagctctatcaacttctataacatgctcagaaattctgtgtccgagaattatctcatcctgcaccataaagtgacatttcttccaattcaaaactagatgtttctcctcacatcttgccaacactttgtagagattctctaagcaatcctcaaacgatgatccataaactaaaaaatcatccatgaaaacttccatgatatcctcaatcatgtctgtgaagatagacatcatacctctctgaaatgttgtaggagcattacaaagaccgaagggcattctccgataagcaaatgtaccataggggcaggtgaaagtcgttttctccttgtcatctggatgaatcgggatctgaaagaatcctgagtatccatcaaggaagcaatagtacttatgatttgctaacctctccaacatctgatcgataaatggtaaggggaaatggtctttcctggtagcagcattcagctttctgtaatagatgcacatccgatgtcctgtgattgtccgagtaagaatcaactcgtctttctcattcttgactactgtaacacctcccttcttaggaaccacatgaactggactaacccaactgctatctgaaatcggatagataatccctgcttccaacagtttcataatctctttcttaaccacttctttcagattcggatgaagtaaaagaatctatcaagaaggttttcccttctatgatcggtttcttgaaaaagtgttcatatcgaactgcatagtatgatcgccaacattcagccctatcttcccttgtcgaacatctatgattgctccagctgtgtgcaagaaggatctcccaaagattaatggatccttatgttctttctcataaggtaataagactacaaagtctgtaggaatcatgctctttccaatcatcacgggaacatcaataagaattccatctggaattcgggtagaatgatctgccaacacaagagtgataaaggtaggctcaagattggaatacccaagacgcatagcaactgaacgaggcatcagattcacactagaaccgcatcacataaagctcttgggaaggaatcgtgattgatggtgacactaagtacaaaagttccaagatcaagtagcttccttgggattcgttcttgaatgatgtcgctgccttgctttgaaatcatcataacactgcattcattcgtcaaattctcagtgaccattgtcttaacataccttttgattgtgggcgatagatgaatagcttcaactagaggcatctcaacaattagcttatcaatcatagccttgcatttgacatcatctaaggcttgtcttgattttttaggactcttggggaagagaattcgccgattcgctgacttggttgcagctggaatttgcacattgtctgaacgagctgggtgtcgatcgacaggagctgggtgtcgatcaacaccatcgggaatagtttcctcctcctccgcgaaattgtcgattccactcgacaaaggaaaaacagagtcgtcaagagtaattggtgtcgatcgacaccttggtgtatcgatcgacactgattcgttttctgcaattggagaagatgaatgctgagccgattgttcgcgctgaagtattgggttgagctgctttctgctgcgtagtgtaactacattgatagaagctgatgtaggtgagagattggagaattgagagcgtagattgtcaaacttgctaatgagatttgtggagagagaatcatatttgctatcaagcttggttaggcctgcaagaagctgcgcaagcataaattccattattgtctctgatgagggtggagggggggcttggataggagcagaaattgctgaaacaggagtctctttgctcgcggtggctatctcaactgaaattctttgttctatgtcaacttcctgcgtcgaaagacaagttaaagcataggtgatgaggagtaatgcttcactagtggttcttgtcatgaagttacaatagcttgctgcatcgagttgactccggtatggcttgtctattcctttgtagaataggtagatgagttgtctctcttggaagccatgttggggacattcacgctgataagaactgaaacgtagccaagatgcactaagggactcggctagagcctgagttaacgaagagatttgcaaacaagtgtttcatggatggattctttgtatcagtccaattggttaatacctggttccagttgacgcaaccatgatgttcctctgctcgcgagagagtgggggaagagtttgcaaagaaggtaatcagctggtacaccttctactttgatagaggaaactatgtcttcgaagacttccaaatgatctaatggtgtttcatcaggagatcctctaaactttcctctagatacacgatcataataagcagggtgtattgcaaagtcttctctttcaaatggaggtagcttgaatgctgatcggttggtgtagaagagatcagttctgttaaaattgcctattgtagccgtctggttctgcagaggtgtcgatcgacaccctgatggtgttggtcgacgcagccgtgaaagtctgccattcaaacgtgattcccaatctgtaggtacctgaaacacaagagaccaacagacaaagaaacacgtgagtaggtgatagaaaagaagtatctagacttaaaaggacacctagtctaatggtgaactaaaagagaacttcggcaacggcgccaaatttcatagtgctcaaattgccttaagcttactccctccaataagagatagtcgttagcacttaagggtcaaattccaatgagctctcgatgttcacacaatagacttatgatgttatttaataggctagatgaagtaattaaatgtaagcgacaaataagcaagtaaacgaggtgtagattcaagtgattaaagcgtcgggtctaaagaattgtctcgggagatagataaattatagatgtagctaatatcagggtttttatcgcaccgttctcaaactcaaactatgattttagagtaaccagtggtgttccgcaaaactctctatacttagagctaagataaccggagaagccgagaaatcctatactaaagcatgcattattattaattttgattagttcagctagtatcttaaccagagcccttcaatgagcctaaatgttctttcttaaatgcctattctcatctatgatagttcaaataacaagtacctatggtgggcatacctattatctaatatcaagttctaggtgatcaatctaaaactagtagtaagattaatcgtgatgaagaaccataaaaataaccctaaggggttgtcgatctactaatccatctaaatccctattgaaactccctaaacccaacaaggtgattactcagacatgataaaagaaacacaaatcatattctgaatagtctgcattgatgaattaagagtaaaagtaaaggagttcagaatcctctctaaaaggattggattcttctctcaaaatgtgtaacaatctctaaaaacaaaacttaggtctaatactgaccaaacatttaggtatattcgtgactaaaaacgtgtagggactactttcaaataaggaagatttcggtaaagttgtttagcttgtttagatctacattttggtatgattttagtaatttttgggtttgtgttctttagaatgttgcttgagtatgattagggttcttgaggatggattagattagggtaatctctaggttagttaggtggttagtgtttaggttagtaccttgctggattcgcttggcccctatgcggttttcgctggctaatgtggagattcgatcatagacgtccagcgtccaaaagacgttcaaatggatgtctgatctacgaattccagagatttgtagactcgaccaagagatttgct

SEQ ID NO: 34816 - DNA, 4671 bp, Arabidopsis thaliana landsberg
  unsure (1)..(4671): unsure at all n locations
aaagcgtcctccgttctaaagcgaaacgtgaagcatattcgcaattggatccaagaagaaacctcaaagttagctttcgtactctttctcatcttcatctccacaatatccttagcttgtcactagttttggaataatcggtaggtttgggatacataacattgtttttgtagatgatagactcatcattgcttctttatgtttggtaatttgatgatgaatatactttcgattacagggcagccgagactaagacaccaaagcagatggattcaaaggtcccataaagacaaagataaggattagtatttttgagatatgtgagttgctgctagtttaaaagtaaaggtctgatggtgtgagcccaacgtttttgggaaagtaaatattacaatccaattcctctaatcattccttcaagcaaaagggagggaagatgtgcatttgtgtcaagatgtggtggaaattatcagagggtttatcaacggcatgtgtatgaacaccttggtatgtcgtcaccaccactccttcgtctccccattgcctctgcacttgcttcttcactctgcatccttcttctgtgcacttataatagctcctatatatatatatatatattcatattttacatgtatgtatatgagtctcttatttgatcaccatagcaagcatacagtatcattcattgatgattaagtacgtacctggggaatggattgttcttgactgctttttggccgtacttcctccacctgtatccatcatccagtatatcaacctggcttcttgtctggaacgcgtacctcgcttctctctctttcttcttcttcttactccttggcttctcttcggatgatgttgtcggctgagcagagttgtcgaccccatgaaactctgtcaagcgaggatcaaccgatgatgaacatggaaacaacacatcacacctcctatcctccatttcttaactccctctgcgtttatggtgggaacttgaaaaaagccaaggaggggagggagagaaagagagacgtacacggtagcgaagatgccagagaaagtgatatatattgaaaatatggctacattagcggatccatcacagaaaaagagttttgtggaaacaaaaaggtgtggcggctacatcattctgatttatattattatatatgcaactccttcaaattttggttcaatggattcaaatttcaaacatatttcttggtcaagaatcaatatgcatctagatctctgaggtaatcattcttttcttatttgatttacaatttggattagcaaggtttccaagataatatccaatatcacgtgtatttgaggttcacctaccaaacttgattgaattcaataaacaatgagctcgaatgatgttgagattgttgactattttggctctttgctttcttctatacttgtcaaaagtatataatcattgattccatggattattcatccctccatagttattcaaacttgattcatattcactttttacacacaacatagaattataataatactaggcattgatcacatgtaggatttgagacggggtcgcgtaagggactgcgctccatccaccaagacagtggtgcctgtcatgaagcgtgagccatcgctgatcaagtagataacagtggagtagaggtctgtgtccgggttgagccactggccgaggggtgcagcgtccttgaccagcttctgcgctcggtctcttcnnnnnnnnnnnnnnnnnnnnnnnnnnnnnnnnnnnnnnnnnnnnnnnnnnnnnnnnnnnnnnttgtgcttcccgagactcatggctgatgcctgaaacccaatcatcaacaaacatattcaagttacgaacgcgatgtgtctaattaggagctaggatgcatacccggacgagctggtgaatagcggcagaagttgaagcgtaggcatcagcgccagggtaaagcgccctctctccgttgcgatagtggccatgaagacaatggagcctcctgatccatggtccttcatccttgtggctacagccttcaagagaaaccatggagcggtgagattgatctttgtgattctgtggaactcatcttgagagacttgaagaatgtcctgcacctttcctgcaagaaagaaagattgttgaataaaggaatgatcaacacacaagagcatcaaaggcagggtagtgaaaaacaagaagcaaattaaaccttggtaggtataagagttgagaaaagcatcgaaatggccggaaagttcccatgccttttggacagcggcatgaaaagcaacttcagagtcagattccatgtcgagtgctataacatcggcagggaaggctccctcaatggaatctctaatcttgtctacaatgctccttagggaaccctcatttcccatcattaccaacctagcaacagtacattgcattttttgaaggttaactatagacaccaaagtcaaccacaacacaaatcggggctagaagaagaaacacaggataggaggaaagaagacaaaatgagagactcacttgcaaccgtgtttggctagatggaaagcgatgttccgggacacctcgtcgccgttggatgtcatcaacactctcttcgccggattttccattttgccaaagtaactctttataaaacaattcagcagattcaacaagacttaagggagggagggagtgagattgattcgatcgccaattctaaataactataaagagtggctgcaaaagctcttaccggaactgtgtctgtgtgttaccaaaacggcgaaacaaagcaaataattaatgcctaaccacatgatccaccacgttctgttgttaccttctttaatttgtagatagaagaagatggtgattgataacggagatgtatttttttctttaataaaaagcccacttcaaggcccagatccatttctgtactttgtaggttttccaactttcccggcgccggaagcaagcgtaagttatcactgttccccaaccaaattccatcatatcctattatcctactactaatggatccatctccaagattcctaatttcactttgctacaaacttatttcgtgtttttggtttataattaatagccgttgttggttatgaatatgtaagcataaaaggcatttgggagctccagacagacaatgaatcatcaacatcaggtactctgtctttcgtttatgtttctgttccattcttttgaaatatatagaggaggaacttgttattagctagtccattgatcaacacacaaagagtgagaatgaaagcaattcctccaaccaaaaggatgctttcccttattgatttagttggaccaatatataaagagaacaaaggagggtgttggtaggtaacaaaagattctaggtggtgggagggtagtggatttttgaaaaccgtgtgttgacttaatgaaagaggtgtagagtaatgggattgtgagagtgttaaataataaaagactaggatacgaaatcattgtgacatgtcaatttttcaagtgggtggtggaatccgcaacaaaatataaaataagaaaaatgctttgcttgcttgcttgctctactttgccttctttttgcaaccaacatgacgttatgctggaaaggaatcaaattgttacttggtcatgcacctgtgaacgnnnnnnnnnnnnnnnnnnnnnnnnnnnnnnnnatctattatactagtaaataccacatcttgcttgagaaggagaatataatcccccaaatcttcacccgacttttggtagtattcgaacaattataacagaatctaaaagttgctgtgcccgtgccacgtcatctctaagaatctttagtggcacgtgctcgatcaactaatgaaaacaaggttcggttccggtggcctaccatttttatcctccttcaacttccctctccctctctcttttaggaattttcctcagaaattggaggactcacactcttctgggtttctgctgcagccaaatcaccaaggagatacatactacaaccatggatgatgatgaatatgccaagctcatcaggagaatgaatcctcccaggtttttctctttctctccatactcttttattgttttctaggtcctctgtttctccatgctccgtttgtgagcctctatacccttgtaaagattccagctgctaaaacattcatctttatttatgtatgtttcatggtggatacagagttgtaatagacaacaacgcaagcgacgatgccactgttattcaggtaaataaatctgtctcttcaaattgttcaagtggttctgtaccaaacaaagagattttgagaaaacagagttccctgtttgtttgtggtgctaaataaaaggttgatagtgtgaacaaacatgggactctattggaagtagtacaagtgctcactgatatgaatcttgtgatcaagaaagcttacatctcttccgatggaggttggttcatggacgttttcaaagtcatcgaccaagatggcaataagatcagagacactcaagtccttgactatatccaaaaggtttctaatgtatttcatcactttttttctttcattttcaacaggttttttttctttgtgtaaaacggttggtgaattcattgcgcaaaggatagagagcaacgctgggtggtt

SEQ ID NO: 34817 - DNA, 6690 bp, Arabidopsis thaliana landsberg
  unsure (1)..(6690): unsure at all n locations
tttctcatttgctgaatccacggccgattcttgacttggaaagttactgacattatttatccggtttattggtattagagctatctcgtcctcagctctgtgcagaaatggccgaagctactcgtctcacaaccttaaacaaatagatcaatgagcagaaactagctatggaggctataaccctccagatcgacaaactaatgcagtctcaaacacagatagacaagttgttccagtgtcaacaaaagcttgaggccatggtgacagcgttggtttctcaacagagtggcgaacaagtcaaccgagctccagactccaacttggtagcttccggtgagctcacctcatcatcatcgttaacaccgagacccctagatcctcctgatttaaacgaatatggtcagctttatatgggtatatgtccgatggattaagacaaagctacggtgcatccaaatgggttgattaccagactttcaaaggtagggttcccctcatttgatggtaacaggtttcgtggatggctttaccgatgtgagcagttcaaaagcattggagtggcatcataactacatacgtgatcggtttgatatgttcccatcttgatcagaatatgtgatagatctatcatctagattcgcagagcttgtagatcattctttggctgatttggtaaatgtgaagcagggaggaaattctgttgaaatattttgggaaaaatttgaatgcgccagaacaaggtggtcgctaccaatgtcgcacgctctcagcatcttccttaacaaccttaacccacacctagccctacaagtccgacagttcaaaattgttatagtggcagaggcagctatagccaagctccatgagtcggctatccttcaaacacctactaaacctcaacgaaccaccttcagtccctactcaaaacccaataaccaaccctactataaactctcaaacaccacagccctacttccaacatcaagattcactgaaaaccttacaacaccaccatacaaaccaaacaataccactaaaccctccataaagttcagttatgatgagatgcaagaacggagaaccgaaggtctatgtatgttatgtgatgagccatatattccaggccatcacttaaagcatagaaaatctcaaatctttgtgatggaatatgaagaggatgatttagaagaacaaggggtggttgcagtagaagaggaagagaatgttgttgtagatcccaatgaggagcagccaacaaatttagtaaacgcattgaattgatccaccacattcaattgtatgcgtctgttggggcagtatgagaagcataagctccaaatttttgtagaccgacgcaacacacacaactttattgatatcaaggtagccaaggaaataaaatgcaagttataaaggatcaagcctatgagagtaaatgaagcacttggtgacaaaatagtgacactttatagatgcagggatttcacatggaggatgcatggttatagttttaccactgaagtgagtactttaccgcttgaacattgggatattgttctaggcgtacaatggctggctacactatatcctattctgtgggactttactcacctaaagatggagttcaaactgaatggaggccaatatatacttaggggtacttcaacatccagctgtaaagtcatcaaaggtaagaaacttaacaagttactcttgcaagagccgcaagtcgcctttctacagctttatgaccatgattcatccactgatcatgaggcatgtctctctatattgcggttgatgaatccacttcccttagtgataccacattttagacactgttggagtccgatggggacctctttgatgaacctacatggttacctccttttaggaaaggcttcgattactagatactagttgaagaaggggcaaacctagtgattctcagaccctaccgctacaactctatgtagaaagatactattgacaaaatggtgcaagagatgcttggccaaagaattatccggattagctctagtccttatgcctcacctagtggtgcttttcaagaaaaagatggtttatggaggctgtgcgtcgattatagaggcttgaataagcagacaattctagataaataccttattccactcatggaggatctgttagatgagttaggaggctcaatgtacttctccaaacttgattttcgcgcagggttccaccagatacgaatgcatcctgatgttatataaaaaataaactttaaaattcatgttggtcactacgagtaccttgttatgcattcgatttaactaacgcttcttgttcatttcagagtctaatgaatcaggtgtttagtcacattaacacaaaacttctacttgtctttttgtaatggtatattggtgtatagtccaacttgagaacaacatctgcttcatctagaggaagtatttgcaatcctcaagcaacatcatctcctcttgaaaccgttgaatgtacttttggagccacaatagttgagtgtatggggcatttcatatatgcggctggagttagtacagatccaagtaagatcaaggcagttgaacagtggcctactcctaccacgcagaagcagctaagaaatttcttaggccttgccaattattacagaaggttcattcaaggttacatcatcattgctaggctattgactaacctactaaagaaagatgggttccactggtgttcggaagctgctacagcctttgatgcattgtaatctgccctgacatcatccccagttctggctctatcagattttggtaaggattttgtaatagaaactgatgccgctaacacaaggattggtgcagttttgatgcaagagagtcacccaatctgctatatcagccgggcacttggtccacgccactaggccctatcagtttacgagaaaaagttgatagatgtggttcatgtagtacaagcttggagtgcttaccttactcatatgccattcattatcaaaacagatcaaaaaagccttaagtacctgttggatcaaaaggtaactactcatttccaacatatgtggttgtctaaactcatggactacacttatgagatacagtacaagcaaggaaaagaaaatcatgtacccgaagcattgtcaagagtgaccagctcccgttgctctccattactttatttcacgttcacaaaagtctggttgatagtatccagctgcttttgcaatcagacccgcgtcttagcaaatcatctctaacattaatagtaatcatgcctctcgtcctgcttactcctttatcaatgacgaattgaggagaaaaagaaaactggttgtaagagttgacgctactgtcaagctcaatatacttaaatggatgcatgattctgttagttggggtcactctagaagagacgctactttgtagcgcatcaaggcactgttttactggtaaaagatgagtccgaaggtgcaaaattatatttgtaactgtcaaatctgccagaagaacaagtatgatctagttgcttctccaggtctgttatagcccttgccagtcccaagaggagtttaagaatacattaacatggatttcatagagggcctcccatcatctacgggtaaatactacatattagtggttatcgatatgctaagtaagagtgcgcatttcattgacctatctcacccctacacggtaattgaagttgttcaagcttacttagataacgttttaggctacacgaaataccacaggacatcgggaccctactttcctgagtgaagtgtggagagaattgtttcgggttcatggagttgatcagtgtttttccactacttaccaccctagacagacgggcaaactgtggtaactaacaaaacccttgaaactttttttgcgatgcatgacatcggacgcctcaaacttggagcaaatggttacctctagcagaatggtggtactacaccacgtttgattcctctattaaatgcattccatttgaatttgtgtatggtcagcaaccccaagtccacttaccataccttccaggggaaagctcttcagttgtcgttgatatgagcttgcagaaaaaggaagaactgattgctatgctgaaatttcatcttttaagggcacataatcgtataaagaagtatgttgattctcacaggtcacaaaaagagttttaggttggagactttgtgtacttaaaactgcagccttataggcaacaatccctaaaaaccagaggagtccctcgatagcttagcacacgattttatggacatttatgtgtcatagacaaggtcgcatttgttgcttacaagctcgagctgccacaaggaactactagtcacaatgtcttactcaagttgtgcccaaaccctcctactaacgcacctgttctaccacaatacttaactgatgtgggtaatgccaaggaaccagaagctatcttggaaaagaaaatggttaatcgccaaaaccaagcggtcaccaaggtacttttgcagtggaagggcgagccaccatcgaaagctacttgggagtttatgggttctgaaatccacactagagatttgtaaatagatttatgagaaaggagggctagatctttacaagaactttgagatttatattgctaagaacgaatggacttttgtattgataacaatagagcttttacaatgtagaatgggattacaaatgtaaaagtataagtgtaagtgttaaagatgaatgaatgtctcttccaagtcgtccttgcttccttatataggtctacgcacgtgagtatatccattcgagatccgcggggattctcctggatattcggcaggtcatttccgcaatatcaggtcggctccgcgaacatttcttcatcagttcccaaattgttattcgcatatctcccttcagcaaatgattaggcccataaggcccaacatacctagttcgcatgtgggcttcagagttgcgcatgtcctcaacgtcatgggcttgctgggcttattgggttggactggtattttcgcaggtggattcctggagggaaatcctgctccaacatttgccccccagcccattgagtgagtaggcgaactcgatgagcggagatctaatttaggtgatattgcgaaaatatcgttgataaggtggtatcatgataacatcaatcagttttgaggataaactcattaaaatcggtttaggttcggattacctgaatcaaaagatatcgagccgatacgcgaggtagatttctgccgacttggacagtcgagatgacgcgtcccttcgttgcctcgcatccaacggctcagattcgacgcggggaagagatctctgcaatctcgaaaatcgtggtgatgatggccctttaaataacttctcacgtctccactcggtttcacatcaactcacacaacttccaaggtaacttctttcttctcctaatatttactgcgtttaatttctttgttgagatagaaaattttcatctttcctctgttatctccatcgtgtttctctgctaatcctctttttccgatctgcttttctcttctttccttcacctccatcacttttccttcttcgaaactaaaagatgagcgacttggaggattctcagaaccagagcaaccacaactacggtgacaacgagatacgtcggagtcaaagtcggcgtcgtcgcggcaagaaccagacgacgtcggaaccctaggcgggcggagccgagtccaaaagccttcgttgaaggcgaatcaaaccaaaaagaagagccttcccaagaagaagaaaggtgatgggccgatgagaccagacgacctagtcgatctccggaggagatgccaagtcccactggaggtaaacatgattctccagaggtcaccgctcactcccgaaaacgttctggagggatggtgctgtgcatacgctaacttcttcgagaagtgcaggctgttcttcctgattccggcgtgtatccttgagatgctctattgcctcggactcgcctttcccagatgtgcccgaattttgttcgccacgtgttagggttgttcacttgagcccaggaattgaacagagagttcggctgccacgaattgctgcagtactgtcaggtcaaaaccaacgcttcaagcgacctggggacctactacatcagcgctcgtcccggatctctaattataggtggcttgaaggcgtgccgagatactcactagcgagccaaatatttcttctttaaagtggaccgtcactccgtcggcgagttcgaccaaacgaggaggataaggacctggaccaccaccattggtcagaaggagatccgatacctttatttccagtttagtatatataagttgtttgctctttgtattaattgtgccgttaataacgttgttccttttttggttgtttgcagcaaaaaccaaagaagtgactctctcagaattggagctcgagctgctaaccctgttctaccgtggccaaactgactggtcgactttcaccagggatcccatcagaactgctctgtnnnnnnnnnnnnnnnnnnnnnnnnnnnccgagttcataaagaggccggtttgtttgaggggaaaactagatcatgttcgaggaacagatcaaaatcaagctgaatcagctaggtgagctaacaagctgg

SEQ ID NO: 34818 - DNA, 2911 bp, Arabidopsis thaliana landsberg
tatttattctttggtaattataaaaatgacttatttttatctacaattttattattgatttttaggatcgataaaaattagttattcacatataatatataagtatatatatatatatatatgtgtgtattatcatgagggaatggtaaaaataaagagagagaaaataacctttgcaaatatcaagtaggcagagatgagctgttccggcttcatacgatcctgagttgactacaaaacgtgaatgtgatacgaatacttcctatttatgatttaagaaatagtctaggattttcattttcttatttacttttccacttagctttttattataaataaaggttagagtttgtttgtaaaacccatccaagcaattgagagctttggaggagtctatgggattaggccaaggaaagaaaacttagttctctttgaagagtttatactcttgttactaaattgatctatttttctattatcataataaaggttttggttttgaattggattctatctctaacagttgctaatattgttactgtataaaaagacatatgcgaaataatatttagagatactctgttttcttaatgtttgatatccattccaaaaattgctatgttcaaaaactatgactcaggtaaaatatatttttgggtccgccactaatgcatgtcttggtttagcaatgaactgtgagagaacttgtacggcataacacaattttaaacgaatgataaaaaataaaaacctactaattaattgtctgtaacttttaggatcctcaaacataggactgtccatccttcaaaagcttgtggttctgttccatatgaggcattgggggttcttaaccaataaacttatctcaatacttattttctttgagaacgtaaaatgttgtatttctgattgttaagaattcaggatagctactaagcactatcgaggtttctttacatttttttttgtcctttttgttttattattgaatagatgtgccctataatattgtttggtcgtaggcgcactcatgaagatttcaatgcagaacaccaaactacattatatgaaccaacttgcttatataccgaataaacacaaaattacatagtggacaaaaagtgcgcacatttgaagcacctggagttgagcaaagatctcataactcgcaatctgcaaacatcctctttttgtctcatatccccttgtttttttcatgaaatgtgtatagacgaatttaccccttctttttctaatattcattttaaaattaaatgatgtttgaaaaaaaaacaaaaatcgaaaccgcgcaaagaaaaaaatagaaactgactctctctctctctcctctcctctctctctcccctgaagctcaagctcattgctctcatcgtcggtctcattcgatttcagtcgccattgttaccatatcctctcctccggcgagcttcgtcgagatagaaagaaaagttatgtttctcgagctgcatagagcttaaaattgaagatttgaacctagaaatttaagatattttctcaattagatttgagattaagcaaattgtgtttaggtattcacattggaagtttatgcgcactgcatgggttgaatagatttgtaaatgggtaagaaatggattacaacaactgaatcatagtgaattgtagttttgaacccgaaccattcgatttgagttcttgtcaggaaatacaactggtagaactgagtagaattgcacatgattcaattgaaaaatatatatgtagtattactcgtagctctagttttatccagatatatgtagcatgacttagttgcactagtattgaccatttatatgtagtattacttaggtaaagtagtattacctatttacatgtagtattattgattatacttgtattatacagatatgtgtagtatcactagttattcttgtgttacccaaaattgtagtataattagtattattgatagagtttttgtgttgtttttgtgggatacaatggtggagaaggtgatcatatattttaattggaaatatcaagcgtatagcttgatgatgaatacatcaaggggaaaaataactctctccatgttagaaggtaggatttgcacgaagcttgcattagatgaaagtaaggttaaattgcaaatgaagtacaatgcagtgatgttgggaccaactcaagagatttacattagtgatgatgaggatgtcagtgtctatatatctttaggtgaaatggttagtaaatatcctttgactgttgacgtcatcactccaccagaattgcccgagaaactatcgagagtggaggtgctcaataaaagttctattggtaagaactatgctgatttgggttcgcatgaggatgaaataagagataatgctgccatcgtgatgggcgaattggaggaataaggaatagaacaaaatgaggcaatggcaatagtggaggttgatgatactcaagattctgagattggatcacgtgatgaatgtgatgatagagatggtgatgataggggtgatgaatacgttgagccaccgcctgttgtagaatctagtcagtttaagaaagaatgggaagacggtattagtttgtttttacgacaagaatttccaagcagggcaacattgcaaaaagtgatggacaaaggtttatttgctaaaagttttggttatgttattgaaaagtctgataaggagcggtatgtccaaacgtcttttaaaaaaaaattgtggttggcgtatacgagtttcaactattcggaatacaagtatttactttattagaaagtacaacaagatgcatagttgaacccggattagtaagagtagaacaaggttgagtaagaggaaaggtaaccgtgaattagaagcagctcttcttcatgatattt

SEQ ID NO: 34819 - DNA, 4935 bp, Arabidopsis thaliana landsberg
  unsure (1)..(4935): unsure at all n locations
aaagaataccatttcgcattataagtaatctagcattacttagtgaaccccggatctagacagtgttatcctaataccctttcttaccccctaagcagcaaacaacacgtaacaataatacaacctaacaagcaagacataaaaaaagataacacgtaacacacaacacaagcaaaatataatgcacaatgcaaaatgtatgcagactcaaatttcctaatatgcagcagacaactaatgcaagcatgcttctatcaacctaggtaaggccttctacaaatccatgatctcccaaggacatgcctccatactcttagacacaaagtctataagagacatagcattcttttatactacatcgtcatgtagcgcccggtcggtaacgatccaaccccgagccttcgtatgccataacggaacggagttacatgcgacgcacaacatacagacgggatcctcatggttcggctaatgctagtcatctaattaaagactaactaacatgacaacagactcacatactatcatgcattaatcttatatgcaaaactctactagtcaaacaactaagcatacttaattactactaatcgtaattattccccctaatcatggtttaactagccctaatcatgcttaggaaatactaatcctaattagtcatcactaatcctaagtaacaattactaaacctaattaactatcctaatcaaggattaagcgaataattaagctaagtaatcataattaacctcctaagctatattaaggaaataaatgaataaactatcctattcacgtgctacttcacgtaactcaagactcacttggatttccgagtggtttggcttctgaatgttttctcccgcgaactaagctgttctaagcgatttttgggtctgaggaatcaaatgggcggagggggtatttatatggtccaaggtcggtgattaggtcggccaaggcaagcacgaggtgtttggaccaatcaaaatgtgaaaaatgtagaccaacggccgctccaagacactaatcggcctccgattggttccttccattttttcggataaacatcatccaaaaatggataagcacgaccctaaaaggataaggatgaccagaatatggataagcttgagccttaaaggataaacatgaggcacgattcaatcttggtcgtccatttcctcattccggcgaaacctacgatctgtcaccagaccgcaagaacattaatacggcacactccgttccaatgtctcctgagggtccatgacgcaaatcaaggcttccttaggactataacacgttccatgccagaattaaccgagtaagccggctatcgtcacttatccgcattctccgatcaatcccgtgaccattcacgacccatacacatatctcactgtccaaatggattccactcgaccttctaaggtttcctagaccgaaagtaaggtttcctgaagctatcctagttcttagggctagcctaatggttttggggtttaccgatagtcgcatcgtagctaaacttggtccgtctgatggtgtgtcattcctttacccatggacttgatccaattcaatgctccttacccatgacttgccacatcaaaaggccaaactgatcttgccttttcttggcttgatctcgcattttactcgatagactgcacgtccggccgtatagtcaaggtcaggggcattacagtcaatgtgatatcaagggagttacacaccctcaactctcaccccggagattggatcaaacttggnnnnnnnnnnnnnnnnnnnntcccggattgtatgatgcccattcttgatctcgccagtcaagggatcaaagtgttctgcaagatgagaaggatttcctaatccgaagtgtttctaagatttcagcgtcttttctttgttttctctttgaataaatttatccttgcttcctgctttgtatgttcgcatagtcgaactccttatttttattcgtacgtataatcgaactattcttcaacatgaataaaacaaattttattaatagctgaactcgtttccgagatgcctacatacccatttcgagatcaagccacaccgtagttcatgtacaaagaatgcgtgtgtgtttttaaacataaaatttcttcaagttcaccacattccaaggacgttggactgtctgtcttctaaatctttcaatctgtaaacaccattccagaccacctcgataacaatgtagggaccttcccaattaatgccgagtttgcctgctccttcctctttcttgttatcgaacacacgtttcaaaatataatcgcccacaaagaaaggtctgcttttgacttttgagttgtaataccgagctgctgcatgttgataattctgaattcggatcaaggcttgatctcgcctctcgttgatggtatccagcgaatcgtcgagcattgcagaattctctttttcattcaaaggagcttccgttcgacgaagtcctggcacattgagctcggctggtacagctgcctccatcccgtaaaccaatgaaaacggggtttcaccggtcgagcgcctaggagttgtgcgatatgcccataagactggctgaatttcatcataccatcccccctttaaattacttaagcgtttcttaagattgcttagaattgtcttgtttgcagcttcagcctgtctgttcccttgtggataccgcggagtacaataactaaccttaatcccccagtccgagcaaaatgcttcaaactcgtgcgaaataaattgaagtccattgtcagtaactatttcgtatggaacgccatgcctgcaaatgatgttcttccaaatgaaagtctttactgccgaatctttaatattcacatacgcttcaacttcaatccacttcgaaaaataatcagttagaaccagtagatattgtacgcctcgggtcgacctatgcaatggtccaatgatatccattgaccatctcatgaaagggtacggggcggagatcgaagagaataactccgaaggttagtgaatgagtggtgcatagagttggcaacgtttgcatctttgggcatacttaacgcagtctgtgatcatagtaggccagtagtaacacattttcttgatcttgaaagccatagcccttcccgaggaatgacttccacacaagccttcatgtacttcgctcataacaatctcgactacgggcccaaaaatggaaagcaagtaggggtcacttacacctcgtctatacaaagaattctttgataaacaaaatttcgcgctaacgattctcattttcctagcttgccatttgttctttgggagtttgcctgtaacgatgtaatgctttattggctccctccaatcagcccccaatctttagccggaatttggtcaacttcgtgaaacaccagagcttctggttcgggatgttcatttggcgctagtatatcctcgtcaacccacggttcagtttcagcttcgattttagcgtcggagatgacttcttcaattagttcgatcccaacattttcctgcacagcgggcttaggtacggttgcttcctttgactttcgtcttttaacaggtggtaattcaacagcagtgtcgccacgatctcgggctgcagctcgggatcttgtgactacgagtgtctatttttcttccttaatgcttctatctaaaatacattctaccgaaatgattctttgacttcggggtctgacgttgacgccaaagctgcgagtgcgaccgcggttgtgttttctcctcgtggtatgcgaatgagttcgagcttctaaaattttgtagctaaatctttgaccacctcaagatatgcctccattcttgaatctttggcttcatagtctccattgaactggttaaccaccagttgtgaatcacagtaggggatcacttcattagctccaactccctgtgccaacctgagtctggtaattaatgcttcatattctgcttcatgttgtaaaccacttgttggatggcctccataaccgtggcccatgtccttggaggataggtccgtcagcccattggtgtgacggcccatcgaccagtcggcccaccagtccatcggtccatcggcccgtcggcctgtcggcccggtccatgaagagaagccatagttggtccggcccgtaggtccggcccatgggaattagacataggtcggtcatagacttaagtagttatgggcctttgtaaacctagcccattagacatgtaacctcctcaaatatgtatatatatatgtgatgtaacctcattatgaatcaataagaaacaagttagttcttcacataaagaactttgtttgcactcgttgagttttgtagacccccatgaagtgcatcaatcctgcgacttcaagaagaaacttttcttagtgattataaataaccttgtttgctaacattcttagtttgtttcaataaccaatcttgtctccatgattagaattttgcctaagaaaaacttcttccagtttaacaaacaaaggcatcttcaaattcgttaaaggtccactagtgtttgcatcaacattcaagaattttttgatgttttttcccagctaggatatactccaaaaactcgtggaaataaataaaaatgttaataaacatcccttaggttttcttgatataatatccaagcgagtgtaaaacattttatgtcatcttgatacaagcaacaatcttaggaaagatcgtcatcttgctccttggactagttccactatcaaagataactagtgaaggaacatttaagagaatgtccttacaaccattttatacctctataacattgaaatcaaataccatgttggggaattgcttgcccccaagaaaaaaccccaccttgtgattcatagctttaaaacctctaattgctgagatgagtatataccttggc

SEQ ID NO: 34820 - DNA, 3207 bp, Arabidopsis thaliana landsberg
aaatgctctttcggagttccctcaggagaattccacaggtacctagtaactgaaagaggcatcgaggccaatcctaagtagattacagccttcatcgacataccatcgccaaaaacggcacgggaggtccaacgactgaccgactgtatcgtcgccctcaacaggttcatatccaggtttactgataaatgcgtccctttctatcagctcctccgaaaggataaaaagttcgattggaatgaggactgcgagcaatccttcaaacaattgaaagcatacctgtccgaaccacccatactcgcaaaacccgaagaaggagaaccattgtacttgtacacggcagtctcccgaaccgcgataagcggcgtcctggtgagagaagatcacgaaggacagaaaccgatctattacgttagtaaaacgttgatagacgctgaaacccattattcagcaatggaaaaactggcactggccgtagtcatgtcagctcgaaaaatcagaccatattttcaatcacatcccattgtagtgattacgtctcaaccaatcagaaccattctgcacaatccaactcactcaggtcgacttgcaaaatgggccatagaactaagtgagtacgatatagaatatcgcactagaaccagcttgaaagcacaggtcctagccgactttgtaatcgagctcccgttagcagacctggatggaaccaactccaataagaaatggctcctccacgtcgacggctcctccaatcgacaaggatccggagtcggaatacaactcacctcccccactggggaagtcatcgaacaatcgttacaacttggattcaatgcatcaaacaacgagtctgagtacgaagccctcattgctggcattaagctagctcaagaaaaggggatccgcgaaatacacgcctacagcgactcccaactcgtcaccagccagttccatggggaatacgaagctaaagacgagcgcatggaagcgtacctcgtactagtcaaaaccttggcccagcagtttgaatcgtttgaactaacaagattccctagaggagagaatacctcggtagactccttggcagttctcgcttccacgttagatccttttgtcaaaggaattatcccggtcgaaggcatagaatacccaagcatcgatctaacagtaaaacatgctgggacggaacccccgacaacgtgcaaatttacacgagtaacctgaagcaccaccgccgcacctagagacatcgcagcagctgcggggcaagtgcaacgaaagaggaaccagagtacgaaacacgcgaacaacctgccccgtacaaacctaaaccgtacaatgactggagaatcccaatcatcgtttacatcgaacgagggatcacacctcccgataagtgtgaggccagaaagctcaaagcacagagtgcgaggtactgaatcatggaaggaaggctcatgaaacgcagcgtttctggtccctacatggtgtgcacctatgggcaacaaacaaaagacctcatgaagagcatgcatgagggacaatgtggtatcaactgcagtggatgtaccctcaccctaagaatcaagaagctaggctactcataagtgtgtattttgcatgttttgagcatccatttgtcatcactttagcatcagatcatcactgttttataccatttctcatcatttgtcatcactttgcatgtttaggatagttttgcatgcatgttgcatatttatgttgtttttaggtgattcaaagctgttgacgagctaattggaagaagcggacttgatcattcaaaaccattcaaccccgaggtcgagtagacgcttcacaacctcaacagaccactcgaccccctggtcgagaagaggacatcaccacttcacttcaccactcgatcccgaggtcgagtgtcttcatctccatcacctgaccatcactcgatcacctcactcgaccccgaggtcgagtgtcttcacctccattaccagacaaccactcgatctcaccactctaccttgaggtcgagtctaaccatccccaccactcgactacatattcgattgcgagcttcagagtcttcttcattccacactcaaccagacactcgagcacaagaaagaaaagaagactccagctatccactcgacctcccactcgaccacctgggtcgagtacaattcttaatccgtctcaatactgcgtcgttttaagtattagggtttcagaatattttgctataagtagcatgtacttcacaatttcgcaaaaagtttttatctagtttttccgtacacactctattctagaccttttgtaattcggatttctctttatctattcagtattcagtattcagcatttgttcttgatttcgtttactgttgttcatcctgttatcatcttgctgttacactgttgttatcatgttttcatcctgttcaacgtttttgttctctccaatgatgtctgagtagtgaataggtttctgaggatgggttagagtagtatagaattctcagtatgctaggtggttgagtattgattgatagatcccttcttgattagttattcttaatgcctattgttttttgatcaactggaatttgagcccagacattcatggctctgtacaaaggtattggttacaaggagcgttttggctttacttgttgattcgtaatgcctgttaggttagctctcgtcaatggtgattgagtctgggactggtttaacttgagggtctctgttgcggtggcatttagatttggttatcgaacttgttttctagggataatttattgagcatgtcaatcacctgtaaactgaggaaacgaaactactcaattaccccatcctcgggactttctcatctaattgatttctttgtttaatctgctttgtttactgcatcttgctgcatgttgtttactttttgcattttttgcgtgatactcgaccacccagttgtttggcaactacccagttgtttggcaagagactgtgcagtcgagaatacctgttacattttctgtctgttactcgacctgtcactcgaccacacccagtgcttggcaacgagctgtgttggtcgagtgttttaactgtttctgcttgaatttttgttttctgcatgttcacttagacctactagaaaccccaaaacctgttattgcttggcttgactctgtgaactct

SEQ ID NO: 34821 - DNA, 1506 bp, Arabidopsis thaliana landsberg
tttcaattcacccaaatcacgaagcttgaagaatgatttcatctgtgactttagaatatcaactgctgcatcattgttactagcaatgatgatatcatcaacataaactaaaacacacaagtaaatgtcaatagatattttcaagaaacaagtgtgatcagaatgagtctgaacataacccaaaccagtgagagtcgctttaaatttcagaaaacactgtcgtgatgcttgtttgagtccatataaggatctcttcaatctacacacatcattaggtggaagagagtccccctgtcttttagcatacccaggtggaagcttcatatatatttcctcatccaaatccccattcagaaaggcattagagatatctaactgatggagagtaaagccatagatagcagagagagctaaaatgagcttaacagaagtcaacttacagacaggagagaaagtatcattgaagtcgatgccttcttgctgtgtataacctttggcaacgagacgagctttgaacctttcaatagaaccatccgaattatacttgatcttgtatagccatttacaaccaataggctttttattcggaggcaaagtgcaaatgtcccaagtatgattagtctccaaagcaacaacctcatcatccatagctccacaccacacaagaatatcttttgcttcagtgtaggttgaaggttctttggttttgtcaatacaagtcaaaaaagcaagatgaatttctgaaattttatgataagaaagatattgggagagtttatggagggttgaagaagttactgaattacagtaataatcttgaagataagcaggctttttggttctcctatgtgatgtttgaacagaaggttcagggacattgataggactagcagaaggcatagtctctatagaagatgaggatgtagaagcatcctgcatcagatataataggtgacataggagaattgctaagaagatcaggaaaaaaatgttgagattcctgagataagtctgatttagcaaaagggaagagctcttcatgaaagacaacatgtctagaaataataatatcattggtttcaagatccaacaatttatagcctttaaatccagaaggatagccaagaaaggcacaggcacgagctcggggatcaaacttgagtctacctttgggagaagtcgaagcataacaaagacaaccaaagactttaagttcatcatatgtaggtgtctttttagttagaacttcatagggacttttatcatctaacacaggagctggaagacgattaatgagatgaacagcagacaaaacacagtctccccaataagagagtgggatatgtgattggaaaagaagagatcgagcaacattgagaatgtgctgatgttttctctccacaacagaattctgttgtggtgtttcaggacaagagtgaaatgggacaatccctttagactgataaaattgagtgaaattagattcttgagcattgtaagacctaa

SEQ ID NO: 34822 - DNA, 6259 bp, Arabidopsis thaliana landsberg
cacgaaagcattcctacggtcaagctttcaacaacactcccgttcccatcaagaactcatctttctcattcaacatcatcttcgggatcgtccctgaacataagcagcaaggttcacacggtatggctttcgttttctctcctacaagaggccttcccggagcttcccccgatcaatacctgggaatctttaacgagacaaacaacggtaaagcctcgaataacgttatagctatcgagttagatatacgaaaagacgaagagtttggagatattgatgataatcatgttgggattaacattaatggtttgacatctgttgcctctgcttctgctggttactatgatgatgaagatggaaacttcaaaaagctttctttgatcagcacaaaggtaatgaggctttccatcgtttatagtcacaccgataaacagctcaatgttactttattacctgctgaaatctctgttccgccacaaaaatcgctcttgtctttgaaccgagatctctcgccgtatttgcttgagaaaatgtatcttggattcactgcatcgacggggtcagttggagcaattcattacttgatgggttggtttgttaatggtgtaatcgagtatccgagattggagcttagtataccagtccttcctccatatccaaagaaaacatctaatagaacgaaaactgttttagccgtctgcttaacggtatctgtgtttgctgcgtttgtcgcttcgtggatcggtttcgtcttctatttgaggcataagaaggttaaagaggttcttgaagaatgggagattcaatatggacctcataggtttgcttataaggagcttttcaatgccacaaagggtttcaaggagaaacaacttcttggtaaaggaggctttggtcaagtctataaaggaacacttccgggttctgatgcagagatcgctgtgaagcggacttctcatgattcaagacaaggcatgagcgagtttctagccgagatatcgaccattggtcgtctcaggcatccaaatctagtcaggcttctgggatattgtaggcataaggagaatctctacttggtttatgactttatgcccaatggaagccttgacaagtatctagaccgtaatgagaatcaagaacggctcacttgggaacaacgtttcaagatcatcaaagatgttgcatctgctctactacacctgcatcaagaatgggtacaaatcatcattcatagagatatcaaaccagctaatgtcctaatcgaccacgaaatgaatgcaaggatcggggattttcggattggcaaagctgtatgatcagggacttgaccctcagacatctagagtagcgggaacatttggttatatcgcacctgagctcctaagaacaggaagagcgaccacaagcactgatgtttatgcctttgggttggtaatgcttgaagttgtttgtggtaaaagaatgattgagcgacgtgcaccggaaaatgaagaatatcttgtggattggatcttacagctttgggaaagtgggaaaattttcgatgcatgggtggaaagtatacgtcaagaacaaaacaggggacatgttgagcttgttttgaagctaggtgtgttgtgttcgcatcaagctgcatcgatgagaccggctatgagtgtggtaatgaggattttgaatggtgttacacagctaccagataatcttcttgatgttggaagggctgacaaatttacagaatggcctgagaacatcaatggtattactactacttgatgtgaatacatcgagttcattggagttaaccgactcttcttttgtctcccacggccgctgaaattttaagtttaccactgattctttgtttgctatgaagatgtatcacaactgagattattacacattgtaatacacagccgaatgtttttttccctggtatgtacaagaataagaccacaccgcctcctccaaacatttttttaatccttttgtatttgataacaactcgattattaatcttgaaaatcaactctttagaggatatatctaaatcaggtaaagttttcgtctctgtttcttagagaccattgtccggtaaatcctatgaaattgaatggttaagaaatcttataatactatactgttgcctctttgatacgccaattcgtcaggagtatctgcagaaattatccaaatagaagaacgtgatcaaacaaagctccgattatgtttctatggttcatgaattcaaagaaccctaaacagatgtgatatagatatttaatctactatttcaaaacctttttcgaatccaagttgctgtcaaaagtccaatctactgcctatacttttaacgttgcctgtccatacttatcaccaaagttgcaaaattcaaacatataaaataaacctaaagagatctttgaaacctatgaagacgatgaaaacaatcggaaaactaagaaaattaaagatgtggatttgaaaaagaatgtagcgacttgttcgaggccaacaatcaagattagaaaacttgataggcacggagaatcgctatttgttgttgccaaccttcaaggcaacttacgccatttttattttgacgtcattgctctgcaaattggcttaatgtttatgtcaagaagaaacaaatcgaactcttcacgaattcattatcaataccaaggtgaaaaaacacatcaatgtaatattatcagtcgcaaattacccatttgttttatgataatcatcatctgccccactttcaacaaaactaatgatctaataaaaaaaaatcattggaagggtttttattaagagtagatcagaacctgtcgagatatcacaataacatcactcaaatgttgtcagtggattgacagactgtgaattctttatcgtcacttcgaccacacaccaaaaaaatagaacaaaagaaaagcttagaactctaaggttatgtttgccgtcaacgatgaataacttcatctctggcacacggtagttacatcacagcaactactcaagattttcgaacataagaattcaaaaccacaaaagaatatgattaaactatgaaacagagattatagggagacatatcggaccacagagagacgaaggaaacacttatctgtttcaagcggcgatgtaaagactatttatatgcaacgacgggcttgataaaaccctaatttgttcctttttttttgcaataaaaattggttaaccgaagaaagaacactaaaccataaaaattagtcacttatttcataaaatgccaaaactatttattgccagaaatatgcaagttggggaaattgttaatttagaaattctcaataaatcctgagaaataatgtttacaccataatgtaattattttcaataaaccaaaatattaaaattttattgtcattgatatctcataactctattatgctaaaaagaagaaaagatagaactgtgacatactttaggtgagtaagagaagcaagacatggttagactagaaactgtcgagaagaagtagaacaaaaaagaggaacttagaccgatcctaaaccgattaacaaaaaccaacaagtatcaaaggaaaatactactaacggagctatcatcatggacacgccaaatggtctcacccagaagattagccaccgataatatcgttaactgcgggaagtaattcttctccgctactggtaaagtattcgtcactatcacttcttgcagcaaaccgcttgataaccgctctatcgcaggaggactgtgacattgattcattcaagaaaacggtctcttagtttcataaacgaaaatggagaagaactggtaaaactcaagctaatgggtttacctgaaaacagcgtgtgtacagcaagcgtaaacctcacgtgcaccctcctcgtgtaaaagagctgctcctttcacaatggttcctgtaaataagaagataaaaaactggttcttagtaatgtatggcctgcaaatcacagaataatctctatttagtaatatctcgattatggcctagagtttggaagcttttgtttataacaaacatatcaacggaaagaggagtttctggcaatttttactaaccagctgtatcaataatatcatccaccattactgccaccttccctttaacatcaccgattaggttcatgacctgtgggaaagagtattatcaacacatgagaacttgcgtgtagaaaggataaaatgaaggtaaatttaaatttttacctcagcgacattgtggccgtgacgccttttatcgacaatggcaagtggtgcatctgataatttctttgcaaatgcacgtgccctggctactccaccaacatcaggagaaaccactaccaaatcctctgagggaattgacttgctagcaagataatcaagtatcaccggctgaaacaattaagcagataagggtattatacacaaaggagcatacacacaatgcataaagaggggtatcaagaacgtggctttagaggtgaacctggcagtacacatggtcgactggaatgtcaaaataacccatcgactgtcctgaatgaagatcacatgcaagaactcgatctgcaccagcttcagtgataagatttgcaaccaatttggcagcaatggattcacgcccttgtgtctgaaaacatcattagatacatcagatgaaattacttgacatactgtatctaccattgaagaagacaaaaagaacctacctttctatcagctcttgcgtatccaaaatacggaatcacagctgtgactttcttagctgatgctcttcggcaagcatccaccatgatcaatagctccatgagattctcattagttggagtgcaagtaggctgcaccaaaaagacatcgcaacctctaacactttctttgagctgaacatagatctctccatcagcaaatctctttatgctaaccttcccaagctccagacccatataccaagcaatttccttcacaaaattccaagagtttagcatatacttcaccagaagaaaacttgattaaaaaagacaaccaaaggtctcgagaaaactacctgagataaagctggattagcagtaccagagaacaacttgagcttagtattgtttctactaaccgatttctccaaccgtgaagaatcaaagaacttaggaattgtcgtctcattaataattggaacacgagcgttcccgtttagtgccttaggcaaattgcatttctatcaaacacaatgacaaggaattgtgaaaccaaattcaaaatgttagacacaaaatttaaccaacacacgatctctcttacatctctctacaaacataagaataaacaaacattcatgaacagtattcaataaccaaacattcaataaccaaacattcatgaacagtattcaacacacaagattccaaagctgaaagttccaaattccaaattctacagtcacatacatggacaaagtcaagccaagagcgacgacaacacacaaattctcacaaaattagcctgtagacgaactgctaatagcatctactaaatccagaaaaatctcacagatcatcaaagcatagattcatccaaaaacaatttgaattttcttataacaaatacatgaaacgcaatgtgaatatcgtattcattcattaacatgaaggaaaaaaaatgctcaccgcgtaaccagaaacgcagattcgagagcgagactcagtggtcctgaaagaaatcgaggaacgggagaagagagacgaagacgacgaggagagatacgaaggaatcttaacggagggaggagaagtcagagccaacgacgccatatgtaaatatatacgtcggaaacacctggaatctcttgagtcacggcaaatatcagactcctctcaacgttaagaattccgatagagaagagaactaatcgaaggatattaggatttagggttccaaatttggagtgagaaacgaaggagaaggaggagaagaagaaggtaatggtgaatatgtttgttgttgtttctttcttctccgggaagaagagtgactcaagcggtgcggcgatgggtcttctctctttctcgaaatttggaattttcaattgtaattttgttacactaaaaacatacaaaaataaatattgttcagaaacggtgtcgttttggttgatggctaaaatcgtaaaagctcaaagctttcacagcttacgtgtcatgtaggacttaacagtcgaaaagagaaaatgtttcaaacgcaaatt

SEQ ID NO: 34823 - DNA, 5192 bp, Arabidopsis thaliana landsberg
ataaattcccatctcttaattattcatatcgatacccaactatgaattagctacatgattgatcatcgatttaaccagacctattaatctttatcaaatgtcatatatttgtatgttgtatttgtgcttaaaaggacagaagtaggtattttcaatagagaaagacaagcaaattttgtccaatgttttcttaatgcgaaaaattttataaaagaaaaaacgaaaagcctttggaaaaagttttgactaaaactataaacttttcttgactttgtttcaactaaaaaaatcgttgtttcccactaatatgtacaaaaatatagatttgtattgtaatatactgtctacatatactttaaaatcttgaaaaacaattgtgaatatagaattacagtcaaactgttacgtttattaacttgtgagcttcgctagctgagcgatctataggggtgggaaaacgtggggagcaagcaacggaagcacgaggtggcggataaacattatctaaaaccttatccttatctgatttcaagcttacccttatctaaactcgtctttgtccactcttgatcctatccttatcctaaacgtgtgccaacacacgccaagcttgcgacggagctccttccaccacaagcacctccacgacatggccgcaaaatcccgcaaacgactatacagccaaaaatttaagtaatgtggcatgtcctcggccacttactctatttaaccactccaataaaccttgataattgtgattaccactccacttgatcaccaatagcttgttccagtccaaaaatatttttctcggcaaaaatctagtttttttcaataaaaactggtcttcagtacttcctttattttttctttggtagccttgatatttccctcgaccaaattgcctaaaataaaatccttttttaaaaccttaatttttatcgttgatggtttgatcgggtccttcgatcaaatgaacaataacttcgtcgatagcatgtcaaccacattgtcgtcattattgattttgttcgatcatgtcctcatgattgaactaccaatgtcctctatagcctaactgtctaatgccggtaatagccgatccttaacttcttgactcttagaaatagccgataaatctcaactcaatcccggttgctcttgaacttcttcgataagcctcctttaatctatgatcactttgggtgatcactttacgaaaaaatttgaaagtcacggtcgcacttctatgttcgcgaccttctgtccgatagctagtcatcgtcaggggtattacaaccacaatattaatttatcccatccttagaaatttctcacctaattgatttctctgtttacttacctgcttcattcacttgctattgaattttagttatttcatgttttcaacaattctactcgatcacactctgctattagtagtgagtctatgtgatagagtaaacaggtccattttctgcaattttactctatggtagccgtttgtactcgttcacaaagtcccttctggcagtcgactatgcagccgagtatatcagtcatttttgtgactttttactgttttctgcatcaaacactaggactgttcgaaaaataaccaaattttgtgtggtttgacttagcaacttctgatcatatctcatctgttcgcatcacacccatttggattgacacctaaaatattacaacgacaggatattgttctaggataattgattaaaagcctactatcagaatcatccatgaaaagatttgataggggagatgaagctagcatcaagaagtcatatcatacatgatagagtaagctttgtttccctctacatagtatcaaaaagttatgaacaagtcttagtccaaaatttaatgagtctctcttgtgcagatggaatagaagatactagttatttgtttcaaaattactaaattaactagtgtgtgtaagatatattaaatcaaataacaacttactaggaaatgaataaattgttgtggcatgctggtaacacgtaagtttaaacacccatcgaacttggattcaagaccaactgactttagattttctacaaagaaaaaaacttattaggaatccatctatgttattttttctcaaaaaccaaaaagcattttttggtattcttaaaacaaaaatctaatagcaaaatttaaacgaaaatctacaatccaaaaactaaacatcaaatccaaactcttatttaaaagcgatgttaaaaaaagaagcaaaaatccttagtcataggaacacgtgtcaacaaaagagttcttgttcaatggcgacaacatcccgcgacttctttggaatcagttaagaacactctctcacatctctttataaaagaaaaatctctctccattatccacaattacgcaacaaggaaaaacaaaatgtcgacagatcacgcaagagcagattcgattgctacggtggctgagaaagcccctgtcacagcggagaggagagtccgtactgatctcgatgatcgtctccctaaaccatgttcatacactctctctctcttttcatcttggtctttttctaacagtttttgtatatgtttccaaatttagaatcatatttatgacttttgtccgaatctctctctctttcaagattttctcaaaattattaacttgattcacaagctatgaaatgtttttgtttggctactacacaaatacaaagttttgttgaaaacaatatccataatttctctttagtggtttgaaatggttttatcattttgttagtggtgcctttattgtgaacacaattgtaatttgtaaattgcattttttttttaattaaacgttgcgtttagttttgactaggttgtttggtgtttgatcaaaatagatgtgcctcgagcaatggttgcaccagacatggaaaacgttaacgggacaagaggacacaagcaccgggacatgtcggttcttcagcaacacattgctttctttgaccaggatggtgatggtatcatctacccatcagagacatttagaggtatctatgaaaatcatctttataacaattaattaatgaaaaataaaaaatgatgacttccttatatagtctcttttggattgctcaggatttagagcacttggtttcaacttggtttctagtatctttctaacaatcattgtgcatcttacaatgagttatgctacattgcctgtaagttcatttctcatgaacatctcaattatgatgttgtgttacgttagtgtcctttatatcttttggttctcctcaagatgtcttctttttttaaaactagacttggatgccttctcctaccttcccgatttacatcaagaacatccatagagccaaacatggaagcgacacttcaacttacgacacagaaggaaggtttgtctctcagttacgttaacatttctctatgatgatatttattgaatatgtggttataaatatcaaaattttcaggtacattcctgcaaatcttgagaacatgtttagtaagtatgcccgtacagtgcctgacaagctaactctgttacgagctgtggcaaatgacggaagctaaccgcaacgcattcgatttctttggctggtcaatcccctctttgtctctctttcgtatggcctttttttgtctctctcttaatggtgtgaaaataaaaacagggcagcgagtaaaatggagtggggagtactctacttccttgccaaagacgagaatggtcacttatcgaaagaagcggtcaggagatgctttgacgggagcttgttcgactactgcgccaaggcgagagcttcgactaaaaagactgaatgatggatgacacacgtacgggtttcttactctctatgcagttaaatgtcttaagtaacctttatcgagtctcttaatcaaagcacgcattagatcatataaattcagatcgtaatgttttgcttcttaagtttctcatcttgttatattgttcttttagttgctaaatttagatgactcctttgcttgagggatatcatacaagatgctgaatgtgtcaccatgttatatgtcttacgatattttaagagacggaagccttgtttgtttcatcatctggcatttccatccaaatgatctatctaaatgttccatctaaatgcttcatctgaatgttgttcgttttaatttttggatattcatttggatggatcatctcaataaatttttgtttgtttgcttaatttatataaatcttcatctccatctagatgactttaacaagaaaattactaaaatatccatactttaatctatttatatttgtaatcttagtcttagctatattaatttaattcttgctctaaatatatttacaactaaataattttcattttattattttaaatatataaattcattttttgggttttgccaaaaaatgtgattttgtggtttttacagaaaacatgatttaatggaaagtatgattttccggttatggcggaaaatatgatattgcagttttggtaagaaaacatgatgttacggttttggtaaaaagaatgtaattctttgattgttttaattttggcgggaaacacaattctgtaatttttccgcaaaaatcgtgattgtatagttttggcaggaaattactatcttacggttttggcaaaaattacgactttaggggttttgacaaaaaactcaattctcagatttttctggtcttgacagaaaccaatttggtaatttttccgccaaaatcgtggttttttttttgaaatgttattttgcaaattttccgcaaaatcataattaggcaaaaacaatgatgagaaaaaagtaattttaattttcaaaaaaaacgtaagtttgcaattttggacagaaaatgataatttgttatttacgatattaaaaaaaagttagtggaaatatgtaatttttaaatataaaatgaaaaattaacaatattttatatatattgtaattgagaataattaggacatttgcaaatttttgcagaattatctccatctgactgtaccatttaaactaacacatttttggatgtttttcggatgagtttgacaaatacatctaggtggtccatttggataatgtgtttaagtgcactaaacgaaatcacctgaacataagaattacgaacacacaagtata

SEQ ID NO: 34824 - DNA, 4392 bp, Arabidopsis thaliana landsberg
taaacattccatatatatttagaattgaaaaagatttttgacttataaatttttaaaaaatcagctccaacaaaactatccaaaataaaattaataaatcattgaaaatatgtccagagtgaaaattttgctgtcaagttattggtgatacaataataaagtgagatgcaaatacatgtacattctgcggaatagacaagattcaaaaatcaatttaatgggttttccgttactgtctgtgcctaatttattttatctattacttaaattttctatttttcttctattgcgttgaatgtacggttatttagtcctgtttcatatcagtatgagtaacaacttgatacaaaaatgctgtgaagcgaaagaaagcaaacatagtggtggtggttgacggccggaaaaaataaatagaggaaaagaagtgaaactaggtataatgagttaaatgtttagagaaggaacaatgggccagatttataggtttagttcctgttttaaatcgttttagttaaatatttatcaaagaaaagttatataactaaataatgtaatgaatggttttctcacgtttaaaccggaaccgtgacaaagaggaataaaatgtgggttgcagtagattcttagaatccaatcgaaatcaaaattaaccggaagtttacaagatattggaagagatcaagagagggaacagatctccttctcaacctcttccatgttgagattatgatattatgaagaacgaaaacctatttctttgtcttcttttgatttgttcttctatatagtattcaaataatatatagtcatgtcacgtctagagtatcccatggatgactcgctcacacggcctgtttgttgggcttggtctaggtcgagatctacccataattaagaaacaaagataaaaaaaatttaactatctataatatactcatgcatgtttgtttattttttttttggataattgaacgccttgaatcactaaagaaatagtcacgtaactctaaactactaatagttgtagtttatatattttaatattttatcatggataatattttaacagtacatatattttatatataattaaagtcagctctttgtaattgtaggtaacaacgaagtcacagggtatatataagtatataacccaaattgaaggttttaaaatagggttcctttttgttttaaattaataaaaataagtagtgacaatatgtattcaaccaatcaaatataaatactttttaaaataagtcaaaatagaataaaataatgtcaacataactgaaaaaatgagttgatagttcaaaaaatcaactttattaataaatcaacgtataatgaaatatgtttatgattttgaaaaaaactattaaaataaattataaatttttgaattatttacctttgaaaaactacaaatctataaatattattatcaacaaatatgtttcatatttcttcataattttagatattgataactctagacatagtaaatatatatatatatattaaatttttcattattaataaattaattacgaatataatttaattttcaattaatttatattattttaaaaatattatataaacaaataaaatgggtattatggtaaattttcaataagaaatagtagttttcaaattactataaaattgtatgtaatgtttaagtttcttataaaatttaatgtatttgtaacatttttcctaaattgactaattcattagactaccattcaaatttcgttaaattttttttctaatccatataggttgtatttaacgcaaaataaatgtttaaaattggattcattttgttttaaattggatgctaaacgggcggtgaccatccgcctagcgcctagaacgcttagtcggggtctagaagattttaggcagttgttgaaattccggatgaatcaagaatcgtattccccaaactcagaaccactgagtatcactttattagaaatctgattaagaagtttacaactaccttaattggttttacacaagatctaaactactttagcttgtcacctgagatttccctaaacacacaagagcagatcacaagaacacactctttgatctctctagaattccaatcagactaaaccttagtctctaataatgaaaagcgttgcactagcttttcactcacaatcacggccaagtctaacaagaaccttagcacctctatttatactatcgaggtctttggtcttctaggttagccttcgagatcttggatcacaccaaatcttcgcgtgaatatctcctctccaaactgaactcatcctgttgtgatctccacgtcattcgttcatttggcggcatatccacgtcagcatcaattacttgatcttcactttagtcttctaaaacagcttccagcttgttccagcaatcagcactccttctggtttgtcctgacagagggtgcactaacagttgtgggttctgaaatccacattagagatttgtttttaggtttataagagaagaaggctagatcttcaaggaaactctgagaattatattgctaaaaacgaataaattttattgatgaaaatcaagtgaatacaaggtaaagtataagaatacaagtatgaaaagtgttaatcgtttgtgagcaagtaggccatgccttcttcaagttagcctccctctttatataggtcttcttcctaggtctgcaccaactttatatatgtcttcttcctaggtccgcaccaacttctcctacatttcaggtccgttccaaactgctcctatattttaggtccattccgagattctcttttgactggttcatgatctattgctagttgcgcatctcttcttaatgggctgacaggcctgttataaatcttagggcctaattaatgtttacgcacatggaattcaaaagtgcaaattcatattccattatcggtttaaaaagttttagaataaaatgatatatatttatatactactatatgaaacgttgaaaaaacattataaaaagctgaaaattagtagatttttgaaaatgaatttaaatttaacattttaaagtaaaataaataaaataataaaaagtatatgtctctttatatataattttaaatatattttttaaaaatccaaaactattaagacacatttaaatccgtctaacccgcctaaacccgcctaatgaccctctaagctgcttaatgtccgcattgtttggcaaatctactctaccacctaatagaaccaatttttaaaaagtcgaagcggtactgattgaaggaagtagtgacaggctttactcattctattctcttttctctctctttttctgtgatatattatatactttaaattagatttgattttacattctttaatttcacttgatcttagttatataatttgaacccttcccatgggtgaaactgagagaatgttgtaggcaagtaaggttattgttgaagacttagcacaaagtttacacagccccttagacccaaataaaagaccaattttctgttatctcagtctatagtttttactcatcatcagcatcaatcaaaaatgaataatatccttctctgaacaagaccacatacccaagaaaatgaagtctcttcatttgtgtttgctccttttggtcgtagctttaacagttttgagatccgtcgaagcccaggatcaagcaggttcttgataacatgatgaaatttttgttttgcatacaaaaaaaaacattgaattttaatcattctcttgaaaatgttttatattttatgttgttgatcatgaacaggattcatcagcttggattgtgggttggtgcctaaggaaactacttatgtagagatttcgacaaaaataaaatacaaatcagacgcagattacatcgacagtggattggtcaagacaatcgatgatgcatacaagactcagcttgagcaacaggtttgggccttgagaagctttcctgtgggtgaaagaaactgttacaacgtcaacctcacggcaaagagcagatatttgatcagaggaacctttgtgtatgggaattatgatggccagagtcagttcccaagttttgatcttcacattggtcctaacaaatggacttctgttaaaatactaggagtgacaaatatttctatgcacgagataatccatgtcgtacctcaagatattctacaagtttgtcttgttaagacaggaccaacgataccattcatatcgtctcttgaatttcgtccattgaacaaggaaacttataacacgcaaagtggagcactgaggttgttcgccagagtatactttccatccagttcactatcttacgtcaggtaatattttcaggcaacatatagtttactacttatt

SEQ ID NO: 34825 - DNA, 2587 bp, Arabidopsis thaliana landsberg
tgtttctaaagtttttagaagtctgaatatcaaaattttaaaatatttggaacatgcattctacgctttgctccatgttccaaatttgtttgaatattcattatactaaaactaaatgttctatcaatgttagaaaattgtatttttttttagagtgtaaattctacaaaaatataaattatgccgctgtaatttggctaaagagtatattataagaaccaaatctacaaattatatgaaataaagtgttttttttttttttctttgacgcccatgattcttttggttatggacatggaggtgatcatatagaaactcatgattcatctagttttgatcaggatgtagcattgtccggttcatcatttgttcatgatagtcaagatgcaaacgctttgaagacatatatttctccatgtatgaacatattttgaaaggaactaaaggagactagagattctatctgaaacactgtatgttaaacttcgacatgtattattaacaacttgttatagaaatagtgtgatatgatattttttttcttgtaatacctctaaagatgagatccgagcaacaatacgatgtcttgataagctgattaaaatttgtttgaatgcgtgaagcttagtcatgagaaggtgggattgatcaatacattagcgtagcttctctctgatgactcagaaggattaagttgtgaccaactttggtcgaacgctcaaatatgttgaagtttctttagaaaagtgttttttttcccttcatttatgaaggcaattcaaccttttatttatggtaaaactctttaggctatcaacgatgttctagacaaagcttgtagttctcttcgtcgagtcatgcctaatggccatgacagatttgggtctttcaattgtttttgttttagcttttgatttgagtttagaatgctttttatgtaataatatgttgaaaaaaaaaatccatatattaacacccaatagtgcaatgctaatgtaaaattttaaaaatgtgaacgttaaatgttattttggtaatccaaatacactcggtttaatactatcaaactgaaccggaaatcttagaccaagctcaacggcagttcctaatgggctctttagggttgatctcttgagtaatatagcaaaaaattaaatcattaatcagtttattagagagggacgtttctatgtttagggattttgtcgacaactaaggacccctacgtggcaagttgctattagttgagaggaaagagaagaaaaagtatgtcccttgattttttatttcgattgaacattttctttcttgtagtctccagcaatggcgatgacagatgatctctgttgagctcctcatcatcctgcgtaatcattaaatcggtaatagcatggtgtctcgagcccgagtttgtgatcggaatatgcatcaacaattgaaaggtgatttggttgagcatatataacacaaatttggtgggaatcaaactaactactaattgttattccgattctcaatattcatttcttgtaggtttaaaattttagtatttgtattaattattaaattttataaaatagaatatttataattttcattttaataatattttttactataaaaaactcactaaaaatttctaccattaaaccaagaaaaattaagagaccaacaaaatctcttaaattcaaatctcaaattttaaaattaaaaaaattggaaaaaacctattaaaagtttaaccattagggttgctctaataacacagatgggcctgtgagttacgaaattggggccgggaagctggacggttttatttgtaagtcgcgccactcacttttctataaagacgctcccactacttgaagagtctgtgtgtcgtgcgtgtctcacgtctctctctcctctctcccacttcaagctgcttcaaaaccctagaagcttctactgcaaccacggattcttctcaaatcaagtccaataaaccactgttagtgatcggagacatggccgaatctggcagtactaaccctaaatccccatccgttgttcccgattcgactctcggtggactgaagagagatttaagaaactatcacgacggtgatgattctaataacttgtctatcaagaaatcgaagaccacgaagatggagaataactgtcgagaaatcgttcctttggatgtaacaccattgtcgatcgtgccaccggacactccaaagctctctagacagttttggaaagctggcgatgatgatgaagctgcgcctgtacctctttattgtaattgacacttgatctcaacctattgtgaatttcagatctttcttgggattcgaaaccctaatttgtgtgttgcatgcaagtaggtagcaatgatgcggcggttagggttcatcctcaatttcttcatgcaaacgccacaagccacaaatgggctcttggagctttagctgaacttctagacaattctcttgacgaggtttgtatatatttcatctttattcaaaacattgataatatttttcttttagcaagaaatagtctttcttggtcaacttgttttcgcaaatttatagatttt

SEQ ID NO: 34826 - DNA, 8947 bp, Arabidopsis thaliana landsberg
  unsure (1)..(8947): unsure at all n locations
tatggggagaggagttggtcagagatttacgaccatatcggaggataagccacgctnnnnnnnnnnnnnnnnncatctatccactttgcaaagggatcccgtcgccggattgtgccatggattgtgctcttgcttcaagcggttatgagaacttttgcaacgattgttacttatggtggttgtcaaggaaggtctgtcaaatggtctgaaggtgttctccttatttttccatattgatcaatgtttaaattatattatgactatgcggatgtaatttgtttttgctttttgctatataattatagttcttcagctattatcttactatgttgtttaattattgttttaagttgttttcgcactcctggatgtataatctttgtttatgtattatttatatatatgttcttatttttcgaaagtttgtcatgacctttatttatgccgtgtgtaagtatagtatatatttagaaagattgtctttcacttgaattagtttcagaaacataacgtatggcgttacagttaataatcacatttttggtcactttgaaactacccgccatttacactataaaacctcgcgccgtttcaccagttttgctttacgttctctaaaataaatttttctatgatgttcctaactcttttcttctccatagatgaacaagtttttaatatgtgtcaataaccaaagaactgatatgttaatgatatgattggaacttcagcacacactttccacttgcatttccttggatgcataaatgattggacatgtattttaaatatatgtctatggctagtggtgagtctttctcctactgacacttataatttgtttttgaataaattataaacgcaatcatatcattagtttctcaccatttcaatttgtgttgagactatttttaccagaattcgcataccgagattttttcaaatgcttattaatatattcattaatatttagagatgaacaaggtttggatatgtttcgtttatgtagtgaggaggtgagaactcataattaccaatatgattgacacttcaggctacacttttcacttgcatttcttggatgcccaaatgattagacatgtagtttaaatttattattatagttagtgcttagtcttactcattctaacactaataattatcttttcattaatatataaaaccaaacatatatctatcttcattcgccatttcaagatatgacaaaaagaggttcttccacactaataattactttgtttccaaaggcccaagcggactgccactaatttgcctcaccgctaagttggtgcttttgagagtacaaaatcttgagaaatcatttacccctgaccgaaataaattaaattatctacaaaaactagacatttcaagctcaattttacatttatattacatccagcggtaatttacattaatattacacaaacattatacatttttcaagcagaattttacattaacactaaacttctactaggtacttcaagttacgtccttactaattagccaatttgaaacataattatacaataactgtaaatagatacaataacttctaaaatatttcttcagaagttacccccattgtttttgtatctctacaggatttcacaaattcgaagtgatgcattgaagatgtaacacccttcacagtaatgttcgccttcatgccaataagcacactctggtacatttatcctcttagagtaagcaaactcccagattggaccgaaggtatcttcattagctggttcatacgccaatagtgtgtcaatcaaaccttcacattctgcttccaaatcttcagagtaaatattgaacaaaagcctatcacctaagctctcgaatatcatgtcgaatgtagccccggctagatcacccctttcagcacacatttggaacatggcataggccacagtcgccgattcatcatcaggaactatttcatttagcaaagcaagggaaccttgtatatccctttcacgggtcaccaaacccaaagcttcataataaagagcctgacgcgtaaagaagcttctagctacaccaccaggattatttttcggtggctcgagacaaaaagcagttaagatttgctgactttacaatgtccctcgagagtgcaatgtcccttcctcgtttgtttgtgagtatcaccggagctaagtaatatgcgtcgtcatctcccagcttcttcacaataatatggaagatatcatctggtaaatctgataaagacattacttttgaggtttatgaagtttaaaaggagtaaggaaaatgaggtgtggatgagtagacgaaccactgaggacatatttataggaaacaaaaacaaaactgactttcattgtttaacctaaacctatctgggctatagtactaatcaaacatccgtacacgaaaggcgctgtacagatacccgtccgtaaaacatgtatgctgtacagatactcgtccgtacactgtcttacggtacactacgatgctgttcctatagtacactacgtatgctgtacagaaaacaatccgtacaccttcatgtacactacgtttgctgtacagaaaacaaactatatatgttctcttccagcatgtcataataattagttctttaataatcaattcaaacaataatcagttctttcataattaaatcaaacaatatgttctttaacaacccattcaaacaataattaggtctttaataattaattcaaacaacatgtatgctgtacagatgcccgtccgtacactgtcttacaaaacactacgatgttgttcctatagtacactacgtgttctgtacagaaaacaattcatacaacttcatgtacactacgtacgctgtacagaaaacaaactatatatgttctctatagtacactacgtatgctgtacagaaaacaatccgtacacctatagtacactacgtatgctatacagaaaacaatccgtacaccttcatgtacactacgtttgctgtacagaaaacaaactatatatgttctcttccagcatgtcataataattagttctttaataatcaattcaaacaataatcagttctttcataattaaatcaaacaatatgttcttcaataacccattcaaacaataattaagtctttaataattaattcaaacaacatgtatgctgtacagatgcccgtccatacactgtcttacagtacactacgatgttgttcctatagtacactacgtgttctgtacagaaaacaatctgtacaacttcatgtacactacgtacgctgtacagaaaacaaactatatatgttctctaccagcatgtcataataattagttttttaattataaattcaaacaataattagttctttcataattaaatcaaacaatatgttctttaataacccattcaaacaataattaggtctttaataattaattcaaacaacatgcatgctgtacagatacccattcaaacaacatgtttactatacaggaaacaatccgtacaccttcatgtacactatgtatgctgtacagaaaacaatccgtatacctactgtacactaagtttgatgtacagaaaagaatccgtacaccttacacggtgtacagaagcaatctgtacaccgccgaggatatacaaaataataagttataagtcatattaattagttggcatcttgacaaaaaacattctttcgattttttaagtcataagcataagttcaaatctaataaatatacaaatgcatacttcgatctcaagtcctaaatataagtcttaagtcataagccccgaataagtttagaaacacccaaactctaagtttaggaacaaataactagtactcgtcctcacattcaaccaaagcagcatatgtatccatcgcataaaccttccgaatcctaatcaccacttcatccgttagagccgtcatgtcagtgtaatccattccatgagcatgcatctccagaaacttgcagctaactgggccacagtcgccatcgccattgttgtcatatatggaagatgctcgggaccaagcgaagggtttagtattgagatgttcagtgagagctggaattgcaaatcttttaagcagccaaggaagcaactctgtaacaggtttgatcatcaccgaaacttgttcgtccggaaagggggcactaaaagggtcaagaatcagcacattacggagctggagattgattaccaagccaacccaatgacaggacccccagttcataggaacatagacaacatcaacattccttagaaattcagacttcataagaattccggttgatttgccagttacataagccttcattgatgaaccccactcgtagtttcccttgtcttgacgttgcatgaaatcttcatgatgtgtcatcagaagagcgataaaccaagtgtcaattatggtaatccgtttaaaggcatatgatttggcgcggcgtctcaacaacattcccatgataagttgcatatgctgtttgagaagtaacaatatgctttaattttggcagaaggcatgagtaacattgtatggaaacattcaagtatgaattacctcagttgtcacccacttgtccttggttgcaatgtccaaaaagtgtgcattagaaagcttgtggccagtgcagatggtgaataacctgcaaattgatagtaggattagtaatttgtaaagcaaggaagagtgtgttttataacttactggtctgtatcttcttgaagaagagatttaaaattctcaaattcaagctcatccaaagacccaagggggctgtaggcaggcttcttggttcggcttttaaacaaagcacttatcctagcgtccacattatattgagcagtgtctaggtaccgagaccgtattggaacacgcttttgaagaactggctggcgaatgttaatcgtctcgtgaagaaaataggcaagagagacaggattaatggctgacagattgcagtacagttcatctacatcaccaaaaacctagttaaatagaaaaaaacaattatttccaagagggcatatattatgactgaatgtagaacaataataaaagttagtagaatacctgatctgaaggcgccataggagttttgggtgatggcaaaggagaattcgcagtaaccatggggtcgccaacagtttgatcctgaataatagttacaaaataaggttatctacatctttattttgctgctcacgctattgataatctccagtaaggttctagagacatcatagacaaaaatagtaaaagaataagtcaaaactgaatgaaatgaaaaacattaaaaaaactacccaatacgtttcatagaaatgaagaaaatacctgagatgaaggctagggcagaattattggggatgacaaaggagagctcgatgacaccattgggtcatcacctgtttgatcctgaatatgatttgaaaagaatggtgaacaatgttatataagttgggggcaaaaagaaaaggaaatgttcaaagagaagggaacacatatctataccacatctaaatctttaattgggagaggtggctcttgaaaatccccacaaaggttctggaaacaacaaatgacaaaatagattaaggataaggaattgctgaataaagacacaataagaaaccatgagcacagaagtatagttacctgactaatagatttggcatcgccataaccttcagttgttggtaagtttgtgttaaaaggagagtcaaaggatggcgcatgaaaaccaccatcatgaacaacatcctcagaagtggcaggagataatgattggacttctacgcgttgacgcttacgggaaacagaagggggtgacttcttgctcacagaagttttgagtttgcggctaggacgaacacctgacttgagagaggcagacttcgactctataatcttctccatatcagcaactaaattagaacgtagcaaatgtaactgatgagaaaactaatccttcaaccccaccagatcagaatgggttacaaaatcagcagaagctgcctcaccgcgaggatgagaaccatcagcatgcgcagcagaaccactatttttgcttttcctggaaggagggttacaaataggattagacggacctactccacacgacttgctagctgaacgagtaaagggtttgcggggaggaaaggatgactactttggttctttagttttggctgacatctcagggataagatgagcttgtgaggtttcagccaggccaggagaggtacgccggttacctcgagggttttgttcatcattagtaggttgcacaggagtggcatcaataggccattggttaggttggaatcgatgccctaaactaaaaaaaccaagcatatgttcaaccttcggatcatcgttttatttagaccaaggaagttcattctcattaagaactacagagggagtcaaagtgtaggcaacagataactgggagaaatggaaacaagggggttatcatataaatagaatatcaggataaaaaaagaaaatgatggaaaaagtaaaattacttacattcgcatcacactcaacctcaagaacagcggattcacggaggagaatagtgttgcccagctcaacaggagattggtctatgaaattcctcatatcagtaggatcttttatcttgctacacagggccggaatagagttgaggacttgaagctgaagggcaagagggaagccataacaaaggctggttttctgacataaacgtttcttcagttcagctataggttttggatccccaaggtcagggccaaaacgctccattgttgaagagaaagcctcacggccccatgggtaagccatgaaaaactcaggttcatgtaacatttcaacaaaacgagaggttactctaccggctaaccggttgctacatacaaccacaccataaacaatgactattagagctagacataattttttccaagtcgtatagcttcttgttagccggcgcttccaaatcatcttggagcatctgaagcacatcggtgacaaacacaattttcttctcccaaaaaagacgattccaaacacacaggtatgcagcgtcttggtgttcttcaacctcagcttgagtgggaatttgatgacacaaaagaccagtggaaatgtgaaactcgcgcagagaaaaacgaagaggaaacccaccataaaccacccacagctcgttaattttccgggtaatcacttgacgcgacagcattccatgtatcaatttcgctgagtgagagcatcttgcaacagggagtaagaacaatttcctaaattgagaagacattagtatagcccaggcttcagaaccgtgcagtagcttgacgagagaacccaaatactccggtgtggagtagatgttaagccgagcaccctctggcaaaccgtcaacagcgaagaggcgtttaggcaaagtagggattaaggcccaattatcgacgtccgatgaagctccggtggaagacatagccggatctgcatttcaatttgagattccggtactaagcatcaacaaattcacagaattgaaaacataaatcgaagattagggttaagttgaaaatttacctttagtagaatacatcttacttttactacgattacgaggagattgacgttgattcactccgacggaatcaacgaaaattatttttttttttactggatttggttgctcttttttccgtcattctctgtataattttgttttgacttcagagagacaaaaggggaaaacaaaacgacatgggaaaatcagaaagggttaacccagtggcaatttgaaaaatacagagattttcaaagggtacacaggatgtttcaatgtatggggttacgagcatgttactaaattgctagtatgttgcccaaatcaataattaagttcaaataagtgactaaatagcaacttaaccctattttattcacggcaaaagaaaatgaagtaaaatatataaaaaagtaaaaaacatttttattgataaggtgaatatacatttgtgaatgatatattgatagtaaaaacatagtccctcatgaaaaatatttagccacaggaaatgttcttacctactccatttcttatattataattttttgttttcaatttcttaaactacatagaagaaatttattcatctacatttcccaatttcatttaatggctccatatataatgacaattaaccgcttctctttacgcaatcccggcgattaatctcctcttaagttctatcctgcaataaccaataccaacattaggtaaccaaatccaaaatctactaactaaactatttgattaaagaactaatcaagagtgttaactacctcatgagttgacggtcatgagctccggtggccatcattccccggttctcataagcgcgtcggagaagatacggtatagcggttgcgacgggtccaaacggcatgtacttgctaacattgaacccggctctctttaaaccgaaggacaatgcatccgacataccatatagctgtgcaaactctatcttcccgttctgtttatcaatcccgaggtcactcgctttcctcgacgcaagtctccctgaaatcaaaaacatttctacaattagtaaaccatttcactctaactaaagcgctaaaaaaaccgcggttacaatgtgatttaatggcttacccgaatcagcgttatgtgttgcgagaacgacaccgaaaccagaaccggttgatgctttctccatcaggaatgtcatacaatcattgtaacaagagtgagtatcctgaattgtgtcgtggactggcgacttgcaacccagggaatccgccaagctagcttcgctagacatgtaagccctctctacaacttgaaccccataggaacattctctttctcagcattttgtactgcaaat

SEQ ID NO: 34827 - DNA, 12940 bp, Arabidopsis thaliana landsberg
  unsure (1)..(12940): unsure at all n locations
tgctgggagttcccctaaaagatcgtttgtcggggttttatacaggcaggggaagaggatacgagagtttgtgagctgtggcggagaggcactggctggaatttggacagaatattgccttatgtgtcaatggttacaaggttgaggcttacggcagtggttgtggatgagtggacatgcgcccgcgatagaatttcatggggagagagtccggatgggaagttcacgattagctcagcttatcaattcttgactagagatgccacaccaagacagaatctttccagtctgttcgaacgtgtctggaaagtgattgtaccggagcgagtcaagatttttctctggttaggagtgaaccaggtgattatgacaaatatggagaggtacaggagacatcttagtgagaatggcatatgtcaagtttgtaagagtggggaggagacgatcattcacgttcttctgtcccgcgatgaatggattatggcagcggctcattccaagacgtaagcggaactcgttctttactatgtctttgattgagtgggtctatgagaatttgggagatagtagaaccgagtgggagtgtccttggtctactgtgtttgctatggcggtttggtggggttgaaaatggaggtgtggaaatgtgtttagggtggttggcaaatgtagggatcgggtcaagtttattaaggacttggcgaagaaagtcatcatagcgcactcgttgatggctgctaaaacgaaagctggtacacgggtagagagacggatctcgtggactaggccacaagagggatggtttaaactgaacacggatggcgcttctagagggaatccgggtttagctacagcgggtggggtgctgcggaacaatgatggtgaatggtgtagcgggtttgcactaaacattgggatatgttcagcacctttagcggagctttcgggggtgtactacgggttatatattgcctgaaagtataaggttacccggttggagttagaggtggactccgagattgttgttggttttctcaagacggggattagtgatactcatcctttgtcattcctagcacgcttgtgctatggcttcatattgagggactggatagtccgtatttcgcataagtatagggaagctaaccgtctagcggatgggttagcgaactatgcattctcgttacctccggggtttcatgggcttggtgcttgtccggagagtgttttagcggtgtttggtgatgatgtcaatggggttgggacttcacgaaatgttttgttgtaattgttgttttattttaataaattgataggggaattttccctatcccttaccaaaaaaaaaaaaaaatatagcgcgctgtaaccgaaacggtgtaaatgaaattttggaaataataggccgtcgcccgttaaaatatttcaaagtaaaaagatttagaaatcaaattccaagaaaatttgaagtagaaaaatcgaagttcaaatttaaaccgaaacgagagtttaaaattgaagtgggagtatggatatacggaccccactcccccccctttttgctcggtagacgagtgtttttgcaagtttacgcaaaaaatatagcagagaatgcatatatatgattaagctgtacttgttagattataatagataacacttatcttattggtttggacatagagatgatgatatctacggcatggacgatctgaatctctgagattgtaaacgtcgttgtatgaaaatctacatttaagatgttgttcgttagaggagatctcatctttgcgtagaaagagagaagcaaggatgaatgcttgtgatataagtgaaaatgtcaatcaagcttaattaatatgtaagaaagtaattgaacttatcttttatgagggaggtcgtcgagacagaattggagatcgcatcattgatgaatgagtggaaatcttgagcgattgctagtgatgatccattgtcacttgttggtgtaatgtacttccttttgctgatttatagaagaactgataacttccgtttgaaccgttaaactattgatcccaccgttgaatctttagctgatagtcccacgaagatcttgtccgaattttagtcagatcggatattgcctgaggcttctaccgtcttatgaagttgctgtgacaaagtgaatttttcttcctttgctatatttgttttttggtttcggttgctccggtagcaacatacgatccttagtgaatataggaggcagtatccagtgatgcttactctttggctgacttctggtgatctttcttctttacttctctttcctttgaattttcattacacgacatgtttttgtgagatctgaacaacgtcttgtgattaaggaagataaagcagaaactctccaaggcgaggaagggacaatttttcttagatatatgttaagacgagccgattgtagatgaaagacgagcttgaggccgggagacgatcttgatgtccgaggaagaatagagtttattcgtcttatagctgaaccttgtaaaaggttgcctacgtacccttagaaagggatcaagccacacgtagttcatattatgataaacgagctaggccattactggaggaaggtcgtatgtcgagttaggcagttttagggatgatccggcggataagtgacgagttgaatggcttctcgagacgtgcgagtaggtaatgacgaggtcgagtggacgggcaagttggcgagacactttgggcgggcaagttggcgagacacttcggacggacgagtaaacgagctactcaagatggatgggcaaacgaggtacttcggacgggtgagctgacgagctgctctgtgtctctgcgtgtccggcggaatccccctttgacaagacatgctattccgtatttatagcccttctgcgtgtaggacactcctccaggattttgacgagcctaccctcttgacttaacattctgcttaggcctttgacttggatttgggccttgggccaagcaagcccaaatcttacccctaacagtagctgaaatggatcacaacgtacctaattccgatttctatatctagtgtacgtattgatattctttagcaatagttttggaaaatataatctgagtttagtgtactcgttggctttattagttttgaattttaataatagtctattttaaccataagtactagcatatactaaataacttgatctacacaataaaatacagaagattgattctcaaactatttctctctctctctctcacagagaatctccaatggcggctcccgtagtggtcgctcctgcgataaatcttcagcatatggacctacctgaaggaaatgaaggtaataaaaaacgattatattctcagaagcaagatataggggtagcgaatttggggtaataaagaaattgaaattgaaagtatcaagaaacattggtgagtttgggaattggaggaatgtatttaaaattagagtagatctgtgaatttgagatatcgaggtgtatttaaaattagagtagatctgtgaatttgggaaatccaggctacaatctatggaattggtaacagagtagaaatcttagaaaagttatgatctatggaatcttagaacagtgtagaaaatcgtatacagtgttacagatctatggaatcttagaccagtgtagaaatcgtagcacagtgttacagatctatggaatcttagaatagtctcctagatctatggaatttgtacaattaaggcaagatttaaaaatttcagaataaaacagttgcttataatatatatataaatctcatatgtttggttgctatttttgacagatgtagcagctgtgcttcaaacatcaacacagcgctggctcaacgctgctgagtggagcattctttataacaaccacaacctattcccagaatcaaactcatttaccatacctattgaagtagagggactttacagagttgacaaccgctttaatcaagacagcaatacgtggagaaacacaagtgctccctccacttgcaaaaatgctatcaacttctacaatgttaggatcgccactggcttgtacaggtttgatgatgatggggacattgtgatggacgctgaagttcaaggagggtgggtcctttgcagaaaaaccgtgaggaacagaggtgggggggtacttacttttgcacactacatgtgggttttagtgtgagtaaaaactatgcttgagtaaaaactatgcttgagtaaaaactatgtttgagttgatactggaaaaatctaaacgaacttgtagtataaacttctatgcttataaacataagcccaaattagctaaatcatttttaattcatatttttaagatgctacaggtaaatgctacaggtaaagtcatagctacattatttacttcactatactatccaattgagagaataaaggaccaaaaacaaagaggcgcaaaaaaactaatattaaaatatcaagctaggaaagataaacaaagttcaaagactcagatgttaatgaaacgaatgagactgatggcccaaataatccaaatagatcctagattatatatgtcggaagactaatttcaataagtataaacacaagatatttgcggatttatattgttagactaaaatgcaaatgaagtgtgaaaaggtcaagaatatgcaacacttgcgtagtcgtataagaagacattagagtggtcatataaatgggatattaattcagagaagttttaagggtaggaaaaacaaactgtttaaacaaaaaatcatgcttaaaacatctgttacatgtaaaaaaccgagaaattaaaaccaagacaaaaaaaacagagtatgtgaacttgccttcaattgggtaaaaggctggatctgagataatctctaaaagtaaagccagatctgtaaaatataataacaaagaacagattaaattgatgaaaccggacaacacaagaagaacaatccatctttttcagatctgaagtagagatggaaaaaaaacttgccttttcctatgaacagatgactgcggatagcagatctggagaaaatatataaaaaatctcaggttacaatcgtgaaacaagaacaaactgatcaaataagaaagaaggacatatcaaaaaacttatcttttttaatgcggatctgaagcatatgggtagagagccagatcgggtttgagaaatcgaagagaggtaatgattatagcagtttagtgtttctcgatggagagagagagagagagagattgagttttttattttggtgagagacagagaggcggacgagtggtgtttatttggagctttctcgattaacttatttttattctgagttcctgttttacccttgtaaccctatcacatctcataaggtttcgaagacttggcttttgtcttaaaaagttctcggattctcttttttattcgaggaaacaaaacaaataataatataataatcctaattatttttctggaggagagaagccttgttttgggctggaagaatcattgaagtcactcagattagaggacttataaataagccttattgtggagattacttgggctttgttgagaacttatgaagcacatctttgtatttatttcattttgtctatatatgtagagatctatgttaagaagtttatatgcgaaataccttttaaaaaataaatcctatcaaaagtccggacactgtctttgtgttgatttactttgttctcattaggtcttgaagtgcttggatcagtttgtaatgaaaatttaccatttctattcgaaagtgaattgatggttatgagaactcgtatgacgcagtgtttattcctacatatgcatccgaagaatcgtcattcaatcataataatcttgcatctatattatgaggccattgtggtacacgtttgagtcatctctacaagcctgtcttcgatcgtcaattcaagatgctgaagattcatatgatggaagatatgattaaagatggtgaagagaagagtcttgacactttcgtgatatccaggcaacttaccactttcactgatctcacggtttgtctttctacaaggtatcaattactaagttaatctttttgtttagggctgggcatttggctcatccgtgatagttgaatttaaagtgagacttgagcacttaagaggaaaatcaattcctatagcgtaattcatctttctcgctccatcttcctttgtttttttggcatcttaaactatggtgttatcaaaatggcagttgtgcacattgctgaaagttaatcaatggtcagactgtaaagttaatttccttatgtctatgaagaaaacaaaaatttaatccacctttttgggatattattttgttgatcagaagcttgtttaatgataatttttttttttttttcagaaaggatcgtgtgaccattaaattgaaaacggtatatatgcttatacgatgactatactatatatgcttatacgaaaagatgactatactatacatttgtcgaattagatgcttatacgaaaagatgactatagctgagtgtaaaacctggctgcttaatatcccccacatcattaaacgttacttagatatatttctttaagtcaacaactaatgaagtaataaaagacctagaagccatgaatgaatctgcgtcaaagcatccaaaatgatggtgttctcgtactattcgcagtctatctcaattgatagcgatttcctcatcaatccagcgccacttatatccttgaccgtttcaaaaccagctccgggtcgaatcagcgagtcgggtcaacatcacctgaacagaatgttcgcgaggcggctcacttcgttcttcgaaggatcttcaacctccaggtacccaaaatgttacaattagaatctgatcgattcccctttagtagagcattaaaccatttgtccaaataacttccctcatagtctttctcctgattcggactaagttgaaacttgaagtttaggggatgattaaacctttgttgacgttagagctaagaccattggaatagatttctaatctctgtagctactactttgaccataatttctaatagttttgtttttttggtcaaccatgtcttaatcaattagggtcctggctaattgcaagtccttgattcatatgaattgtattcaagtatgcatctcgattgattgttagaatctctttatttcacaatcaatctagtctcggcttgcttatatacaagactatgtaatgtaatttctctcttgttatgtgatcagactgagtcgttatgcggcaccatcgaatcttattcacgtaagactagttctctagatgagtaattttttttggttttgtatatatttgaaaaagctcctccttgcttctttgtccttgccaggagtaatttttgattcagcaatagctaatacattacttcttagctgcctacagtctggtcttttaagtcttttatcttgtttaaagtttgaaaattggtgattttctgagttgctattgttagattgggttattccttgttggctgctctgaatatctcacttagatcccaaatatacttctgtgatataggagttttcagttttggggaagagtcgtagagatgtacatttgctgaagcttctattgaaatggcagaatcgaattcgataccttccgttgttatcaattcctctaaacagaatggtcctatcatcgtgattgataattacgacagcttcacttacaatctctgccaggtttcatttctaacacaatctcaaatcttactaggctcgttagatttttgatgtgaaagcagctgaatttgcattttgttagaaatgtattcaagtatatgcattgtgattgaatgttagaatctcattagttcacaatccaatctactttcgacttgctaatagataagactatgtaatgttgaccatctgttgttaatgtgatcagagtcgttgctatgtcgtgccatcgaatcttattgtcgaaagctcctcgttgcttgtttgtcgttgtaaggagtaattgttgatccagcaaaagctaacacatcacttctttgctgcctaaagtctggtcttttaagtagaatctttaatcatgttcaaagtttgaattggcgatttcctgagttgctatttttgactttagatttgttattcctagttgaaatatctcgctttctcatgagattttggctgctctgaatatctgacttaacgcacatagataccaaatatacaatttgatcatgtcttacttctagttctccacgcagaatagtgtcaggtgcatactatttattgtgatcgttctcttgatatggtttcttctgctttagtataaacaaaattttgagaattgctatctatttctacagtatatgggagagctacaatgccattttgaagtttaccgcaatgatgaacttacagtagaagagctgaaaaggtaagaagaaactatatgcattctgtttaaaacgtaatctggctaatcgactgatgttcattcctttatcattctctccctcttgcagaaaaaatccaagaggagtgttgatttctcctggacctggtaaatattttggcctctgaaatttctcctataattatatgctggagaagtggataacacttttcttgaatttgataggtacccctcaagactctgggatttccttgcaaactgttttggaactcggaccacttgttcctttatttggagtatgtatgggtttgcagtgtataggagaagcatttggaggttagttgcatataaacaagacatcttattttcccgtatcagtgttcaaacatggttttgttctttattctatgcatccacagcttaaatgcaattttgtttgaacattgattaggaaagattgtgcggtcaccatttggtgttatgcatgggaaaagctcaatggttcactatgatgagaaaggagaagaaggcttgttctctggattatcaaagtatgaatcaaaatcaattttttttgtgtgttgtctaatatagttaatcataagtctgtaaaaatgtgtaataaaacaaatctggttggtttcagccctttcattgtaggtagatatcacagtctcgtgatcgaaaaagattcatttcctagtgattttttcgaggttacagcatggacagaagatggtctggttatggctgcccgtcacagaaagtacaagcatatacaggtaaaacccactcaagtgtttaatgtagcttcttgcctcctccattcaaaacagagctcttgaagtcttgtaaaaaaaaattcacagggagttcaatttcatccggagagtattataacaaccgaaggcaagacaattgttcgcaatttcatcaaactcgtagagaaaaaggaatctgagaagctggcataggcttagcctgaatgagaaaatcagctgtgttcgattagtgcttccctgtaataatgtctgccaatgcaaaatgttccttggcatcttaccattgtttctacccggaatgtgtctagttctttcagttcaggacgaatctggaaaggctcgatagtattcagtgctgttggaacataacagtacatgagataagatctaatcagatctcactttcttattgtcatactggctttccttggtctaattcacggttgtggtatatatagtcatcttgcaagtgaacaagtgactagaacaacttgatacggcacattggctctgttcctacagagtacttagaaaacacatgatcaatatagcagctgttcaaaaggaattttctttggtttattgaaaacgacaacatgataagctcacaattttcaagcattaaatttgtacaaatacatgcttatgtagaactcaacttacataaacgcattacaaagacgtgttactatgtactacacaattcttgtaaggagagtagaaaaagaaaactacttttgatagtagatggaacctagaaaagaagagaactgcaagaactagaggtggcaaggcaagcagtcatatggaaggagcctgacaaaagtgtaatggaagtagatgtggggcgatgtcctctgaatcttcttgcccttctccttatgaagactccaagcttccttgtcacaccagcttcgtgatcgacatgacctgaacacaaaagaagggactgagacaagaccaggagtaagatgatcgataggatgagtaagcctttgatgtcacgcatctttgctataagataaggttttcgtcctatggcttgcttttataaaagaagacgtgagagtagttgaagaagatattatttctgcaggacatatttaataacaatttggtgggttgttgattgagaaacgagagataaacatataatgccatgtggacccaagattataatatgacaaaaccatcatcatccaaaggttcaaaggtcagagccgacatcgacctaagtctttacagttctcacattttctgcagtgatatgattaacaaatcaactagtggtacctttaagtcacttgctttccacacaccatctttttatcaattaggagtaaaaaagggttcccaatgaaaagaaagttctacagagtagatgctaacctggaaagatatcattctatttcttggtaggctaagattttgtccaaaatggctggctccacctcccggaaagatgtgatctgaccaactcgtttagctaattccccagtgactcggtccatgtaaaggagatacaacccatttctttcttccaaggcctttactgctttcctcgcatgtactactgatgctatccactcctcaaacataactgcatagaataaaatacaaccaatctcagcaatttttgtgattctttttgtcgcctatgattgtaattctgtatatagctaaggtaggaaacgactattattctagaaaaagagcttaagaaaagaaaaaatgatgtcaaaaataaagagaaaaaaaaagaaaaaaatttaaaactctatcagagccaggtttcgatcctgggacctgtgggttatgggcccacatgtatataatgaaagacttcgattactgaaaatgacaaattgatacaacgttcataaaacgcggtataaacttctcatctacaagagttcaacatgaaactccgacgaacgatgaggaacgattctcagaaaaaaatccaaaaggaaatgataaacaacaaatccaaatcttcttattctttagcaaatgatcctcattagctatatatctctgcgtctcgattcttcctctaacactcccatcaaccaatcttctcttgccacgtctcacctgctactgtctccactcatgcattgccacgtatctaaccataatcaatgcctagtttcctatatcaaagagacagggattgagttacagatgcatggttgggcctatgaggagccaataaatccagattatatccgcttgaatggtatgtgcgaagtgactgagttccttaagtgtcccagatcctggaaatttaagtttataaccaggaacttgagaggttataaagtgtactctagtgttggtctcgaaattctcaaaggccataggtcaagcccaggcccatgagggggtttggaaatagttttcaaccagcaatagacgcgcctcggttagtacctcattagctgcgtcattgccccaagcgcatagatgagtttcaagtgaggttagcctctttatttatagccaagcanaacctatgaagccaatatatgcttccgatgtgggactttttggtgtaccaaacaatataatgtacacgtcgtcacttgagttcctgatatttctgttttgtccatattgaaaacaggtttctaacctaaggcataacagattgagactaattgaatggtaggggttgcgcgaacgcaaaccccctctgccacaaataatgacgtaggatcctcctcaagggaagaccttaggcattgcaccccaacggtatgtgcaatgcggtcactagcctaggccactcgtcttattgatcgcgagtagaccacgtccaggtaagtaaattgttcgaaccgtccgcttttctatatatactctgcgtccccttttcattattttggatctaagcgatgtgggactatttttgtcaacacatcgtcgttttttaagctcctggtttccaacaacgtgccggtttctcaaaactgcatggtttttttgttgtacatgggccggacgttctaggcccagtcaatgtctggtagttgtttagttgttgttacttaaatattgatgaccacagaataaattcagaatcggaagtctgaagatagagtaattgagtaaactgaacaaagttgaagcaatttaagttaagagattgatgatcaaagaatcaaaaacaaaaagagtaacaacacaacatattttcatattgactactagtgttctttccgtctttgttgatctcttgacctctacgacgacggaacatctagtagaactttaagcaatgtatttgcattgaagtctcaatactaaattatcccccaaaacgttatgccaaaaaaaagtagaagagacacaaccttatatttctagcccgtattcataaatatgaaaattaagagagttgaatagatttgtgagtttaatatcatatgatcgatttatataagaaattgttcagagaatatgaaagagtagtgtgtacattttgcatattgcctcaaacacttcttggagctaggtatgaatagtgagaactatataattttttagtatgtgcattttgtttttgtaaccaagatgtttcgagttttaggttcgtaatttatttgggttgtagaccataacatgttaaattagtcttttctccgcttacaaaactcgaatttgataccataaggcgc

SEQ ID NO: 34828 - DNA, 1725 bp, Arabidopsis thaliana landsberg
tgcatatgtcaacccgccaccggggttcttaagaccagatcaggttcacgccaaccgagagcacagatacaccaccgtccagcctcttgccacggagggtacacactactctccccaccgctccatgcccattccgtgttatcttattctggccttagtctgcccgaggcaaggcttacccatgacgaggcatgtgaccagttaaagggtcctcggtcatcaagcctacatcgagatggtccttaatcgacttagacggagacactacaccgagactcctttctcgtgcaagtcacccgaccggtctcagcttaatcatttcaaacccaaaatttggtacctgccagaggtacatcttttccgatattgaacccatcatggccatgatggattcaccatcaagtcttttcttttgaaaacttcccatcccatatgatcagcatcatcttttgtttaaaaaaccttttgttttctaaggcaagactaagcattagaaaacttttgagtaaaacaggtatcaaggaatggtaaacagttctaaggaaggaaatgcagcaattgtttagcactcaactcctatcacctaatgcatcatctcaagtgataaagagtttaaaatcacaaggaaaggggtaaatgcaccgaggcttgccttcgtttataggtgagtcaggctcgaatccgcagatgtcaaagtaaaagcaattccctgcctgatgttccgtaggtggtggcggtgaagtcttctcctcttcaacctcaccctcttgttcgttttctagatatacttgtgtatatatatataagaatgaatgccatgtaatgcttatgagagtgcaaagataataaagatttattaactaagtcttgaatacaactttccttcacggaactccgagaacttagggtttccggagtcggtaaaggagttcaaagggcaggggggttttgggttctagttatcaaacaaagtccaaatcagcccaaattctacccaaggcttctaaataataaaaggagctcatacaaaaattttgagcatttttgggattattacttatcttctaaaaatccagaagcaaggtcttgagctgttttaaatactctataatttcctttttggattaaaaatcataaaactatttttattaaattctagggaaaataaggaatctaggaaaattggtcttgcatttttaggatttttctacaatttttaacatatttctaaagctctgttgaaaaagaaaaaaggaaaaggcttcaacagtaatgggctggcttctagcccagacggcccaagtccaggggcataagcgcccgcgcgcacctggcggctttgcaaaaagggccccgagtttatgactatctgtgaacgagttccttcactgttcctgtgtgtcgctgaccgatcacaaaaaggcccctgtgtttctttctattcccgattggaagtccacgagcggcgctccgcagccgccgcgctccggcgagcatctacgccggtcgattggggcagtgaccggcgctcccgagcggtggacaccaaatcggagctaacgtgcgcatttcccctaacctaattgtacgaatgaccaactacagagctctggccacggtgaccgagagcaatgcggacggatgagtgcgttcccgttgattcatggcggtctaattcgatttaacgggtcggtgagcatcaagagcaagcaaggatgttgaaac

SEQ ID NO: 34829 - DNA, 4814 bp, Arabidopsis thaliana landsberg
gcttgcttcaccttcttagagtccctgattccctcagggatggagacagaagggaacatatttagaagcttcaagatccgtaaggggcttactttcggggtttgaaaagtggcgtcccgagctccgtgaacgcttcttgcttcatgcttatcattcatccaaggttagatacatctcgacctctgttctttaacggttttatcttcataacaataatgccttttaaacgcctacccatacactcgctgttattttttaaggccaatgaaatcatcaacgatatgatcgaatattatgagggccttcttcaagacaaggaaatcgagctggacaataggaacaagaaattctcttctcttgacaaggaccaccaaaccttatctgactctttgaagaagaaccaagaaaagatcaaacacgtcgatctcgttgaagccgagctagcaagggtaaacgaggagtttcatacctactataggatcgtcaacgacttgcaaagagattggttagatgctagggatgaaacttctcactttgaggaagaggctcgaacttccacaaacaacctggaggaactgaatttgaagtaccggtcatcggtcaagttcatggagcatgatttggcaaaatctgccacaaaagctaggaagggagttaagggtcgttgtagcaccccgtatgtggaagtagaaagctgggaagctaagggcaagataaaactttcgtgcaagctaagttccatggaagggtaagggaaagaagaagtccatggaagaagaaaaacttagctggaggacagagacgagaaggaaggtgattatttcacattcgcttcaaacccgtcaatgaagcccaccaagttaaacacaaaagtgaaactcacggaccgcgtttccaaagatccatcgagctcctttcgattcacagtcgtatcttgagaaaggtaatcggatgtcatggcctttgtgcgaaccaaggatgctcggtctagaccgaatcgagaaaacttgatccaggagagtggtttcaaaagcattgagaaccaagaagaaattagaatagaaaggaaatattcggaataggaggaatgattcaatcgtttaaaggatcgagtcgagttttcccgattaagcttctaaggaaaagaacttaagaatcagaagagtttctaatgaaaggaactttagtaatctttagaagaaaggcaaagcaaagttatctaagtgttgggaaagctaaggaagagtgagtgcgagttatatagagtggtgaagggttgagccatgcaaaggagccgaacgaaggaaacttggtgaccaagtcggctcgcttggagccaaaggcgagaagaattggtgccctagttccttggtcggacgccatacaaggaatgcgccatatgtcgttgccatgcccaagggcgttcagtcgtggtatggatttattcaagaaggccatcaagttccttcaatttaacaaaactcggactaagttggagtcagacatcaaggaggctaaaagcaatctgattcttgtgagccaaacccacgaggaggacttttctgaagattaagagattgtcgagctagacaagaatttaggcttctggaaagaccagctcgcctcccttcctatctcgaactttgaccctcaacactttgcacattcttcaccgcgtctcctgtttcgtgaaagacatcgctacggaggtttatctagcgcatgttcaagcaggcgggggggctggagaagttatgcgggtggagagactggttgcatgggctctgccaccggggaattggctgaaactaaatacggatggcacttctcatgggaacccgggtcgggctacagtgggaggagtgcttcgagacagcgaggggcgatgggttcatggttttgccctgaatattgggttctgttcggcaccactagctgagctttggggagtatactacggtctgtatctagcgtgggagcggaaggttccgagactagagttagagatcgattcagcattagtggtggattttctcaagacggggataagtgagacacatcccttgtcgttcctagtacgtttgtgctacggcttattatcaaaggactggttagtccgaatttcacatgtgtatagggaggctaatcagctcgcggatggattggcgaactatgcattttcgttacctccggggtttcatgggcttggtgcttgtccggagagtgttttagcggtgtttggtgatgatgtcaatggggttgggacttcacgaaatgttttgttgtaattgttgttttattttaataaattgataggggaattttccctatcccttaccaaaaaaaaaaaaaaatatagcgcgctgtaaccgaagcggtgtaaatgaaactttgaaaataataggccgtcgcccgttaaaatatttcaaagtaaaaagatttagaaatcaaattctaagaaaattcgaagtagaaaaaacgaagttcaaatttaaaccgaaacgagagtttaaaattgaagtgggagtatggatatacgaaccccactccccaccttttttttttgtggggactagctgaactcgtccggagacaagcttcctacgtaccctttgtagggatcaaaccaacccgtagttcaggttatggtgaagaggccggagctctttttttactccatagaagagttgtttttttgctcggtagacgagtgtttttgcaagtttgcgcaaaaaatataacagaaaatgcatatatatgattgagctgtgcttgttaaattataatcgataacacttatcttagcgttttggagatagagatgatgacatctatgacacgaacgatctgaatctctaagattataaacgtcgttgtatggaaatctacatttgagatgttgttagttagaggaggtctcttctttgcgttagaaagagagaagcaagcacgaaagcgagaatgtcaatcaagcttaattaatatgtaagaaagtaattaaacttatcttttatgaggaaggtcatcgaaacggagactgaattcgagatcgcagcattgatgaatgatttgaagccttgagcgattgctagtgatgttccaatgtcacttgttagtgtaatgtactgccttttgcagatttatagaagaactgataacttccgtttgaactgttaagttattgatcccactgttgagtctttaggtggtagtcccacgaaggtttcgtccaaattttagtcagatcggataatgcataaagcttatacggttgtatgaagttgctgtgacaaattgattttttcttcttttggctgattcagagatgcattgataactttattcagcacaattgatttctcgatcccactggtgaatcattttctagtagcgtcaacaatcattatgtaaatttctagctagatgagacgtcgtatgtatcttccatgatcctctgaagttgctgcggcagagtcattgtttcctgatttctgcagtttggatgattttgggcaaactttgaaggagatttgcggatagagattaacaccaatcgataatccgtttaaagaataggattccctgtaattatatcttcgcaaagagtacttactcgaaccttaactctttctggtgcgtccgaaaaatgtctcgcaaaagctctagctatacaccaaatcctgtttcagacttggcatggatcgaggactttttcagttgtttcctggacaggaagcaagatgaataacttcttgatcttaagtgcatttgacgacccgtctggtgtgggaactcttgagttgatagtgttgaactctgagctggtgatctaaagtgagaataacaatgacgcgatcgaagcatggtagcaatgatgatgttatagtttcccaacctaaaacgagttcaacaatagagacgagattggtctctatagaaatataagccttggggtttcaggatgatgtgaaggttgattctcatatctttccagatcgacaagaaatccatctcaaaagcggctgatctgataacagtggaactccgctctatggttttggccaggatgcgctcgtcgcggaaaaacagtgagaattcttactagactgcaacaaaagaggcaaagtcgggttctttagaaagataagccttgtagcttcataatgataagccgggaaatcgatctgaaagctggcagatatgtggtctgataaatacacatgcttgagagaaacgtctataactcccggaagacagcatagaattaggcaaagtacatctttatggcaagataagtctcttagcttcagaacgatatgtagatgggctcttgatgtgtttttaatcgctgggaatctatcttctaccccaattgttctcgcagttcgagtctgcgattttgagagatgtcatatgttgcgtggaaacagtgctaacgcttagtacacagctccgatattggtgaggttgattgtgttggaaggacaagcctcttatcttcagattgataggtaaacaccttgttatgctttctagatcacaggaatttcgttttaaagttggttgtcctgacagcggcggatttgacaaaaacattgcatccggtgcagagaagcaatgataactcccagtagacaggtcggatcgtggagaggtcggtctggatagaaagataggcctcggggctttaaaatggcatgtatattagctatttattccttctatatcaaggggaatttggtctcgaagtcggagaattggataacagcttctgcgttttagtattttggactgttctgaaatatgatgataac

SEQ ID NO: 34830 - DNA, 3066 bp, Arabidopsis thaliana landsberg
aaggatgtcgtattgatcctttactgcttctcggtccatcttcttttacgagagtacggcgtgttaagtttgacttctttggattctcttagacttagacgattaacacaataacctatttatagagttatcataattattgacaaaaaaaaagagttatcataattatatttgaatcttaaataaaggaatactgttagttatttcatttcttcgaggaaataaaatttacattaatattttctcaaatatgctaacttctatttcattttatttgccttttcttctagttcattttttatagtccaatttctttttatctaacttaataatttactattcattgattttaaactttttttttatcttgtgtaatcgaattatttgttgtcgttccagaaaattgcgtaatcgaattcaatagcattaatggtattttctccatgttttctgttgttagaagccggccataggcgaacacagagtgccatcgtaagttctattttctatttgcttgtctgtagaggttatatggaacatgagatgttgttatgttagctttgtgcttgagctttatgttcatagtgattccttcttactatgatgcttctcgagtagattagttttttgggcagattctttgttcttatgatcttgagaaattaagtaaacaatttaggctcaaagcgttggtgaatagacttagagttgcttgtgttccatattttcagttgtatattttgagttagtttcattggttcaagccaaccattctctctgttttttttttgtaatctgattccgtttaatagatctcatcaaaactttgtttaaaatataatttttctagggttgttaggtagttagccaaggcaaattaaagaacaacctgtgttctgttttgtttagtgatctatccatcatcgataaacctctctatttataagcttcagctttagaatcatgtcaaaaaatgaaccaataagtgaaggcataaagctcatctcgtcgtcaggaaaattacatagctatcaaaacgtcgagaagtagctaactacaaatctctaaacataaatcaaattttcattatgttttcatatcacattctgattttcttcaaaattttagaagatgaacaaaattctgatttttgtgtatacctttgttgtgttaaagaagactacaatattgatcccgtttattgtcctcttagaggtattgggtttgtattctgtccctgttctgctcccaccatgtcttggcatgcacttccccaaaccgttcccgactgtacaaacccggttcgaaaggtttacggttaatcgccaaataaattaggatagtgctgaaaaaatcggttctctggtttacctgaacctgacgcggcgtaggtctctagttccatctgataattgtctgatagtaatgtaaacaccgggctagtcctcttcaatccactcagcttgcatttcactagcactgctcatggaaggtggatcatctctggaagaagttgtggttcttgctgcatccatcggtggtcctccatgataacttcctggtccatagttgctagagccgccataaaagtgatgcgggacagatcctggaggtctgaagttgtgtcttggagtccagtctttgctttctcttgctgaatccatctttgagtacgttgaatctctctgtgactgaaatataaacttgtgttaccctctctggcttaaaagacaagattcatatagatcctgttctgaagaaagactaagggatctaaggatatatgtgtttacctgatcgtcggatcttgcaggcgtttggagagcttggcggttaaatctctgtacattgtaaagctcaacgatcttgtcatagttctcaccccaccaccgttgagcttgccacttatcaaacatctctcggctttcaaaacaagacacaagtaatggttagtttttatctcatgttccagctttgaatgccatgaagatatagagattgttttgagtagttcaaatacctgaaacggatccgtttgagatcatttcctccagtgggaagagaagcgaatgtgatatgaacaccaggttctacttgagccatccactcttttggtccatcatcatccagtacaacatcacaagactgtgcagagatagattctcgatcatttccatatattgaagtgaactttgattctaaccgtccagctggatgatgagaggagtttgtgaagtcccaagcaggagttgaaccagcacttccacccatgaaagggtatggaacaccttcagaggcattgtcataatccggaaatgatctatgtcctttcttcaagggactactagaggaaccagtgcatggcttgcattgtttataagcaccagagaatttcaaggccatatctttaatctgcgtaacatatgcacccaaaaaaaccgattacattcaaaaactttatcttgtttatcaaagtaatccatttaaacacacaagaatgttgagtataacggtacacaaacattataggtagtttcaagcctttttaagtatgactaagtatactttttagcccagggaagtaggaagaggtctactatgatcattattaaaagaacaacaataaagctatgagatctaacataattaaacatatgtattaaaaaaagaaacttcatattgtcttcttagcctgcaccacaatcataacggcccactatttcttttgtttatgttcttttgatttactaaaatagttacccccaccccaaaaaccctttctttatttccttgtctaggtaagaatccactaaagcttatttgagagaaaggtatttagatcaagcttcactagcaatattcatcaaagtatgaccccagtataagctttaatgatagtcctgataattcaactggctacataattcaaggatatgtacaatgagggtttaaattgtttcagtagttgttattgactttcatatgtctagtcacatagagaggaagcaaacactgacatgaaaactattaaagagagattggtgaaagatttcaaaaaatgaagtg

SEQ ID NO: 34831 - DNA, 4654 bp, Arabidopsis thaliana landsberg
cagcctcactacttcttggcattctgcttcaatgaacagtgagtatgagttagtgaagattgaggagagtgacaattttgcagttgcagaggcagttctaacgacaccaacccttggtgtcgatcgacaccatcgcatatatacgagacatcaggctgtgacgaagcagaatcgaccaagctcgatattgatctccaaaatcactcgaaacacattgatagtgtcgaccgacacctcttgggtgtcgatcgacaccagtaccaacctgaggaagtgtcgacgtttgatggagcagaatcgaccgagattgacagagcaggatcgataccatatagtagtgtcgaccgatactcacctagtgtcgatcgacactggatgtagattgcagcgctgaattgtcaatatcctaagaaaagtcgagttgtagcacaagtgtcgatcgacaccaccactcgcgtcgatcgacacacatttttggttgaggaagagtcatctccgatagctacttttcaagttggatcactgctattcgtccaagcactactgtcacgtcacacaatgcacctctcatacttcatccacctcctaaacggctaaggtactcatctcctcctcctaaacctctagatatcatcaataagactttaaaatttccaaagactattttacgtttaagcaagccacgagtttctcgttgagcgcttgttctttctgttgatgattatgcaggaaaaaggagtattccacccatacttgagttccaccctgctgatgctcctctcttcctagatagacctcatacactaattgcttctacacaagtatggatgatgagaggtctttctccgcgatatttactgccaccttctgatccacctgatccccaaactccaccaaagtcaagctattgactcaaaacaagcgcttagtgggaggcaacccactgatttgatttttctttttccctttctttcttttctttcatttttgatttattttttccgctttctctggatttgaatgccactggggacagtgtcgtttaagtctgggggaggttcatactaatattgcttttatttttgtttcttattatttttcgttttgcatttcatttggttatttcttttattaaaaaaaacgttttgtttagtttagttaggaatcatgatctatatttctcttgattattgcctgattgatgagtgttgcaggttcgagtcaatccgactattggaaaatctagatggcaaaccaacagacttgaggatatcctagtttccaactcaaccactaaggttggagctaatctcactgctcttcctttcacctcttcaaacggttatgatgcggacatcaaccttacttcacaaaccgctaaactacaacctgtaccacatcctgtactacatcctgtagcagaagtcccggagggtatcatgacacgttcaaaggctaaacaactgaagaaaatgttcaacttagctgtgcaagatattttgagctccctacagctaggagtaaactggtccgtagcaccccataccagatatgatctaatagacgaagaagagcttgctgaagcattcacccaaatgagtcttgaacgaactactcccccaggtatgaaatatcgtttgacaggttcaaggacccctagaaaccaagagaagactttggagcttcaagagacggacgattagagtgtcacagttgaaagtgattgagagagtcaagatcaagaacaagacatcaaggacatagaacagctcgaagacattgataaagctactcaggaggaaccccagaaagacctctacttcaaggaacaagccagaaaacaagcacaagacttgatgccagaagtacctcaagaagtactacaagaagtgactcagacgacagctattgggcctaaaacgcattttggtaaggtttatttagtttatactatctttgcagatccacacagcccagataatggctagaccatcaccaaccgtgctccttaagagaacttaattagtttccttatttagcttattttctttctaaaaacaatggtttttgtgttttgattttatttgtttccttgttgcgttgttacatttaatttcggcccgaaggctagctgaagaactcttataaagtccccctacagcagttgtacgagttttacctttgattatcaataaagaaccgcattttctcacttcttctctttaagtgttcttaagagaataagcttgttctttgtcttctgtgtgcgattcaccaagaccaagttcatgtactgtatcagagacttatcacatctctgtggtgtacttcaatccgccatcaattccccttgaatcgatcccacacgagagaagcgatcgccagcgtgttagatcaccacctttatcatcccaccttccgcgtggcaagtttggaactcttgctcatcaagtgatcaaaggatggattagctccaattcttgcatcatcatccttttttttgactaatgtttttaaagagttttttgcaaaactagtcattttttaaaacttaattgaaaatatagcatcaatcacgcattggtcaagattttatgttcttttattatgttccaaaatgtatttcatctctacttcactctgattacatttaatctaattaattaaagttgagttgaatttttttttaagaatatagcatcatatatatatataaattaagaaaattgcatgtgaaaggtgagaaaaaacaattttagtgtagagttgttggtgagatgatttagtgacacttagtttagttttcaaccatttgtattttggaaaatttgagtgtataacaaaaaaaaaactttaattaactaactagctattctaactataaaactataatattctatgtataatctataataaggccatatttgccccatattgtaggatacagagttcttttatttattttttaatttattttaaatatttgtctttcttcttcttctattctatcttaataaaacaaaaattataagtatccaccatcacgaagtcataataattatttatcactgtcactgtcacaaccgtatcaccgcaaccacctcgtcaccgtcactattagtgccaccactatcaccgttaccgtcaatatcaccactacggtttaccttggttgcttgggtgccaatgttgtatcccataaagtataatttttttggatcgtatcgatttaactccatcatttatcattatcactgccacaaccatatcatcgtaaccaccaccgtcaatgtcaccgttagtgccaccactaccattagcatttaccaccaagtcaccatgatcatttatcactgttattgccacaattatatcgtcgcaaccaccaccgtctacatcaccgttagtatcaccactaccattgtcttcatcaccaccaccgataccgtcaccactcaccaccaccaccaccggtactgacaacgtcaccactacggtgtacctcggttgcttgggttgccaatattgtatcttataggctatagtttttttggatcatatcggattaactcaattctttgtctactgttcgttctatactatttagtttcattctatattattgtatttgtgtattttagacaaatattattcattattttaataatttgcatcagatttcacaaatttaaatcatgttatacacaccaaaaaaatctatgttttactaaaaattgttaaatgatttaatcagttatttttatgaaactaattcaacattcaaatcacttggggaaaatatcaattttgccatgtcatcattattttctctcttcatgtcatcattattatctctcttcttccactcttatatattaaagaaactagggttcatccctaggggtaaacccctttattcacctccttttgcattaaccaataaaaacataccatgtcaaatcctatttaaattacataataaattaaagctataattataaatccaaaccgatatataatctcgtttaattacaaaatctaaaccctaattctcctttgtaaacccaaaccgtcatttaatcgtaaaaaaattaaaccctaatcgtattttctaaaccctaattgtaaaatctaaatctgtttataaacctaaaccaatatttaatccgtttaattatagaatctaaaccctaatcgtatttaatcacagttggtctcaaggcaagacgaataggtttgatcttcctaggtaattatattccattcttcttcttcaatttgtatactattccttgatttcttccagtcacttccagaaacattgaaaaccctaaacctaacaagccctcccatgtgttttgtgtagagtttgtcgcaatttatatgtctccgtatcttgtagtttgtttctgtaaacactactagtcgatatctgttcatatgagaaatttgactagggtttctcgcaattcatctgcacccttcgatttttaattgacttgttcttaaatttgattagggtttagattagttaaaattaggtgacgtaggaggcaagaaatgtaagtgtaaatgatgacaggcgcttgagttttgctggttaattactgaatttttatggccagctctaagcatgttaaaataaagattgtgc

SEQ ID NO: 34832 - DNA, 5643 bp, Arabidopsis thaliana landsberg
ggaaactcaacgcaacaacggacctctatcgctaatccgccatccgttccccggataccaggaagcgacctccttaatagtccccaagcaccggtcgatccgcgtaacgtcgtggatatggaaacattccgcaattacgcagcttaaacaaacgtgaacatggctcaaatgcattctcgaatgcacttagcagtgagcgatgccgttcacggataggatcgctcgctttcgcctccgagacgtcgggagactttgtttcccggagtgcgacggaacgagcgacccaaaggctcatctgagatccttccgtttcgctataacacgagcgtacctgacagacgaagaaaacgaagcaggtcattgccgtttcttcgcagaaaacctcgtaggtcacgccctcgaatggtttgctagtcttgaagggaactccattgataccttcgaccagctcgccgccgctttcttaaaacagtattcggtacttatcgaacagaggacgtccgaagccgaccattggagtctcactcaacttcagaacgaatccctgcgatcttacgtcaaaaaattcaaagcaatcaaatcgaaaattgcaaacctaaacgaagaggtagccatagcagcccttcgtaacggcctttggttctcctctaggttccgtgaggaactcactgttaggcaaccagtctctttagacgatgcccttcacaaagctctccacttcgccaaagccgaagaggagctcattgtgctggccttacgattcaaagaatctaaaacgcaaaacgctccccttgcaattaagaaacccttcaaaaaggagaaccacacgcaggggcagcataccttattcgcaattaagagaatgcttcaaaatcctaaacaaattcgaaatgaaattaaaccccgagaaatgctctttcggagttccctcaggagaattcctcggatacctagtaaccgaaagaggcatcaaggccaatcctaagcagattgcagcattgatcgacatgccatcgccaaaaacggcacgggaggtccaacgactaaccggccgtatcgccgccctcaacaggttcatatccagatctaccgataaatgcgtccctttctatcagctcctccgaaaggataaaaagtttgattggaacgaggactacgagcaagccttcaaataattgaaagcgtacctgtccgaaacacccatactcgcaaaacccgaagaaggagaaccgttgtacctgtacacggcagtctcccgaaccgcgataagcggcgtcctggtgagagaagatcacgaaggacagaaactgatctattacgttagtaaaacattgatagacgccgaaactcattatcccgcaatggaaaaactggcactggccgtagtcatgtccgctcaaaaactgagaccatattttcaatcacatcccatcgtagtgatgacgtctcaaccaatcagaactattctgcacagtctgactcaatcaggtcgacttgcaaaatgggctatagaattaagtgagtacgatatagaatatcgcaccagaactagcctgaaagcacaggtcctagccgactttgtaatcgagctcccgttagcggacctggatggaaccaattccaataagaaatggctcctctacgtcgatggctcctccaaccgacagggatccggagtaggaatacaactcacctcccccaccgtggaagtcatcgaacaatcgttccgactcggattcaacgcatcaaataacgagtctcagtacaaagccctcattgctggcattaagctagctcaaggaatgggaatctgcgatatacacgcccatggaagctaaagacgagcgcatggaagcgtacctcaaactagtcaaaaccttgatcaaacagttcgaatagtttgaactgaccaggatccccagaggggaaaacacctctgtagacgccttggcaactcttgcctccacgtcagatcctttcgtcaaaagaattatcccagttgaaggaatagaacacccgagcatcgacctaacggtcaaacacgctgggacggaaacctcgacaacttgcaacttcacgcgagtaacctgaagcaccaccgccgcagctagagctctcgtagcagccgcggaggtaagtgcagcggagctcgaaacccccgaacaacctgccccatatgaacctgaaccgtacaacgactggaaaatcccaatcatcgattacatcgaacgagggatcacacctcccgacaagtgggaggccaaaaaactcaaagcccagagtgcaaggtactgcatcatggaagggagacttatgaaacgcagcgtcgcaggaccctatatggtgtgtacctatgggcaacaaacaaaagacctcatgaaaagcatgcacgaaggacaatgtggtagccactgtagtggacgtaccctcgccctcagaatcaaaaagcaaggctacttctggccaacaatgctagccgattgcgtagctcattcactcaggtgcgataaatgccaacgacacgcacctactcttcatcaacctcccgaggaaatgtcctcgatatcttccccttacccatttatgaagtggtccatggacgtcgtaggtcccatggaagcctccggtaggaagaagagactaaaaaacctgctggtcctcaccgactattctaccaaatggattgaggctaaagccttccaacaggtaaccaagaaacaagtcgaggacttcctatgggaaaatatcgtatgccgacacggcataccttatgagatcgtcaccgataacgggactaacctcacctcgggcaaaatcaacgcattttgcgacaagtggaagataaatcttacaacatccaccccccgttacccacaaggtaacggacaggcagaggccgctaacaaagctatacttagcaacatcaagaaaagacttgattccaaaaaatcaatgtggtccgacgtactccatagagtcctctgggcctaccgaattacacctcgcaaatcaacgcaagaaacactgttctctctcccctatggcttagaagcagtaatccctgttgaaaccatagtaccaagcgtgagaaggaccgccagtcctgctaactcggacctaaacacgcaaatgttacaggaaaacatggacttcatcgatgaacgcagagatcaggcaatgatccgagttcaaaactattaacaagctgccgcccgcaactataaccacaatatcaaaattcggagattcgaagtgggagagctcgttctacgaaaagtgttcagcaacaccatagagctaaacgccggaaagttggaaaccaactgggcaggtcccaatcgaatcaccgaggtggtacgtgacgacgtctataagcttgtaaaagttatcatcggagtacctgagttacggccttgtaacgccatgcatctcaagaaataccacgaataggtactcaaaaacaatcgaactatgataaggcttgattccttggcagggtacgtaggcagctcctcccaagagcgcagccaccaattcaatcaaatcaaaagggcttaatcccctaaccaggtattcaggcagtcacctccgtaaatgcaattaccatctcaacccttctatctgtaagacaaaattttaacaagggaaacggacatcgcatctctcatcaacgaagatcagctgctcacctgacagttcaatctcccttcagtatcgagcaggtccctgctcgatgaccaaacgccagatcgtcgcttgctttacctccttttgtacttaacaatttcgagataagaacaaaagaaaattttgatactcattatcatatttcgcaaaaaacaatcatttacactatgatttaaaactcattcgtaatcttacgatacccaaatcccaacacccgaatgttggcggatccattttgtgatctcccttccaaaaagccgatagtgaacctcatctataaaaacgcatcacttcgacttcatcggagctcacctactacaaccatatctaactccttcctttactatcaacacataacatactaaaaaaaagaagaaacgaaggtttcattcgcgatatggcgagaccacaagcccagctcccaaaatctggcaggtcccttgtgtgacctcacttcaacaggttcccgagataaaacaactcaaacttacttaagttttaacctacgaagaacataccatatcacatccgaaataacttggactcaaaacaagtccatatgaggtgatcatacaccaaaatcgacgaagtatcaacactcgaacgaaagaccaaaaaaaatacttgctaaaaaggataaaagccttcccaggcacccaagtacttaaacgaacaaaggataaaagccttcccttgctctcaagttcaaaaagcaataaacgaaaggataaaagccttcccaggcattaagtctgaaacaaaacgcaaaatcctataacaagcaaggcacgaaagtgatcactccctcgattctccggctggcgtagcaaagacagtaccagaaccatccgctagacctctcagaaacgcgtctttgttgctcccgaactcatccaagccaattggcgtcccttgctcgttgacgtcaattggacgtaccaccgaaatctccaaaacatgcgggagatccaacttgcttagagtgaagtctgatacctccttcgatttgcaatgcgcctctaggtcatccagctctgcttgcagccgaggtctctccacggtcaaatcgatagcagcctttgtgatctggtcgatcaaagccaagttcgactccacctcggccgcttgaccctccagcatcgtgtactcctttttggcgacccacttttccttgatcccagccagcaacctcgaatacgcagcggccagttcaaccttagcatcatgaaccgccttcttcgctccttgcgcagtcgaagtcagttccatcacccttttggagagctcctccctcctctgctccaagcgatgaatctggtttctcgtcgtctgcttgccagcctgcaatcccctgatttccatctccatgagcccgatcttcttagcataacctttctcgaggtctttcgaagtggacaactccattttcaacctctcgatctccgcctgaaaccatagtcaggtcagagtcatcgtatcatcgataaaatatatacaaacaagccataaccgaggcatacctggaacgaaacctcacgctcctgaccagccttcacactcgttgtcagctcctggttgagggtcttcccttcttcgagctcgctcgccgagggaaccttgctcagacgttgctcatagagagcgaccagcttgttcgtggcagctatcacttgccaaaggttagagctgacataagaatggaattagaaggaggcagttatcaattattacctggccctccttcgccatcatgtcagcataagccgccgcctcggccatgttcttcactccgctcatttggcagttcctccctttgatgtggcgaagcaggttcgccaacccggcctcgtcctcaacgatcggatgatcacggtcttgagtgtaagaccagtggaaaggcctgcttcccgcagacccccaccagaattggaagactgtctcacctcctgagaccga

SEQ ID NO: 34833 - DNA, 3475 bp, Arabidopsis thaliana landsberg
  unsure (1)..(3475): unsure at all n locations
tccattgtactagagtttgtgtctgtgcccgcaacaaacacatcctgtcacaaaaataggtaaactgatgatatttgcatccaaccaatatcttaatcttaccattggtgtgtgtgaaagacttacgagaagcaagtgtttgagatcattcattgttaattctgcttcgttttgctgtgtgagatccagaagggagtctagcatatcgatgcttgaagcctctttannnnnnnnnnnnnnnnnnnnnnnnnnnnnnnnnnntcgagcatcaatgaattcttgaaaaaccctaaacaatttctctatgcagagcaccgcttttttccgggtaccttgcaaatcaagaaacctcatatactggaaatagtctcctacgttgggtataccggcgatctccgtcaggtgaaccaccgtgttgtgaaattcgtaagacgaggagttagagtcatacgtcgctaaatctactgaaaacagagcatttgagatgatattgaaagatgtgacgaaggaagcacgagccaggtcaatagcttctcctctctcgcgaaattcatttactaaactcactagtacctccacctttctcattcttaaagattgaatagcatctaagttttgcggtgataacaaatattttgttattgttttcttcagaaacctgacaatgcatacatacagaactttaatggagttgtacgtagctaatcacttcacgtgtgtatagatttaaagttttaaattgaagtttagtacacggatgatatcaacacaaagagagttaaaaagaaatgaaatgttgatcttagatagagttagtacctccaacgagcagaggggggaatccagacaatagaatgtttatggtgatcaaaggctcgaagagcgtcgttaaaggttcgagcggacatgacatggtcgtgtgttctaagtgcctctttagctgcttctggtgaagatataaccactgcggttaaccttccaagcttcaaactcattataggtccgtacgttttcgaaaaggcagcaagtgaacggtgaggattgaatccgagttggaatatgtttccgaccaatggcagtatcggaggacccggtggaagcgtgccggtgctagagcttctccgcgtttttgcggtagcaaagaagaaaaagaataatgttaagagaaaatagagaggcagagacatgccttgaattagtgagaggtccattggacgaccacttttttctttaggttctactctccttgtttaatgaaattggagagtgcctagaaaatataactcaatcatgcattttatatccatgaatttaagttttttttctaatgaatttattcacaagtttaaagatattatctaaaatggagaaacaagttctcaaaaactgtcaatcggttgcataatgtatatgtttattgctgcttataacacctacaaactatctgagtttctaaaaatttgtttttgtcatgcccacttatggaaagtttgaaccttacatacttgcctaaatttcttacaaacatgggatttctttttggtacagactaattatataaacaatgagaacataatatgtaaaatagtgagttgtattagtctcattaattggattcaaaacatgcaagaaaaaatatatgattctaaaactataatgacacatgggagatcaagacaaccgcctgccaaacttgtatgtagccattactgttcatctgttaaacctcacattaatttcattcattatactattaggcagcttaaccatgtgtataggtgtacgttactctctttatttactgtttagctgtatttgttctgatgttaggttaagttgctcgacctggtttgctcctttaatgtgcatctcttgatatttgctaattaacgagtgacaacactcaaattttatcttcttactatcaactgttactacatcttggatggtcatggaacactaataaaatctcctaggtataaaaactatgaaacataaagaacttttattcatgtaacggtagtggaaagttagggaccacggtcacgggtcccgacaagtgttggctataacgttccggctagcaaacagtattatttaatgataactattttttgtagttttctaaaggaggttaagtagtggaagtcacatgagcaatttgagtagtagtcgtcgcttcttcttcttcttcttcttcttctccaatctccattttatttttggaaaaaatacattaaaagtacatctgaatctgctttaaacctgcaaaaggctttgtgtttgacgctttacttctttgtttatatatttttccatagattcccttatcaagattccaacgatgttaccaaagtcaaacccctaagtgcaactaaccacttctttattagccaaaaataaaaagtaaacaaaccttgttgttctattaaaactaacaaatcacccactaacatcaagtggattcacgaatgtttctcacttggatagttctctaatgataatgataacattaggtcattagctttgaaccattttttttctccctcgaataaattaaaataaataagagatggtgccagcgagtgaaatgattttgaacgttagtgacgtgatctcactcttttgttttgcaagtatacgttactcgtgcgtctaaaaattgggtaaaagtaaaaccaaaacaaaccaaacaaaaaccacaataagagtcagaccaaagcgattaagggcaaaattgaaaaggtcaaaatcccatcacccgaaaaagcgacctgaaaaatgcctccttttcgctgacgttactaacacgtttgattattacaacaaaaacaaatctttttgtgtttaacacaaacattgtattttacaaattatacatatgattttacaaaaatagctgtacgctttttgcttctttttaagaagctaaaaaatgattaagtttgatattaaaattgtgcgcctaactaaattatcaaccatcttaaacgatataattagaacctagacaatcaatacaccattttactaattactactaatgttataacaagattgaacatctaatataacattgccgaccagttatgcacatggctagtcgatcgaacaaatccaaattaatcagacgactaattgctgtttaaccgatggtctagccaagaaattggttaagctcgaacaacacatgcatccacgcgcttcttaaaaggcgagtgaggttgacttcaccatcacttccccagttaaatttcgtaggtcccaccgtggacctcttcagaaggagaagaaggtttcaaaacaaaaccctcgtgaatctcacctcaacgcgccgcgtgcaatcacgctccctcattaaaatctcacgactcggtgactcaaatctatccctcaccggtcttccgctaaacgacgtgagcaataatatccgctcacatgactgtcacaaatcacagtcaccatcccccattta

SEQ ID NO: 34834 - DNA, 4405 bp, Arabidopsis thaliana landsberg
tgccaaatacggacctaagaaaagggggttacattataacaactttcctcataactttgaacccttcaatgcaagcacccaaagcaacgaataagtattttgcatccacttccacatatgatattgtcccgggattcacctcctttaatacgtgcagataagagtacaagtcggtgtagcttttttcaggactaccacgcacatcactaacgtgttgtcttttccctctccatgcggtagcatacgagcaatgcaaacccattcttccccgaacaatactcattatgcttttaggtggtggagtttgaaactcacctggataatcctcatgcaaaatagacgcgattaatcgtggtgtgccggtatgtttacaattgcttgagttcttatcagaccgcttgcatgtgtgcatcttcctgtgaactctaacactaaaacaatctgaactctttacttttgcacatcgtatataccattgacaacctgttgttttagattgtcgacatcgcaacatgagtcgctgcggatctaacactatagatgcggacgcaaaacaatatttatttgcaactatgttaaccaaatcttgcacgacctccttagaaacaaattcttggttcaattcaatccccgttccatcttcccattccttaacactctgacttttctcactactctgacttacttcaccaacacatggaagctcatagtactcaattctaccatcaacaccattatcttcagcaacatccatacggctatccacatgctctctatcttcaataactacattctccatagcctcttcaaaaacccggttatccgcattctcaatagcctcttctacactattagcctcttcaataatcggttcatcattcacacaattacctcctgcagtttctcctctaaaaatcgtcactactccaccattctccacatcaaatgcattcaactcctcagaattaataccaactgaactttttccctctacccttgaattttgtgtccaccctctcagattctttatttactacctccacgttcaaagttggtctaattcccttagcattcactaccgttagataacctaaaaagtcatcatcatctacaatagatgtatctctctaagatgtgcatagaacataactcaatttcaccttccttgaggtttcatctattccaatcttcttgcatatcttttctactaacatagagtatgttacctttgacgttctcaacaatacaccgcttaaagaattgtttgaaatccactcatgctcttctgaataatacccattgtcaaattgtatgaatgtgtgcttgttcttcatcgtctcctgtaattacaaataaattataaaaacacaattacgtaatcattcagatttagacataattgtacctatattataactcactaataccattcacctgtcctattgtatctcaataaaacatttgtaccgcttatactattatatctcagttttaccatttgtcccagttcgtcaattctgggtttcacaaatcgtaaatttcaattgaacactccctaaactctctgattcaaaacgatacaacaacccaaaatgaacaataaacaattttatgttattaacaactaactccaacaagaaattcacattaatctacatatcaaaacgagatcggatttacttttgccgtagaagaggaagctcactttgggagcagattatcggcttgaaagctacggcgatctcggaagctaactcgccggtgaaattaaagctcaaatcgccggcgaaatcggagctcaagtcgccggcggcgaagtcggaaaaaatcacatcgaaaggagagtaggttcgcgattttggtaacggccgttattcttttttttttactaaatcatttactctttattttaaaattctccctcaattattgtacatcaaggagtggtatttagaataaaagatgatacaccagaatagttttttcaaaatagtgacagaacgtggctccaaaaaaaaaagtcgctttcacaaaaaattgcttctttacgttgtttccaatagtcacggtttagtggttttcaaaattaaaccggaccggctatttaaaccggtttgaactgacagtgttgtgaaaagagaactggtccactttagtagctggagacctcctacactatgcatctgccgtgagtgttcttgatgtttcaacatcccacacaagagtctcttgtttccacaatgatgaagctgagttttcatggtctttacacatataaattaattagttttctgtgaactgaattgttttgtacatactacaagaaaatttatttagggtatgtacaacattttatttgacaatcctagtcaaacaactctcatcaccctactatttatgtatccatctttctctgttatttatgtatccatcgttgataataatacagaattatataacggatgaaatcataaaattaacaatcaaaatataattatacaatattaaatattaaacaaaataaagaaagttaacaaaacaaataattaaaatttaatttaaaagaaacatatgttttcttttataagaagcttaaatattataaacatttaaatttacacactgggtgcaatcctagaattaatgggtttgagtcaatattaatatattatgatatattacaggtgaaattctaaaattaacaattaatatacaattatacaatcttaaacaataaacaaaataaaaattaactaaacaaatacaattaaaatttcagttataaaaatattgtaccatatatttaaattaatcaaaataataccatatactatagatcatccttataaaaaatcaattttcttatgaatgtacaactcaatgacgtaacattatgaaaaacaataattaacgagtctactaaattaaaaaataattttgactaatttttgatcatgtttaattctacaaacaccaatatttaaacaatcaaaacccattattaataatctgcacatgaatcgttgaccatatatacacacataataatcaatgtgcatataaagaataaagtaaatgtatgtattcaataatttaaaaacctggaacaaagaattcatagtttctactagtttttcagtgtttaaattaaatgatgttgataaaacattttagttaattttctgaaacaacttctttaaaaatagagaaacctccagcataaatttagtttgaataaatttaaattttatgattttatttactccatttgtgtttgacgaacagtccaagtctagtataacacagactgatatataatttggttatctacaacttataatatgcatctactttgaagtaattaatcatatgtcaacacatactctctccatattattttaaatgatattttagagaaaaaatttagtttcatttaaagtgatgtttttttaatttttaaatgtatataatattttttgaccaataatattttatgatatattttaattattgattgaattagttataattaataatactttatatgaaggagataaaattaaatgaaaattttgtaatttctaaataaatgcgcacaaacaataaatttgtcaaaaaacaaacattggggaaaatggtacccacacccaccataagagagtaaatgggtcggatccaaaggacagtctcgtaactgacaaattcacgccacgtcataccaacaaactgttgctgatccaaacacacgccgtcatttagcccggaagcgcgtgacatttcacgcgccttctctctatctcacccaatcagatcgttttaatggttgtttgtttaatcgatcttcttcttcgtcaagtatctcaaaatcaaaaacaagtttgcttcattcatacttcaaattctctcttcacattctccactctctgcttatgttaacgtagagagagacggcgacgtagaaggagtaggaggaggaggcttcgtcgacaatgcgagaatggctcagtatagacaatcaggaacagagaggtttttgggaggtcgaagcggttacaatccttatgtcaacggtggagcttcgtcagatcacgtagcgatcgggatccgtaacggcggtggtagtaatttcggagttgtaactcagcacgggaaagctagtcgatggcggcgatctactcgattagataggaatcgtcgttgtggtgttggctctttggtgtttgttctttgtgttgtgctcgttgtttgtgtctcagcttactattatttctctggttatactaatttcggcaaagatgataaaggtcagtgttcgatttctctcgagctagatccttgatttgagtatgaatgtttagctgataggaattggattcgagaaattgatggttggaataggataaag

SEQ ID NO: 34835 - DNA, 2966 bp, Arabidopsis thaliana landsberg
tgagcgcattggtaattccccagtcttaggctgatataagttctcttttggctcttgttgactagcggaaaaggcgtggaactgatcttttaggcacttttccttcgagctttagtctccgataagactccctgatatgacaaggtctgataggtcctgattctttcctttccgccataacaactcgagctacagataatgtattgaggttcagtaaatgagctttgttggcacataaacaaaatcattggaaatttttgcactggcttacctgtttcaacgagttcaccaacgaacatctttgcaataccacacgcaacaataatcattggcataccaatcttctgactaccagtgacacctatcaataactgcattaacataaaagctaaatggttcatatttgcaatgaaacaaaattaagaatgttgataaccacaaatcatataacatatataccttcttcatctgtggtctttgaagtgcagatctcctaaaagattcatatctactcatctgatcctcagtgaattgcgataatatggttctgaagaattcaacaaacaatcaatcatcaaagaaacatgaagaacaatcaaaattctacaaagactcactgcattttggccattttagcaggatcagaactagttggatatttagtaagctcaacatccatattctcttcctcttcttcatcatcttcatctttatctttgttcttagcttcagtaacaacaacagaggttttagctttcttcatcggacggcgaacatccacaggtctctcatcttcatcttgagtctggtcgatttcaattcgtccgtcttcactaccatcacctcctcctcctcctccgccaacgggtgattccggtggcgattcctcttgctcttcctcaatcgctgcttcaaacggatcctttgaatgcttcattcctgattaaaacctaaacgaaaaaatcacataattgagatctcaaattagggtttagaacgaagcaaattgctacggatcattgacgaaccttgaaggtgaaactcagatcgaatttcaagagacacgaatctctagaccgttgttaacaacaactgggagctccacaatcttccaggcggagaggaaaattcatcgactgtgttcaatttcaagcttttctataggagtgtagcgactgttataagtcggtttagtccaatcaattggtggatcaaaagaaaagatctgaaccggtttttgttaaaccaacccaaaaagtttcgagaaccacatcattggatttgggctgggctcagttcaaaaccactgaataactaactggtttttttttttggaatacaatgttgggataacgatttacaactagccaaatgttataaatcgagctagacaacaaaattaaaaatatcaatgatagtgaattggatactaaaaagtaaaaacactcaaatgctaactatttctatagatattggataatcatatgttaaatcaaatgcttgagtgatttcaacatttttctttggtcatcatgatttttataattccaaatgaatcaaagaacagttatctattttttcaaatctttcacataattcataattttctagcaaatgttatttagttttgcttgatactttatgataggaagatataatgctaaccctttttttcctcctcaatttcaatataaactcatatcaccaccaaaccatcattacaaattctaaaaacaaaactctatgaaacacataaaacagaaaaatatatatttagtctcttatatatataacatcactgcatttagaaagtattaggctgtttagcctgagagatcatctggacaacctctctcatggtcggtctctcaacactatgttcttgcacacatagcattgccacaaagaacagttccatggcctctgctaatggaatattgctcaatctctggtcaatgatcttcaccacaccttgtctgttacagtttgtttggatctttgaccattgcacaatgtctatcccttcttccccaaaattatctactggttttcgacccgtaatcagctccaataacactactccgaagctgtacacatcgctcttctcagccagtcgacctgtgcggtaatatctgcaagacaacaacatgacttttactctataatcattgaagaaggaatataaagtttcagaacaagtgtttacgtacgtgtgtgtatgaaaactaataatacttactcgggatcgaggtatccaggagtaccagcaaccagagtggaatcataaggttcgcctttaacttggaaagatcttgagagaccaaaatcagcaagtttggccttgaaattctcatctagcaatatgtttgcagttttgacatctctatgaaccattggtggtgtgcatccaatatgtaagtactccaatcctatgcaatggagtcatctatattatcaactaaaaccaaatatcatgtccaatagattttaacttagtacggacctagtgctgcctccaaagctattcgtagtcgagtactccaattgatgatggacttacctccttttcctgtatattagatccaattcaaattttcttgagtttcatgaactagtgcttcaccatgaaatcactaaaaaaaaacattactacctgacaagtgttgttttaagtctccattgggaagaaactcatagatgagggccaagtgatttccttcatggcaatacccaacgaggctcaccaaatttgtatggtgaactctaagaagaagatcaacctaaggaaagactcatgttatgatgatgttgaaatctgtaacctttttatatagttatagttgggaagattacagagaaacatggatacctctgctttgaattgcttatagccttgcgttgacaattgagaaactttaacggccacctgttcagaaccctttacagtaccgtgatcgaacatgcca

SEQ ID NO: 34836 - DNA, 1979 bp, Arabidopsis thaliana landsberg
aaaaaggaaactagaacctgccgttgttgaacacgcttgtatatataaccctaaagcttcacaaatcctcttctctctcaatttgctctcatcacaattttcttcttcgctgtgtaaacctcttctgattttattttttttgggattttctctttgcgtttcgaaacatgagtatgagttttcgtcctgaagtggaagttcacgtcaccaacggaaggaaactctctccatcagaaccaaactcagtcatcatacgcctcaaaaccaaatctgtagagatcattattgaaaaccaaacaaccggtcgccaaaaccgccggactcaggtttcaccaccttttctcatcgatatcaatctccgtagctctagtcacgaccacatccgaacgcttctccacgatcgattagtcggctacccctttgagagttacttgtgcgatgacttagccccaaagatctcaacggctgcaatagacttaggttttgggcacaacggctttaccttgaccatggccgctacagttacttaccggaccgtctccgttatgtcaaacgacgagaaatcattgaggatggttctgctagggagaatgaaagcagaggaattcaagagtttgaagatggaaacagagccgtgttccatatgtctcgagagtctagtctccggtccgaaacctagggacgttacacgcatgacttgttctcatgtcttccacaatggctgtcttttggagtggctcaagcgtaagaacacttgtcccctgtgtcgtactgagatctacgattgaaaacattgaaattagggtttcatgtaaggattagtattaaggtttccaatagaagttagaaattctagttttttgtcacatgctgtaactagttgaagacattgaatgtaatttgtgttttaagggttttactcaattagagaagttttgtgtcacaaatcttgtcggttttaagttcatttgcaaactcttaaatccttaacaatataaccagaacccttcacatcaagctgttgctctgaaatcaaatcatgattcctatgtgtcttcttcaatgtgatttgtttcacctctcacatgaagtccttctgcagtgtctttattatctccttctgcaatttcaactctttggataatacagcagaaatcactttagctacttcagcatatttgctagtcaccaatcaaagttaataaataatgacacttacatagagacattgacacttctcacaaagtataattcttcctaataggtctgggcaaaaaaaacgctaaccgattaaccgaaccgaaaaacatgcttcggttcgggtttggatagcttaaaataaccggctggatattatatgtcttagatttaggttttggtttcggttaggttagtaaccgataaccaaaggataaccaaagcatatatgtatgatagataatatatcacatatattgtatctattgacactaaactatgttcttctcttttttagtttgcaagttgaatttcgtgagttgtgaatcaggtgttttaatgttatagagagtatgggccatatttgcatctttgtgagttgtgaatatgtcttacattctatatcagttattggtcaatttttttggttgtttcggtttttagtcggttatttcggttttggtttatttatggttaccaagtttaatatacgaaccgaactgaaccgaaccaaaattcctcaaatattcaaatggttcttatattactataaccgaaataaccgaaaccatgcacaaccgaaccgaaaccgaatgcccaggcctacttcctaaaatgctcgagcattattccttcttgtaacaaatgcttcttctattttataagcatgttccttcggcttctcaaagttcctagatggacactcgtttttgtagtggccatcttccccacaaatcacagcaggcccctgtctctactttggattttgaactatctctact

SEQ ID NO: 34837 - DNA, 2985 bp, Arabidopsis thaliana landsberg
  unsure (1)..(2985): unsure at all n locations
acaagtacgctatcggatacgagaacaagaagaacaactcacttcgtaaccacaagatcttgatatttaatgatggatccgtcgcgaactaccgaatttatgagtttgaaatctacaattttaactctgattcatggaaggtttttgacttcactcccgactgggatatctcttttactgaccttagcgtgtctctcaaggggtatacttactggctgatccgttccaacgggctgatccaagaatattatgctcgaagtctgaggaaaatgatgatcaagaattattgatcattgggttttgctgatcgtcatatcaagaatacacacttttgtattacctttgtccatgaatatgtagtagagaccaaaaaaggaagagttccattgtaaacatcaagcttcatagccagaggccctgcttatatagacatgtatcgagttacaacgagtaatcagagacgcaaaagaacaagtttattcgatgttttcgatttcaccattctcaaaaagaaggccagagatggcagagcagccaggtcctccagttagccagagaataagagggtcttcttttggattcctatcagacttgatgaagtagtagaacagttgcacttcctcttcctcattagcaccaatataccttcatccacaagaaacaatatcctatgtcttttagattatctccaaacacagaacacagatttaatcacacaaagagattgaaaacaaacccggtttcgagcgcaaagggaaaccaggaagaaaattgacgatagaagcagaatcaagaagacaagatgaagaagcagaagcagcgacttcagaacagaggaaacgtagttgtttgccattccctgtttcagattctggttagcaatgtctttacggaaaacaattactgcatctttatactaaaacccaaaaaagtcgcctaccaaactcttatcttttagttttggcttcttcaccaacgttgtcacattttttcatggataaaaatattaaaatctcgcaaccttgatccaatcaagtatactactgaatgatcttttagtttttttttttcttattagatccataattgtacttcgttgtagatatcctgcacacttgcctccattaatctacaaatctgtttataaatcgcagtaactgagactcgaagcctacacctcttgatcttgatgtagaagcattaatgaacattttatcaaccattggaccaaagggacttccaccaaattattcccatttagtatatgaaaaagtaaagaaaacaaagaaatctatctctctcgtaaaggattaagaaatagataaccgtgctttagcaaaaaaaaatttgtgcaaaattatttgttctaattaaaaaaacaatttctacataagcaaattttaagtattgataaaacagggatttatacaaaaaattataacacaccgactatgctgtaagaaatttttgcagctttattttgacagtatatagccgtaaaacaattgagcaatgagagttacaaatagtttgagatagctctcagaaacaccattctttaagccaatccattttcacttgagattagtctcttccttgccttcttggcctgcaaatcatagattccagttactttagagaattaaaaaaaaaaaagaacgtattgtaataagctctaacctgttccttccaattcatggaagccgtgacaatagccagtataatggcttgcacagcggatccaaccactacaccacaccatagtccttttccgttcaactcacaactgaaagctaaatatattccaaccggagctcctacgagataataagctactacgttgttcaaagctccaatgtgttgccaaccacatcccctggcaaccccttttcaaaaagtcataacaaacaaaacacattttgagtcgcgtagatcgattcttttatttgatttgctagttaatgggtttgattttattaccaccaagcactgcagaaaatccatcaaccaaaaatgagatacaaagcaaaggagatagctctgtgacatagtccacaacttctttnnnnnnnnnnnnnnnnnnnncgaagatatctctacaaatgaagagaagtgtgctacaaatggtagcctctaggaaccaaaggaatataccggcaaacactgccagcctcgcaacctcgggattccccgctcccaattcgtttgaaacccgtatactgccaagggtaaatagtgagactaatctgacaatttccaaacaaacattgaataagaattatccgaatcataccttccagccgccccaatacccattggaatgacatagtggagagatgatgttgtaagactacatgaacacagcaacaacaaccaacaagattacatcactaaattagataataaaaggaagagtaaaaattggtttatgtgacatttactcaatagaccaatatatatatatatatatgacaagtcctcatgatactagatatgttaaaggaaaatagagatccagagagaaacatagattaccaaatggaaagaacagaggtctcgagtttcgggtttgggaggagtcctgaagataatataaggaactcaaacaatgaccactctatgctgcatatagaaaccaaaaacaaatcaagccaagaaagaaaagaatgcaccaacgatgaagaagatgaatgtttttacgttgtcatcgctgctgatggtatcccatactgaaaaaactgcttgacactcaacacgaaatcatcggatacaaagccgcgagtcttctcgcaagcgcttgaaaatctcacatataaagcaagaatcaagacattaaaccagtaagacaaaccaatagccaaggcggctccattgcttccaagaccaaacgcgtaaaccagaatcaaacaaactggtatatggaacaaaagggtggttatggcacagtagagaagaggaagaaccaaaccctgagtctggagaaac

SEQ ID NO: 34838 - DNA, 5682 bp, Arabidopsis thaliana landsberg
ttttttttgtgggagttcacttcctttttctttctgtcaatagataaacggaatggagcagaagttttatttaatgaaatcacaagaacatcgaaagtaaaatctcttggtttggtaacaaaaatatgtaggaagttggtgcgaagatatataaaaaaaaatatagttcagaaatttattggctgtcatgggtggatgaggtaataacgcaaaaggtcgtggactcacgaggttggttaaaattaaaaacaactgcaacatttattttttaaaacgtttttttgtaacatgaaatctctatgaagattgggtagaatgcatttaccgcgtttcatgtgggacgacgtcttcttattatatcccttcgcaactaaatcctctcttccatattttctttcaacactttatcatgaatattgaatacacacacacactcatatgatttttcttatcgtattatttaaagtcattaagtgaacacaaatatatcgtaaagaaaacatctaattatgttagggtttctttcgaattagttcgttaaatatgtctaaactaaagtttatatggtatactaaaccgacgcatcttcttctgattgaaccgacgtatttttttaacttttaactgtcttccataacttcccattttcttctccaccactctctctctctctctcgctcgcatatatatacgtcactttttctctgatctcataacactgttccgagagtgaggagtagaataccttaataccggtttaatcaaaccggttcagtttccaaatggataatctactctgcgaagaatcttggcccgcgagtcctttaaccccggagcctttaccaaacttccgtcaccgttctcacgacaatgacgtcgtgaagatgtatccagagatagacgcagcgacgatggaggaagccattgctatggacttagagaaagaattatgttttaacaatcatggagacaagtttgttgagtttttcgtctcaaagaagttaaccgattataggttccatgcgtttcaatggctaatccaggtaccttaattattattatctctttgtttgtcctatgtgtgatatttgatagtaaaccgcaaaaatttgtagatacttataacaacctataaaatctttcaagatagcctttaaaatttgggtttacgaaaaagttttttgcatcaaaattaattatcgatattataaaaatatttggtatgtattattttttattttttaacatcatattgttttataaacgaaaagttaatttttggttttactttctcagactcggagtcggctaaatctttcatatgaaacggtattttccgcggctaattgttttgatcggttcgtctacatgacttgctgtgacgtaagtatacataagcaaacacaattacttaatgtgataaaaactttataattgcggttgaattaatgacatgttcattataaataaatgcaggaatggacgaattggatggtggaactagttccggtaacttcattatcgatcgcatcaaagttcaatgaagttaccactccattactcgaagaacttgaaatgaaaggtgtaactcatatgtttcacgttaatacagttgctcagatggaactcataattttgaaagctctcgaatggcgtgtgaacgcggttacgagttatactttttcgcaaacccttgtgtcgaagatcggtatggttggggatcatatgatcatgaatcgaattacaaatcatctgcttgatgatttattgtgagaccccttcccggacgtctcggcgtccggcaacgttgtactcaagtttgcgtctcttcccggccgaacctcttaatttttcgcgattcaacatagaattgcctttacgaggctaaattctataatcgctctcttattacacagcggaagtctttctaaccttggtttaattctaaccaattcttgtaccggtttcatcgtctttgttccttagacttagatcgatcctttactcggtcaagacatgcatatgttcgctaaccattctaagccaaacaatcgcatattcctttatcctactttcacggtcaattaccaaacgtctatcttaactaataagctagatcgttacataccttggtcaatatgcggatttgattccttagcccgtttgtcgccttactccattcgttcaacgactcgtcatcggtcgtgaattgatgaaccaatccctatcgttacttagccatacaaccaaccaaccccactggtctaagtacaacgatagagattggggatcgtacgattcccttggttcacgatggccgaatcaagctcttggcttattggtccattcgttctccaaacgtacgcccctccggctacatggtggacgattgagccctcggcttatcgaaccatccatgtttccgttccggtcgtttaacactacgaccgcccacggtttactaaccgtttacccgtccggtccatggtggtcgataaagctttcggcttaatgatccatccatgcggtccgaacgatatccttatcacacccaagggtccgtggattcatccactggatcatcgtaggctagcccatgaaatctttcttccgtcggccttaggtttgctcgcgggtccaacatccgttttgtccatcggttcccaccgtggactttcctgttggttatccgtcgagtcaccctttggtcttaccgatctctaatcggtttcaccatggctgaagagatagatacatgaaggcggccacgatgttgatcctatatggtgaatcacgttccttacccattcttggtgctttctccctttatcggtaagattgcatccatgggcgacccttgggtgtgttcggatgcacttatccttgtgcttcctcgaacacttttctcgatccatcccatccgacgatcggtctgtccgacccgttccgtcagacgatcggcctgtcccatccgacccgtccgacgatcggtctgtccgatccgtctggccgatccgatccgtctgacgatcggtctggccgatccgatccaaggatcggtctaccagatccgattcgtctctaagacgaacggtctaccctctccatcctctacactccatcgaaccgttggaccgggaggtagcatgcgcatcagttcggtcgagttatactcgccgagccgcaccccctttccgaccaacaactctaggatgtgttgggactcctttaagaatgttttatggtgttttggatgttgtgagatgatgtgagattccttgggcgtcctcccttatatagggggcgaatggatgcttcccgaaaggtcacatccgttccttgcacccttccgaaaggtcacatccgttccttgcacccttccgaaatgtcacatccgttccttaacctctccgggaagaagatccatgatgtgattattcacctcactaacatcatcgtttgttggacaaagtattgcacgctccctgaagaaagtttgatcattaagattttgaagtagatttggatagacgcaattagcaatagagtcaatggggtgaagtgagtcaagaagaagcatgtcttcgggtatatctatagcttcttcgccattattaggttctgaaagctttccatctcctagcttaagaatccaatcagaaaactctttgatgttgtctttttctgtagggtctgcctcaacagttagccgcatgttcttggtcaatgtgagaactttgcaagaattccacaaacgcgaagaagtgagagacgcatgaattatttgttctcgactccctttggttataactggtagtatttggcgaaagtctccaccaaatgtaatagtttttccaccaaaaggtttgtggttgtcggcttgtactatatctttcagagtacgatcaagagcttcataacaatgtctatgcaacattggagcttcatcccatataatcaactttgctcggagtaacaaagaagcaaggtcactatcaggtgaaatcgagcaagtggaagtttcgttcacctgtagtggtattgcaaaccgggaatgcgctgttcgtccgccatccagcagtagtgctgtcattccgcttgatgctacatttaaaacaatttctcctcttgaacgaatgtacgtagacaatgttttccacaaatatgttttaccagtgccaccaaatccgttaacaaagaaaacaccaccagagtttgaatagaccgcttcgatgatttggtcgtatattttcctctgttcaactgttaacttggaaaacaaacgtagatggtcttgggcacaagcatgtcgatcgtagcacaactcatcttgtatcaacgtattcattgctgcagggaaattgttgttttctggatatggcatggattcgtaattacgcagagtacttccactgttacgtaacaacttttcaatttccaacaaagcttgattttgaatttgctcatttgtcatttcatggcctgcaaatttttaaaaaactatcagtttcatttttagaaggaattgagaaatttggcgagcaattgaccttaagtcattatcacattcaacgtattttctaaatatattgtttctatatcattatcacattcatgcatgttaaatatttacgtatataattcatggttttttggagctttaaatagatcgtaacgattattttagactttagtgtgtttaatgttatatatatacgttaagaggaacaatatatatttcgttacgaccaagaaccatttggtcgtataatttaaccaagtgtttcttctgtcatcttatacatcgtattcctttttgcaaattttaaaaagaattctcagtatttggtttgtttatcaattgtaaaactaaattaatttgttttataaataaatatatataaagaaaaaaaattttgttttatagtgtacctggcctttgcaatattttcctttgcatagatagtacatcatctgagagctgattccacgtatttaaccaaacatgataaggtgttgacaaactttcagacgttagaagctgggcaaataaccttctcatgtaacggccagatccccattgacttgcttctattattgtatcgatgtattcttggtcatcttcaaggagacttaaagcataacatgcatctttaaatgttgggtacagaatccctccaactgtttttatatcttcataacatgtaggtccctttactttgtttaataggatcctcaagtagaaccgttgaccagctgatggggtaacatgatatacccttccaactgatacacttctttgacggagagtccactccatttgtttctttttccacacaaaatgcgaagggaattcaatgtaagtaaattttctcgcctcaggatcttcggcaatttttttgtttgttttcaaaaactccaagaattgcgatgtttggttttcttctttgttcaacacgtcttcatcatcgtcataaattattttttgctctccaggtagatgaatgcttaatctttgtaccgaagtgctgctgtgatgtaagtcaaaaccaaaaatttgccatgctgcttcacaaggtgaaatatacctaaacaataatttgatatgagttgatcaagacaccgctaacgcatcttccgctaaaattattcaaaatttttatgtggatgttaacagaataa

SEQ ID NO: 34839 - DNA, 4697 bp, Arabidopsis thaliana landsberg
gctcatttcactctaaatgtagagtatttattcgcataacaacatcacagatatttgacaaagtagagaaaggtagatacctaaattcctcctctgcaaaactttcttcaacttcctgcgaattatgagaaagaggtgcagatctcttttcactctgaggaaaggctactgtgctagacgtaatagaaaagtcagcatcaaagcttccaaagcttaacttggttcgttcagcctctggaacaagaatatggtttggaataataacatgctgacgttgaatctgcaagtcttcaagctgtctctgcaatctggatgtggcttctgccgaaggggtagcatcttcaactgatttgtcactggcttcagtaggaactgcaagagtttcacctgtagatgatgcaccagagccccgggtagtgttatggttcactactggcttcggtttccattccttaatggaaccagcacctagaaacaagtatcattgacataaagatgtcagaagattccagtcttgtgcaaataaaaaaacaaaagaaatacaataatgaagaactgcagcagacaaaaagtgtttcctgtaaaagcaagtatcttggcaggcacagtagattcagtggaatgtcaagacacgtggattccacaaagcttataaagcaaggacggttcatactggaactggaggcggttatttaacggaccagacgatgaagtcactttccatgagagcgatactaacggcctgtatcggccgcacaatgatcccttggtcattacaatgactatcagagatttcaatgtcgagcaaattttagtcgatacagggagcacgctggacatcatttttctgaagaccgtgcgagaaatgaagatcgatatggcgcaagtcgtaccgactccacgacctgtgcttaggttttttggtgagactactatgactctcgacaccatcgagttaccagtccgggccagaggaataacaaaaattatcgatttttccgttacggaccagccaactgtttataatgcaattataggcaccccatggctaaatcagttccgagtcgtcgcctcgatttatcatctctgtaggagatttcccacaaggaacagcgtaaagaccatcttgggaaatcagaagaatgcccgaatgtgctttatggcagcgcacaaactcagaaaccccatcaccgagtgaacagccgacgcaaacaacaaaaatgctaagttgggttgagctgaagaaaaagctatcgaagaggctcgggaatcaaagaagctagtctccgaccccgtaatctctgtttgcctcgacgacaataatcccaaacgatgtatcgaaataggtggagatttaggcgaagagcttacagccgagctgactttcttcctcagagataacgtcatcacttttgcctggtcgccagaggatttgccttgagtaagcgttgaaattgtgtcacacgagctcaacgttgacccaacttttaaatctgttaaccagaaaagaagaaaattgggtgggaacgtgcggaagctgtgaaagccgaggtggaaaaactgctaagaattagctctataaccgaggtgaagtatcccgacaggctcgctaatccagtcgtggtaaaaaagaaaaatgggaagtggagagtctgcgttgacttcactgccctgaacaaagcctatccgaaggacaacttcctattaccacgtatcgatcgcctcgtcgagtcaacctcagggaacaagttactatcgttcatggacgcctttgttggatacaaccaaatcatgatgaaccttgaggaccaggagaaaacaacattctacacgaagcaaggtgttttctgctactaagtgatgtcgttcggacttaaaaacgttggggcaacttattagcgcttcgtcaacaagatcgtcgccttgtagatcggaaaacgatagaagtgtacatcgacgatattttggtaaagtctttggagaaagaggaacagataacctctacaacgtcaagcttaatccagccaagtatcgcttcagagtaagatccggtgagttcttggggtatctagttacacatcgcggcatcgaggcaaacccaaaagcaaatcgaagcactgataggaatggcgtcaccgcaaaacaaacgcgaagtacagcgttaaaccggaaaagttgcagcccttaatcgattcttctcccgatctaccgacatgtgtttggccttctacgatgtgcttcggggaaataaaaagttcgagtggacagctcagtgcgaggaagcctttcaagaactcaaaaagtatctagcgagcccacccatcctcgcaaaacttgttatcagagagccgctctacttgtatgtctctgtatccgatactgcggtcagcaaacttttagtccgagaagaaaagggtgagcaaaaacccattttttatgtttcacagacatttactggagcagaatctcgctacccgcaaatggaaaaacttgccttagcggtcatcacgtcggttcgaatattgtgaccatatttccagtcccacaccatcatggtaatgggatttatgccactccacgttatcctcaacagtccaaaccagtcaggccgtttggctaaatcggcgatcgaactcagtgagtatgatatcgagtatagaaacaaaatgttggcgaagtcccaggtcctagctcacgaaagaagctcgaaaaaattggcttgacacgacatggctcctacatgtcgacggctcatcctccaaacaaggtttgggtgtgggcatccgcctcacttcacccacaagcgaggttctcgaataatctttcaagctaaatttcgaagcaacaaacaatgtagccgagtacgaagcactcgtggtcgggctgaagctagctcaagggttaaaaatcgccaagatcagagctttttgtgattcttcacttgtcgccaatcagttcaacggggagtacacggctcaggacgaaagaatgggggcttatctcactcacagccaagatcaggcgaaacagttcgacgagtctgaactatcaaggattccccgaggcgaaaacaaatcggctgatgccctggctgctctggcctcgacgtctgacccgtacctgaggagagtcatcccagtcaaattcatcgagaaacctagcatcgagcttgaaaaagaagagcacgccttctccgtgcagaataccacagattgcaaggatatttcggatttgaatgataactgatatttaggttgcgactctgagtggataaaacccatcagaagttacatatccgaggggaaagtgccctccgacaaatggaaagctcaggccgtaggcttcattttggtcgaagagaagctattcgaatggcgtctatccggacctttaatgacctgcgtggaaaaggaagcagcctacaaaatcatgaaagtaatccacaaaggctcatgtgggaatcactccggaggaagagccctgccatcaagataaaacgccacggatacttctggccaacgatgatcaaggattgcgaaaaattctaaagaaaatgcgaaaaatgccaaaggcacgcacccacaatccatcaaccggccgagctcctttcatcaatcgcctcgccgtatccattcatgcgttggtcgatggacatcatcgatactatgcacgcctcgaaatagagaaagttagtcctcgttctgacaaattatttctctcaagtcgaaaacttcgtgtggaagcacattttatgtcaccatgggatcccttacgagatcgtcacaaacatcgactcgcaatttatttcgactcgtttccaaggtttctgcgataaatggggaattcggctcagcaagtcgataccgcgatatccccaggggaacggccaagctgaggctgcgaacaaaacgtttctcgacggcttgaaaaaacagctcaacgccaagaagggtttgtgggccgaagaactcgaaggagtactgtggtcgcatcgaacaacgcctaatcgagccacgagagaaactccattcgcactagtctagggtacggaattataattccagctgatatggaggtaccaaatcttcgtcggagcctatctcccgaacaggagacagataataatcagagaatgctgataataggtttttaagtcaattaaacctaaagcactatcatgtcgttgtaatattttaggttgtcaatccaaatgggtgtgatgctaactgatatgatcctggtgaggaatcaatcctaatttcggcacttggaagatctggagtggattttctcgaaatagagacgatacacgactcaaagacgagatgatggattgaatgacgccacaaaaggatgcggaaaatccttttgataagtcgagaaagatcaaaattcgacatacgagaatggatccatgatctatttttaaaagagagtttttgataaaaagatagatgagttctcataagagattacaaggagtttataaagaagaaggaagtcttggaacacattcacaagactaccttggaaaataaaaagaaataaagactagtttgaaagtttaaaaataacccttccacttcttggctccaaaatgactcttgatatgctattttcgtcacttctcttgaccagcaaattacccacttggtttgggctcatcttgggcttgtgatggtcataaaattggctgg

SEQ ID NO: 34840 - DNA, 8157 bp, Arabidopsis thaliana landsberg
  unsure (1)..(8157): unsure at all n locations
ctcattggagattgttgaatacacttgctacaaattgtgatttctggcgtcaatcaatttgctctttacagctccatttggtgaccatcctcacttaagcttatgtatgttgatttcagatgtttggattgtcaaaggcggtcgcagagaagcaagctgaggaggcaaagggagtcgagagtcaattgcctctgcagacgacagtgtcagagtaaagactagcttctttccatctgcgtttgatgtcgtttctcttgtttaacatcaaatctaagtttctttgtaaatcaacttttccgacctagagaccagatttatattcaaacatttcaaatgttattggtttttgttaaacaaacagctggtaacatagtagctattaatcatacaatatacttgcatacataagagccgtacaacaaagaaacaaagagaaatatattgcataacttagcccaaagattcaaaagatatctatattaggttctggataccaatccaataaagcctcgtatgttgtttgtttcatcttgaacagaacaagctgctccggtacacgtttacagatgtgattttcaagcttatacctgcagcatacaagaacatgacttatgaatgcccatctcaacaaaaatataccatcacacttaatctaagaaggataatatctgaatgccattgttacaagacatttcagaacaagtatcaatccaaaattaatattatgaattcatcacaaagccaatgtcattggagtcggaagcatacctttatcaaactgttacagttagacatcgtacaatggtggaaggttctttcaaggtaatgacaatattagaccacaggaccttcccccaaatctttcctccttccctcctttccaatctgatctccgtgcaacagattttggttgaacccttctcaaggttaaacataatcgcaagatttcccccgagattcgacattctcgagccatcacgcttgtcaggaagatcgtcgagacccttcaagcgatcccaaaccatggcaattggatcaaacacccatattctattcttgctaccaaaagtgtaaatctttccatcaatgacgcaagaaccaacactccattgtgtgtccaacaactcatcagtctccaacgtaccttctttaggatcataaacaaagctattctttcgatccataatgtaaatcttatcatctatcgcaaaacttctgatggttaagtcatgcatttccacattattaacacccaaaccagactcccaagtttgagtctttagatcaaaagcctctacccaattcacagacagagggttacaacctccgattacatacaatttcccatcaacaaatcccacggcggcgcagccacgtgcctgcttcatggtagggaggagacgacacgtgtgagatggacattcgacgacaaacccagtggagaccaattcattatcaatgcatccaccaaggacgtaaatttcagaatcaatagcgacaattgacattccccagcaaggaatcgaaggaaacgacggaattggaaccaatctatggttatttgaatcatttccaaagggtttgaaattgagagtgtaccatcggggagtttctgtagcgtgagatctaagcacaacataaaggacacgctcggtgcggcgaagtaatgacctttcaacgtagatctccggtgaagctatgagacgcctaaaggtcttggagacgagtgaaatcaccgggtagtaacatttcggcaagcgtgctaagcaattcagaatgatttcgtctggaagtagtaacagatacgatgaacaggacggcgatggatcatgctgtttctttggcggcggttcttcagcgattgagcttacggagctcgaactcgcggcggaaaaaggcataaccgctgctatgagctgctttttttagtcaaaagttgcaaatgaacaaaaccgatcatcatgtcttctcgcagacatacaaatgggttgagtacttttatcgaagtaaagcccaattatgtttttaaatttatatttatattttaaattaaaatttagtcaccctgatgggcttaggcccatatttctctattaatgtgtactttttataaggtatcttttatactttctcagtttcccgcttttattatctttaatcacccaaatgggcttaggcccatatttagataaaggcctcaatgtgcgattttataagttttatctttttcgcaagcatcaaatttcccgccatgtctgcgtctcactttattggaacaagtttttcgtttttaaaatccccaattcataaaccctgatggtgtttcctaatggaatcaaagctcgcgattactaatggcagatttttcgaggtagcttttttccagctatgtttttgctttagttattcattttctaagacaatgattcgtgatgacgttggagttttcattacaaataaccttaatacagattcatttgttaaaactggagaatcgaaagatatggagtcctcaaagattatgggagaaacattggaagtaggaatatagatataaacaataattcgcaattgacagggttacgagaaaaatcgaccggtgaatcctcttttattctcgatggttttgatttactgcagcctcatgtttctcatcctgcataaacaaattatgaatcagattggtgtctttggcttggattgttttgtattcttaattatagcagaatgtgtcttttttaggacaatacataccttttttcctcctgactaagcctgccattagtgcagcctccactagtcctgtagtttgggaatggaacatgaccgttctctatgctgttgatgtcttgcactaagagttcgtagtgtctctttacctcctctgttggttttccacccacgactttggcaacattttgccaacggttaggagtgtcctggtcataggttgctagagcctgctcaaagnnnnnnnnnnnnnnnnnnnnnnnnnnnnnnnnnnnnnnnnnnnnnnnnnnnnttgatgccatgttgagttatagactaatataactggttagaaagagattatttaagtatggggagattacgagtcaagaggatgatatgtgcatagatgttgcagaatgcttcctatttataaggtgagtttcggtggtgccagatgtagcaaatatcttgcaaaaacgaagagaattttaagtcattgtctccatagtaatcgactaatgagcaaaaagagaatatcagcaagtattgtggagatcagtatctaaagatccaaactaatcacttatatttggttctaagttcttttttccttgcacattttgcatatgatacttggcagaaatatttcttctgtgttttttactgctgtgattactttcatgtcttcttgattgagttagagacgtgttaccgtcagagcaggttttctcattcaattctagatttaagtcttcatctactttgtggaaactctggcctaacgttatctctgatatacattgactacaacagtaaaaatttgcaaatacattggatctcattgactatcattgtttctgatattaactaggtggaacttttcaagggttcaccatgagccatatagcttctctttaactaaagtccttgcaggaaagttggagatcacactttattgttgattggacctcagggatactctgtcttgaacatcatatcaagatacagaagtctctttgaagtttggcaacgttgcttttcttggtcatctatattattatttgcattttggtcttagatgtcatactaaataaatggtcactacttacttcaataactaacatggtatgattcatgcgcattaattctttaacatgcttacgagatttagtctatcttgttgatgtgcaccaatttgtggccttgcgagatatttacatttgtggaattgtggtacaagttttaggttttaagatattgatgttctgagaactcaagagactgccatggttttgggataaactactttacaagaaagaaaagttcaaacaagacaaaagaatcttaatcatgagactgatggctcaatatattctagaggtatagttgctagttgctacgggattctacaagtaggcatttcacgatatatattctcatcattgtttccttcttacctaggtgttaaaatggtaagaaatatacatttcactttcagcgtcttgtaatctcttgagctgtgagataatagtttatgtcagaaacatcagaattggttgttatgcaatatggattcgctgcatctttacttttgtgacatgaaaagttacatagggtaagatttggtggatttgattccatatctccatcttcaagttgcatttcctatagtgaaggtaccggccattttatgaaacacgttgcttagctggtgatgattggtgtaaattgccactgtagctttacaagaatatgtgggaaaaagaaaggaaagggtaagcattatattcctcaactagtggtagctccttttgcaacttgaggaactaaatcctgatgtaatcttaagttcctttgtagacttagctgttgtagctcaatgaagatgcttatttctatggggttgctatagtagttcataataactttgttaacaaatgctaagtttgtttttttcttccaagcggtgcagactgttgttgtcacttggagagtgagtaaacagagcattgctcaacaagcctacacattttacaagagacaaaagtacacatattgtagcatatccaaagtctcatctatgtgattttattgtttgtttagtagatgatatcctttcacgataaaaagatgccgacaaaaagaaaagtaacggaaggggaatattcgaggaatatcgtgttgtctatatattctcagtcaaaaatttaaacagaagatactagtattaaatacccaatgtccacattggatcggcgcaaaactgagtgacgatcattttcgataaaatagcactaattattggtaggtcaaaagttaaagaactaatcaatttcaagctatagtaattattgataagacaatcatttgaatcctttagctgctgttcgattaaatacatgtgtctaacaagataaattatttgagggaaaatctcgaatctggttaaaaggaaacgttataaatttagtaaacaacacgcgaattaacatttcgttccagacaaagaagacttaaacgaaactgtttcatcaaaaaagtaaaccaaacgaacgataaccaaaccagaagtggtgacacaaaaccaaatctaaaccaaaaacagagcagcagcacgcaaacaactctatctttgattaccagccgccaccaccgcctccgtaacttccaccatcaccgcctccgtagccacctccctcacggcgtccaccaccaccgtatcctcggccaccaccgcctccaccagatccgtaacctccgctacgtctctcgtaaccaccaccgcctcctcctgagtatccgccgccaccgcctcctgagtatccaccaccgcctccgctgcggtaaccaccaccgcttccaccacggcctcctccgccaccgccgctacctctcgactgagcctcgttcacggtgatgacacgtccatcgagctctttaccgttcatctcttcaatcgcatccctcatggctttctcgtccttgaaggtgacgaatccgaatccccttgatcttccactctcgcggtcgttaatgatctgtaaacaaacaaaatcatacacatcagcaaaaacaatcgtggaaggaatataaaacaaagcgatgaaaataaagcaaaaatcgatcgatctccgagctcatagaagcaggaagatgaacgtaccgatgggacaaattaagtaacagtaacaaagaacgagagagaacatagtaacagtaatcgaatcaagtaacagagaaacagatcggaatcagatccgtcgaggatcagaatcatcggaatcggctcgatccgggagaccgatctctcgtgtaacagaccttagaatcgataacgtcgccgaactgtgagaacgtcctttgaagatcttcatcattggtggcccaggcaaggccgccgacaaagcaccggtactcaacttcagacattttttttgagaaattagggtttcaaaatgtaagagagagacttatgtgatttgaggtgataagacgcagccttaatttatagaacaggtgtgacgtaataactagggttaaacatgttttctagggtttgctgaaagatttgtttcaacttactctgattaagatgtgtggttaattgggttagtggttaggcccacatcatgtgagcattttcgataactaatgattttttctcctcgtttcgagcaaaaaatatctttgtaagaatatcttttattccttaaatgacaattttgtccttcgtctcgtcgtcattatgtcatacaatagttgggtctgagtttggtttattgggcctatctaatttaattggaaagattataacttccggcccaatgaatctgacggcgaaattagtaaaacaataaaatgaaataatatgcaaagactatgacgataatgtgctatggatttacatatttgttttgtcattaattatgacatgcaataaattcatatgaaaagattcttatcgcaatagcatcgtggacatgttacagtctgtaatatccaaactttagcatagacgttttttgttgtacaaatattttggtatgttaagtgatattcaaatgaaagctagatgtgcagatatgtgaacatataaatctttcaatgggattcaattttcaatcattgactatttcaatacactcgctctgtacttgaaatattttgactgtctgaatattactttttgacagcattaattattttgtataccaaaattagacggatgaagaatgaagatgaagtagttatacaaagtcaattacaaatggttcagtatcttgatttcgatttttgtgctgaaaatgctgactaaagcgtgtagaagagctttttcaaaaagaaataacctggctaagatttttttaaaaaatctgattattaatatattgcaggtaatatgaaaaagtatcgtcgactttttataagagtgacaactaaatcattttgctcataataaagccacaattattattagtatattttggtcgttttaatacgaggaaaaataattgtcatacaaaatttacagaaatggagtagcatcgtagctcctaggaattcaattatttatttgcaaaactactaaaatggtggttatcatattaaacgtcagcagaaactttaagtatttttgaaatgatattaatttaagagttcgttaagctgtcttgggcgggatcgttgagagtcaaactcctcaaacgacgccgtattcagaacttcactttcaattacttgagagtcaaactcctcaaacgacgccgtattcagaacttcactttcaattactgtatctgcgtctcggtcacgagatcgaaccataaatcttgggaacgtgcacgtatacaacgaaagatccaccttctctcactttttttattttcttatactttcttctcttttcttcgaacggccgctgttcttgaccagtctgaagctttctctgtccagaacagttctgtaagaagaagtttttatcacatattatataaaaatatctgtttcgtattatatcagactttcgatctttctctctctaaatctaggacaaaaaaaaacatggaagagttagagagagagagaggcagcagaaaatgattggtaaacaacaatgaatcgtttttgattctgaagtgcacagagaaaagtaattgccagagaaagtcgcagaggtaacagagtgaagaaccttttttagtatatatctttgttgaataatcacaaaaagaaagtttcctttattgatcggattcgaaggaaacccaaaaaaaaaagagatttgattatttccataaatcgcgaagctttttcccaattgaatcttaggcaatgaatggctttaagtttttcgaattactagtcgtcaccagggtttagagaaaccatggtggttctgaggaagacatccttgttggtcttcattcaaatgcctcctgcttgttg

SEQ ID NO: 34841 - DNA, 2483 bp, Arabidopsis thaliana landsberg
gttatcgtagctattatttcaatttaaatactatcccaccaccactaccaccactattactttatttaatttaaaatattttgttctaaactaaaattaaaactgaattacgaataatttatgaaaataatatagtacaacattttatttctatacatcataaatagtacaatataaatttacttacaaacattatttactattttataaatacaaatccgattataaaaattcaaactatgttgtatgtagaaaaaaacataaatttttatcttataaatttcagaattagaatctattttttggaaaagatatataacaaaaacataaaaatgggtgaaaactaaatgaagagttactaaatcatctctcaccaactattctacaccaaaattgtctttttacaacccttatatgctactttcttaatttatatgtatataatgctatattcttaattaagttatcaaatatggctagttttgcaaatgaccctaaaaagtatcactttttgtgaaaaaaaaaaagagtcataagtacatttaacttttttcctaagtatgtagtcatttgaaccttctgaactcagggcctgactgctttaaatgtagcgggtgcgggtgcggttgcgggagtttgcggaaacgggtggttgctgtttcaagcgtttcatgcgttttgaacgactggttgagcgtttgataatgaatgagtttgcgggagttttatgactggtaaatcagcgagtatgatagttattaaataaaaaataccaaaataaatgtaatatattactattaaaagaaataaaaatacaatatattatgataaattgataatattagaaaaattgattttctgaccaaacaaaaatacaatatatcatctcgaaaaattgattttctgaccaaacaaaaatacaatatacaaatcgaaaaatgtattcaatatataatcaaaaaactcaaaagaatacaaaataaaataaaaacaacgatgccatgaaatagttaaagaattacactagctaatgaatgaataaaaggatagatgatacttatgtttgattcttgattttgatttttatcggatgcaataattaagagaatagggttacaatatattgattagggttttctaataaaagtaaaatatataaaagattagattattttaattatagtgattagggtttgggtggaagccacaattattttaattgattaaaaaaagattattttttttaacctaaccggtaccgcccgcaaccgcaaacgcttgcgggaaggagcttttgaaatgtggcgatttcgagcggtgaaaatcagtttcccgcgatttgtatgattgttgccaattgctaacaaccgctaccacccgcaaacgatgcgtgtgcggatggtagagggagaaccaatcataattgaataacactaagagcatcctcaatgatggtttctaagcatgcgtttgcgggtggtagcgggagaaccaatcataattgaataacattaagagcatcctcaatggtggtttctaagcatgagggcctgacttgtttaaacgtagcgggtgcggttgcggttacgggagtttgtgaaaacgggcggttgcagtttcaagcgttttgaacgactggttgagcgtttgataattggtgcgtttgtgttagttttatgactggtaaaccagcgggtgcgatagtaattaaataaaaaataaccaaaataaatataatatattactattaaaagaaataaaaataaaatatattatgataaattgataatattcgaaaacttgattttctgaccaaataaaaatacaatatatcatctcgtccgaccaaataatttctaatcgagaaaacaaatcgaaacatgtattcaatcaaaaaactaaaaagaatacaaaataaaataaaaataacgatgctatgaaatagttaaagaattacactagctaatgaatgaataaaaggatagatgatatttatgtttgattattgattttgatttttatcggatgccataattgagagaatatggttacaatatattgattagttttttttaataaaaataagatatataaaagattagattattttaattatagtgattatggtttgggtggaagccataattattttaattaattaaaaaaaattattttttttaacctaaccgctaccgcccgcaaccgcaaacgcttgcgggaaggagcttttgaaaactggcgatttcgagcggtccaaagcgatatctagcagtttttatgattggtgtcaatcgctaacaaccgttaccaactgcaaacgctgcgtttgcgaatggtagagggagaaccaatgaaaccctaaatgtgtgtgaccacgaccacaccagccaaagaggttccgtgaagtgaaccgtagcacggcccatcatgataagatatcaatataagatagtaagaacatcgattttgtatatcattttgtt

SEQ ID NO: 34842 - DNA, 3114 bp, Arabidopsis thaliana landsberg
  unsure (1)..(3114): unsure at all n locations
atatcggttaacattcaatgcaagggtcgaaaaccaaaccaaccttttttcagtttggtttgggtatgggattggtttgggggaattcacgctgatcctcctagaaaatatattcattgtagtaacagaggaaatgtaaattctgcgttatcattaatttcaattggctaatggacatggnnnnnnnnnnnnnnnnnnnnnnnnnnnngaaaaaatccttcacagcacgaaaccaatcaacttttttggccaacatggggctgaagacacttgccggaatttcatgagagttcatcatgccactatcttgaatcttcttatcagctgaagcaatcatgcattaccttggatggatttttcaaattgctggagctgcgaaatgaaaccgggattaggatatgcctgatgtcgtcggctccttacaagttccatagctttagagaatcccattccatgctttttcatcaggtaagccaccactatagtcacacttcaaagaaaaactcaaaccaatcaaattgtgtaagtatatatataacagaacgacacaataagcaaattacaggttcaagaaaaactcttaatttgtccacaacaagatgtaatctgttcactaccataactcctactaataccagaatcagcaagctataaaagaatcaaagcaaactacaagattcatatacacttttgccaatctgagtctctgtagtttcctatggttactcagttggcaatttatatacactttttttatatggttacataatttgcaattggttcacattgatgattcttaaacactaaatctaataactgaatgtatgagatttaagggcaaaagaatcaaaacctcctagacattcccatgaagcaatgaaccaaaacaccaccaccagattgaatagcttggtcgatgaagctataacactcatcgaaatatactgtcaaatcggtctcggatctatcaaccacttcacgatgaagaacaagtttataaaatctctaaacgaaaaatttcaaaaacaggctaaggattgaagaaaaaaaacctaaccttcaatgactttgtagacaaaatcatcaggataaggaggagccaaggccacagcaacggttaagacatgagtgatattagagcttttgagaaaatccttgttattcgcttcagctactgatcctatgaacaatccctgagaataaactcatccaacaaacgatttttcggaattaaagactccaaaacctgagaaattccaagtgtgaaattagacggatagatagagaagagaaacgaagaaaacctgttggatctcgctgagatctttgcctccttcgagtagcttctgggaattagcttctccgactccgaagagatcaaccactttctccatcgctctctgcttcttttttcaaaattccacttgtacagacgaaaactcttaatcaatttggtttttcaaaataaccctagattcgtaattaatatttaatattttagttcggatataaaatgcaataagcaccagtggtctagtggtagaatagtacctgccacggtacagacccgggttggaggcccggctggtgcattgagcggtgatgaaattggcttaagtgaaggttgggtcctttacatatctctgatctaacggatgatatagcctcgaatctgagctctttctattttttaataacattttttgggttttctaattagaagatatcatacataaacagttgattatgctaatagtaacagctcgtggggcaagataaaccattgagattttgctctttccacaaagagctgaatagtcatcaaattcacctttactagaaggcttgcattaatggatgtacatacacattcattcttaaacaatgattagagtaaaaaaggaaaaaacctttgacacatatatctgcacatatccacataataactctagggtaatagatgattagtttctgaaagagtttagaaagtgatcgatatagggtaaagtgcctaccaaacaattaaagtttctcggattcaattaccaaatgtcaaaatatacatctaactatgataaaaaaaaaatagtgtctgtagagaccaccatttacaagaagtttaagctatgcatgataacacattagtttataatttattaaaatatataataaacaattcaaggttacaaaaacaaatggagagaatcttacaataattaaaatttgaattaacaatatcacatcaattgtataaattaataaaaacatattttttgttaaaaagttaaatatcaaagggaataaacacatattttcacatttgatagaaaatgatttagacatatatacatgattaacccgaactcgaatgctgttcacgatgacaacgtgtagaaatttcacaaccacgatggtaagtgttggctggaactttgacacattctttggggttcttactagtgcaacctggaattgtgtcttttatcaaatctttatagtttatctgttttattccttctccaaatccgctgaccaatgatattataatcattattgaaaaaaagaaaacatggataagactctttttgcgtgcagccattgtttttaaaaaaaaacaatgtatttgaatcgtgttgatcttttttctctgttattatattttgtaattgaataggtgattaattatcaatttatgtttctttgatttataacgagagatgattctataaaaagatggccagtgtagagtttacttgctatttatatgtcatttcagtttttttgttttatcaaaacagaaatatgtgcggtagatttttagcatggcagcacatttaaactgttcaacaaattaagagcaatgtatagttgtcaaactgtcttgggatttcgtagtcatgaagctatgagctgcacctccctcagggattagtcagggactcatggtggcaacaacttctagttaacgaactagtaatgttatctcattatttcgattattcagccttagcttatagtaattatttcattatgctatttttctatatttatctaattcaaagtcatgatttcttgtataataaaggattagtgttttaagaaaggattactcac

SEQ ID NO: 34843 - DNA, 5920 bp, Arabidopsis thaliana landsberg
gatttcctacaaatgcacacataaacgaaagttggttgcatttacgttgctttttttgattcaatgaataataggctacagaatatgattcaaaatccactattgttttaaggcccattaagaatcaatgaaaatgatttttttttatcatttctataaggcccatgcgtttgtgttcactagcagtgaagtgagagtgtcaaatccctaaattcctccctccctgcgtttgtgttatctgcaagtcggagaagaagcagaagaaatcgactaatctctcgccaatgtcgtctccagagaagaagaggaagaagaatcagaaatcgtccccaaatccgtcacttccagaagatttgatagtgagcatcttagcccgcgtctcgagatcgtattacacaaatctctccgtagtctcaaaaaccttccgatcaatccttacttcaccggagctttacaaaacccgaaccctcttaggcaaacccgagacttttctctatgtctgcctacgcttccctgatgaagctaatcctcgttggttgattctctaccggaagcctaatcaaaccctaactaagaagaagaagaagaaagaggattcaagtgttcatcttttggctccaattccaattctcaattctccaactgtggaatggtcaagtctagtcgctgttggttcttatctgtacgccattaccgcagacatcaaagattctccatgctctaacgtttggtaccttgactgtcgaacgcacacttggcttgattctccaagattgcgactggctcacatcaatagtgactttaatgggaggacgtatttcccaggaagctctgaaaagccagattctttgaactgtgttgaagtgtacaacacaaatactcagacttggaatcccgtgcctccccaaaaacgaaaactcaaattcggaaatatggaaggaaagatttacatacccccttgtcaagagaatcataggaaggctgtggctctaaacccaaaggttttgacatgggaagcggtaggattgggtacgaatttggataggggttctttttgtatgatagggaacatagcctattgttatgaccccagtgggaagtttagatggatgaagaagacagggaggagtttggagatcattagagggattagaagggctacctaagtttgctagatatagtagtgttaaattagcggaatatggcgggaagctggttgttttgtgggacaagtatgtagctgcaagtgggtataaggagaagatgatttggtgtgcagagatttcgcttgaaaagcgcaacggtgaagagatttgggggaaggtcgagtggtttgatgcggttcttacagtccctaagtcttataaattcgtgtgtgctaaatctgctactgtttgattgatgactcaggacataggtacgaagcttcttttatttaggatgtcacagttgaaagaatgtcttgtatctttttcggaatgcagttgtcattgttttcgccttacaaacacctgcactcacttgcttgtagatgattaagcttattttgtgactgtctctttgataattcctttgatgccaaactctttctcctactgttttttgctctgaatgttgtgttgcaaaatgcctatatttatgtgactatgatgaatgcttctctcatgcttttagcggatattgtttcacttctaaacatatgcactcacttgtagactgtttaagcttactttgtctatgagaatacttttgtttgtcttgcatagaaaagtactgttatctttacatttcacgataagagctagaacaagatacacagttagtgcttgttttgttgtttaaactgaggcttatgttcatgtcttgtacttgtagccaacctaacctacaaagaaattgctactgtaacaatttgaggatcttgtgtgaaaatacgagtggacttgtcaagccactctttcttttcttctcaatcgaacattattattatccaattatatactctctatttttttatgattcaattcaagttagattccattatgcacagaaaattaaattgatcatatgtccaaagctctactgtcatttttgaattttgttgaaattttgaagggttaacttattttgtgccattgaccactatgatgcatttgaaagactttttttttgttgttgaacatacgtgattactagcttcataggaagaaataagtgtaacaaaatatatatagttgacgaatttttggtcctctactggtaattttgagttgtgttgtagaaatttgtggtgactcaaaactattgttttaaggctcattaagattcaatacaaatgaattagataattctataaggcccattaagattcaatgcaaatgatttagataatttctaaaggcccactaagattcaatgaaaatctgcaagtcggagtagaagcagaagaaatcgactaatctcgccaatgtcgtctccagagaagaagaggaagaaacggtcgcttgaaccgtcaccggaatcgaccccaaacccgtcacttcccgatgatttgatagtgagcatcttagcccgagtctctagattgtactacccaattctctcgttagtctccaagatagtcagctctctcgtggcatcgcctgagctgtataagatccgaaagctattaggacacaccgagagttgtctttacgtgcgcctagaatccatgtctggatttgaccgacattggttcactctgtgccgaagaccaactcgaacccctaaccttaactcacgatggttcacttcgcagttattgatgaaaaacttttggtgtcagtccctattcgcaattattgtcctcggtttgggctcaagaatatcatcacacttggttctaatatctacatgattggggaattctcctctacggtcttcttcatggactgtcgatctcacacttggcacgaaggtccaggcatgcaggtggccgcaaagtacaacgaggtgagtgttcttgatgggaaaatatatgtagtggaaagatgcaaagtttgcgcctactggaatatgagacatgttttcgatcccaaaacccaaatatgggagtgtgtggcaagccctagcacggggattcgcgggcgttttggattaaacagcttagctatagatggaaagctttacctgtttggggataaaaatttggtttacaagcctaaagaaaaaacgtgggatgtggtaggatttgagatgaatttccattggattccccatgattcttattgcgtgatagataatgtaatcatctactattacaatagacattccaggttgctcgaatggtatgaccctgaaggaagctcgtggggaattttgaatggtttggaagaactactaccgaaattacctcgagtgttagttagtcgtcatgttagattggtggattatggtggaaaggtcgcgattttttgggagaaggaagtgcgtcctcttatcggctataacaagattaccatttggtgtgctgagattgcgcttgaaagactcaatgcacaagagatttatgggaaaattgagtggtgtaatgttgtgcttacattgcccagttcatgttctattgatgagttaaatgctgtcagtatcattgtctgatgaatgaacagattatattaaatatcaatttgctttcaattcgattaaatgaattcttttttttctttcctttttgtggttaaatatgattaaggtttcctatgtaatgcctctgtgagactgtaacaaagcttcttcattcacaaaaaaaaaacaccaaaacttgaacagctgttttgactctcctctccagtgtacaaaaccttcgctaatcactcgtggggaatcattgtttaaaacgaatttgtgactcttttaatgtgtagggagttgtattacccatctaattcccaaagtcttgattttataaatcagaagctgaaagagcaaatttgaagatgtgataaacattataactactagacagatagagagacagacattaggcagtattgtatgtacaactgaaacgactaaacgacgacggttttataaaccatataatcctccaccctcaacaaatactttttcttttgtataaagaaagataaaaaaaataacttgaaaattaaagagttttctaagcagaagacaaatgtaattcttcttatatatttaagagcttaaaactagataagctcaaggaacaatgcttcttgtttgctggtcaatccaagatcgtttaaggtcgactcactttccccatctccaaacgcatgcctcggatatggcctcacctgtttcaccacactaaaacttaagacaccttgaaaattttctaatgattttaaaccgtccggtataggaccaaaccggtcaagcatcacttttgctatacattatggtagttaaccgctggctagccagtatggccacagggctggccgggagtctaaaccctaatgagtcattgacctgatgcggaaccggcactcataacatcctataaggagtattctatatgcaagaagagagagatttatttacataggtagaagatttaccagtctgtaagtgttgggtttcaccactctggcaatgtctataaagttgaaaagggtctgcaaaagagcgcaaccaacagttatttactaatatattttgagtaatgcaaaactaagtgaaatgaaatttagggaaaaccgacttggagtttgtcagatttaaggaaccggcggccccgacgtgttccatccggcatccggattagaagggtaatggcattctcttcatcagcttgaggctccttaggtaaagacgcttcttttgcatctagttgtctttctagctcctgcaacaacattcagagaaaaaaaaaacttaaatcagtaacgaagagaacgcctacataggaactcaaaccagattattttcacagctattgtattgtatagagatacatttttctgatgtaataaagctgcaggtgttttggctgatctttctctatccactagcagaagcctccaaaacaatccgcagtcaacatatttacaaaaacttgtttgaacgcggatttacaaagagagatataaatgaaaacagaagaagcacctgttcctcctcgagttttctttgagcttcttcctcttttttcttttcttcctccagaaaagcctttctcgcagtttcttcctctagctgacgtgcctcagcatctctaatggacttcatttctttatctcggtcagcttgcagggacgcaacatactcatcatcctgctcgatgtaacagctcaagaattttataataacccataactctcaatatagtagaggggtttagtcaagtaggtagtaagtgttgcctaacctgctgttcccgtatcaacctctgagctgtcagcgaaggtgagggtggacgtggttgggccctcggctgaggaggtaagaatggaagatgattatatccagtttcaggaatgccaccaaacatggctgcctcgagcatgacagcttcatcatgttcctcagatgaaatgcctccccactagagcatacacaatagagtattagcaaaggtaaggactagctactctaaccaataagtaatactggaattctagtctggtttcagtgtaataaacaaaacagattttacggatacctcagaaggaaacccactgccacgctccgctggattaatacttgcatgttcttcttcaggactcccactccgggaacgatcagcgttaggtggagccagagatccggatgctgcacgtcttggcctgtgtctaacaagaggttgctcatcaacgtcatcagagtcatcatcaaatggtgaactaggtgctgccaatctagacaatataaaagacgattagttagacatcgagggatc

SEQ ID NO: 34844 - DNA, 3420 bp, Arabidopsis thaliana landsberg
  unsure (1)..(3420): unsure at all n locations
cgacattgtcagagtctcagatgcttcaccagtttctctaacaactataggaatagggccagcaacatgtgttgaggaactagaaccttgctgcataggttcgtcatccccttgattaatgccttgcatcggttctatagcttgtctagttgcttcaacgttcaactggagcacaatgctttgatggttacaagctaattcatcatgcagcaatgacccacatctaaagcagaatttcttcagtttagcgaaaacaaacctaaccatgactgggactgtggcaggttcgaattcaacagatcgtactaagattcaacgatcggagatgttcattgtaacatgagcccagacttcaccttcagcatccgcagtggcttctataattttggtttcatcaatatgccccagaacccctgctgtctctctaataactgggtctgtcctaaaatcttcaggaatatgcagaattttaacccaaaaggagatttgggagagaaaatttgacaaggtacgattggtccatcgatcaacagccaccatccagaaattatggtgccaagggccattttctaggacagacatgagatggtgttcagctttaaagaagaattgaacagtaccgtcatcattaattctacttgtaacccttccatccaatctccaagctttaggcaaagcacctttaagtcctgctggtttctgatgttgagggtttagacctttgacaattaggctgagacgattatctatatcacgcgagcgcctcgcttcagctgacatcttcagaggagctctctcagatcctagatctaaattttgaagcgcttgccataattctttatccatggattcagagaagacaacaacagtcaaagagaacaacacgaacggaccggcagagacaccggagagtaagatccgcactaggacgacaaagagatcaccagaaaattgaggcggtggaagtcggtggaggatcgctgtagaatcgcccagaaggaagagagagaaaaggttttttacacacagtagtttctttttttttttaataacgattataaactttaaaatataaatattttttaaaaataaaatttgcaaattttaatatatattactttaaaaaaataaatcgtcccccggtataccgcgggttaaaatctagtacttggtaatgctatgtttttatcaaaagtcaccgagattaactaagcaaccacaaaataggaaaacgcatcaaacgcacatatatatgagatcatgtatatgattatatcatgatgatactcatgggcgtagtcaatttacattgtagaaagtcttgtcttctttaaagagttggtcaatttaaattgtccaatgaataaacaaatattatcacaattcacaacttcttcgtcacaaaaaagatttaaaaccaaatggcccatgcaggtttcgaacctgcgaccttcgcgttattagcacgacgctctaaccaactgagctaatgggcctatttgattactaagttgaatcaagctatctaattctaattatacaaaataggatgcataaccaaactgtgtcgttttatcaaatctgccaaactttgtctcacagacactgcacttgatctttctcgtggccaaatcttttgattctccgttcattctccggttccgatctcgaagaagatgagagtagtagtaatatcttcctttgtctccgtctaaatgcaacaatcctttcttcttctccttgcttctgccattagatcaagctcgtctccaccgaacgatccgtttctcggcatttctcctcaaggtttgttttctgctcattgaaagatctgcttcgttttgcttaagatcttcaccataatcactccgatttgatatttctttttctcgtttatgtgtgttagatgagaagtattacaagtcatcttcagagattaagtgtaaggatggatcaaagaaattcacgaaagctcagcttaatgacgatttctgtgattgttcagatggaactgacgagccaggttcttttcattttctcaatttctcttcttctcataagcattttgtgtttttcgattggattgattcttctctgttgaacaaaaattgtgtagcttttctttggtttaggattgtgattggtttcatttgaattcaaaagcggtgattattgaagttatactttgggtttagtggaataaagtttttttttgctttttgggagtatatgtgttatggatgatcatctttttgctttgctttgctttatgtggtaaaaactccaggtacctcagcttgtccaactggaaaattctattgccggaacgccggccactctccggtgattttgttttcttccagagttaatgatggtatttgtggtatgttactcaaattctgtagttatttacattttaaattttgttgaacctcttctttgcaagcatttgtgttttcaaatgcatggcagagaaagaagttgttgaagtgttagcttattcgtacttatggcttgtttacctatgggagcagattgttgtgatggaagtgatgagtatggatggtcaagtatcatgccaaaatacatggctgggaagnnnnnnnnnnnnnnnnnnnnaatctgaagaagaaaattgaaacatataatcaagggcttgtaataaggagacaggaaatcgaactggcgaaagtgggtctggagaaagatgcagcagaattgaagaagctgaaaagtgagcagaagattctgaaaggcctnnnnnnnnnnnnnnnnnnnnnnnnnnncttccttttgatgcataattgaatatttttgtttgctgcttttgcggcatgagagttgaggtttagttttttcatatggtagtaccatgagataattagtttattggaatgtgaaagcggaaccctgcatataagtgtagttcgatgcttgaaatgcttcgggatcagcccttaaagttcaactaaccaccaaaaggataggaagaaagttaaaaaaatacatgagttgtagttgaagtagtggaatctgataggatcattaacttctttctatgatgactacagatgataaagaattctttttgccaagttgacatgttttacatttccctcggctcatttcttctgtagatcgtaaagaacaaattgagaaggtagaggagaaggagcgtctacagaaagaaaaggaggaaaaggaaaagaaagaggccgaattagcagcccagcaaggaaaaggggatgctgaggagaagacagatgacagtgaaaaagttgaagaaagctcacatgatgaagggacgcctgcagtttcacaacacgatgaaaccacacatcatgatgagattggtaattacaaggattatccttcagatgaggttagttcttctcgtgtaaactgagatagatttgcacg

SEQ ID NO: 34845 - DNA, 6925 bp, Arabidopsis thaliana landsberg
tgacataggctgtccaatacatcatgctctcctttttgatgcctttttggaataaaaatgagtagaatagaaagtcatgactcttacagggaagaaaaacaagtctaactcattatctgctaattaaaacaggtaaatatgagcatgtgtgtatgtaaagccacatgcaagtttatatgtatgatacaggcatgtgcgtacacatactcaaacacataagcctaaataggcgtaacaacatactggtacatagatcagtaaagcaaaagcttaaactcagaaattgagaagagtggtatgacatataccgttttatcttcttgccatcttcaagatgcacagctttgtcaagggcggcttctaaaccctgatcataggattcagaatttcattgtccgcaaaagccacaacttttgaaccacagtatacaagagtcatctatctaccaggaagaacgaaaaacctattctagagaacttcttccagcctcactatttaaaattcagacaggaaactctatagagcttatgggacgcagacatgttaaaaaaaatatatctagtgggcattcaaagacaagtgacagacgaatatctctacttatccagaagcaacaaagaggatatgccagaagtatatagagaaagaacgctacaaaacaatatacaatctttttcttctaaggaatttctaactttttttccataattctttcagtacttctttttttgaagaatacatctctaatccagtcacggatatggagccatgtttacgatataaggtgaaagaccaaccttaatatcagcaccgcccacaagggtatgcagctcttcaacagatgcaagagttgtgtctttagcctgagtgagtgcatctcctaaggtcatttctttctcattttcgtcagctgcagttatttcttcatttttagggcttgaagtgtcgcctgaaacatgttcttcttgagacactgtggatgatgcggaaacctagatatatatttaatggtcagcacctccattcaacatttactttgttttcatgcattcaaattcaataaagcatatgcaacatcgagaaatatagaattacttacaatgtcagtctccattctcctgaatacaatgcttatcatctgagtcagcattgctttagaagttgcttggttaattgggctcttgctacatgtaaattctgcatttagtgattgcacctagagtgattaaaaaattagaaaaaagaagagaaaacacacctgtttagagcaatgttatagcaaactctaataactcccagcaatggctccccatgcactgcgataaaaacagattaaaataatttaaattgatattgcaagcaaaataagtagaggaaacagttcagcccactaaaagttacaaaacatagctttctacatcagagaattacctttgaactttcctgaagcaacagctgtaagaagaaccttcagtacttggagtacagtgctgcacaaaattttcagctttaagaattggtataaccaatctcaagaagattttgaaacacgaaggtacatacctgtctggtgatgaattatcaacacagctgcaaaccatgttcagaatgtcggtgaaaggtgcagaattttttccaccatccaaccccggatccccttccaaatgatcataggcaatgagtttctgcttgcaacaaacaaagaattaaaaacatatacagaacattaatagaatgacaggagatacattacataagtacagagtcaaatgaatctcaaacgaaaaaactttaatggagcaaacgtccagggatactcagagcaatttaaaaaaaaaaaattacatacatgaagacaatccaaagcagcatcaaatatttttaagttctttgtctcaaatgcaaggcgtagaggtttcagcacaagctccacttccgctccccctaatgtgtgtccagcatttgctaaggaaacgtttatagtctcactttttgactggctagcctgctgcgctacttcagcacttgtgactttttgcggttcatctgcttctcccccaagttttttcacctccaccttcagcttgtgaactgaagttaaatataaagtgtcagtgtagacgaaataaactgttgaacaagccacctttacatataaattacaaaaccctttaagaaatggtcagataaaagataaccaaaaacacggaagtctcaaactcttacagaaaactaaaatttgacaaataagatttggcaaagagttttcatgatatcaagcgtgactagtagctaccatggttaaaaggtgactaagataaacatcaccagatgactacctaacattacaataaaatttcaaagtaactatcagttttatcgagaaaactcaatccaacaactagcagaaaatggaatactggtttggtcattacctctccactatgctcgagggtgcagcctgcgtaacaacctttgaaccatctataaacaatcacaaatggaagctaaaccagttagcgacagaaaaatcattaccacctaatttcttctatcatatgaaaacatttgtgaccaaggccaaattagagccaaaaataaaaacaaaatgtggagagaagccttaaaattcattgatttctggatagcaccagggagtgaatgtccttcatactacttctaatatcacctcattgatatagatcagttgaaaatctaagtagcacatgcagcttacgcgtagctataccccgaagatgacaagttcaaacaaattttgtaacaacagacgtcacttctctttaatttaacaaagaactaagcaaaccattctgtaatcatgtaagtaactaatccctgtccagaactttcttgtacaataaagcacagattgattcctaaaagaatttacgtcttccaaaaaggttatattactcgaactaacgaataagaagtaaaactattctgatacgtagcatctttgttcacaggtctaattgtcagatacaaactataagccagaaggtcttaaattccatcgaatttcatagtcttagctgtatcctaccacatcatactaaagttcactaacaaaaccaaacactgggaataacctgaaatctcagcttgtgcgaccacattttagtcaaatacatctagcagatggctatgatcgtggaatctacccggaccaaaagcaacgatcgaacgattttgagcaaaaaattgggagaaattgagatctaaccttgataagcttgaatagctttctggagatcaggaaacttctttcctccagactccttaagcatcgtatcaaatgctcgagtcaaaaatccaccagccgccatctttaatccttcctatttcgacttcttcgtcttcttgttctgcttcaacagcaaatgtttctgcacaataccgcaaaatcgaacgaattacacaatcggatcgtgcgggagcaagatcgtcggagatacgacggaatcgagagagaagtgagaaatgagaattgccttagctctctggttttgacccaagaagctcgatcgaagagagatctgaggcaacgaaacgagccactagctagatctaatttcccatttgaaaacaaaattaaattattactaactatttcaattgaagaaaataataataatcaattaaaaccgggattatttctaaactgaattgaaccgggattttggtgggcttttttctgttcttgtgggccaaagagtttattaataagcccaaatggacaacatagagagtgatacaaagatattttaaagtccaaataacaaatgaaccaaaacataaaatatgactgttatttgattttagttctatgtagcagatgagaaaaacgtcggaacaccatgagttgcttatccctgatcttgagttgagcatctctctattttgccaccaaaagtcgaaaaaattcaagcgtgtgttggacatgggctgtaccctcaacatatcatttggcccagtcaaaaacttaagtgtttaatgggcttgttgtctccaacaaattagcctattaaacgcaaggggcaagtcggtaatttgcggtagaagcagaagagtcgttaggttaagaggcttgtcctataaatatagcactattggcgtgatagtggcacagaagataatacccagagaatcagagcaatattcggactaaaactctttgtctttcggttcgtttttgtttcggttagttttgtcttcggttcgttttgttctcggttcgttttgttctcggttcgttttagttcacggttcgttttgttctcaattcgagtcgtgttacgttgccgatcgatataaatcacttgtaactattcgaccggcatgttgtttacccttctcgttcgtcagctaataaaagatacttcgttttcccgaaaatcccttacttattcattgttacaacctcgatacaaacaattggcgcccatcgtagggcagttcgaagcttttcttttcaccgaacgagaacgagtaacgtaaatgtccccagcgatccacaaaactgaagaggacatgatagacacatcaagcaaaaacgggtccgacgccagccaacaacagccagcacttgacgcaatgcaactgcaaccagagaacccagcactcgctcaaactggcttgaatcccgcacgtgccaaaccacgccctgcaacagtagcagcggcagtgggagacaccgcgcttggcggcgacactgcacctgcgaacaagggtttccatctggatgacctcgtgcaaacaatcttggattgactcgacggtcaggacacacgaacgaccaaacaaatcaatgtccttgtcgcaacgcaaattgcttcccaaaatcatatcgagcgcctacgacaccgaagacttgactctcagcctcgcgatgatcacgaactattgccatctccccaaactccatgtgcggaacgttctcaaaatccgacgacatacatcggcatcagttatcgtagaatctgttggcaggcaacctcatgatagcctaccgaacaaccgcatcctaccgagcagccaaagtttgctgaaccgaccttccgataacgtcgaccaaacacgcaacctggaaatcgagcgcatgaacatggtcatcaaagccatgtaatccaaaatgcaccgtgccattagctctgctccggaactggaaaaagtattggaagaaacacaactatcacctttcacggtacgcatctcggaagttcgtgtcagacacataacgaaggtcaaactggttccctacaacgatctcaccgacacaaagatttttctaaagtctgttagcctcgcaatcaaccgtaatcatttctcccccgaccaatgcgacgcgtacagctgccaatatttgtagaaaatctgatcgaccgacgatgcgttaaactggttttcgcgacttgaggccaatacgattgacaactatcaccaacttacggccgtcttcttgcagcactactatgttcatgatcaaaggtgcctctaatgctgacttgtggactatgttccataaagacaaggagccgttgcgtgaacaattcaaaacagttgtttccagtattgcaataactaatgatgccgtaatcgctgccctgcggaacgctgtcttatacgaatcacgattcagggaagacttggtaaccatccagccagcaacactagaggatgccctacttcgctttaaccgatttatcgagatcgaagaaaaagcggtgatggcaagacgtcaacctaaagccttgcattcaaaggataaatcatacaacgaacactacgaacctcgtcagcattatgataaggagtatagtaagggagataagggcaagaaagcagcaacttacgcaattggttgttcggaaagacaaccttctaaaccgtggaacaagtattatcgagagactgatattaaacgtaactcggcctacagtgagttccataaaatctctagtcattcgactgatgaatgtcgacagcttcaactactacttctctcaaaattcaagaaaggcgatctcgacgttgagtgcgaacgatgccaggtaacaacgcaaaaagataaaatgaatctaccaatctacgttggcagaacaatgcattgtttcaattttgccgtcttcgataaaccgatcgtttataacgtcattctcgggatcccttggttacataaaatgaaagcagttgcgtctacctaccatcagtgtgtgaaattccctacaacgcatggaatttatactctaagaggcgacccgcttgttgctcgtatgtgtttcatagtcgagcgtcaactcagaaatgctaaagcttttatgataactgaacccactccttcacttgatgaacgcatagtaccaaggactgaatcggtaatccaagttaacattgacgcaattaaccctcttcgatgtgttggtattcgcgctgatttaccgcaacaattgaaggacgagctcgtacagtttttaagtcagaatgtcatgaccttcgcatagtcaatggaagatatgacgggtgtcgcaccagatattacttgccatgaacttaacgttgactccacgttcaaaccgatcaaacaaaaacgacgcaaacttggtccggaacgcgcaaatgccgtcaatgaagaggttcagaaactactcgaagcaggatcgattgttgaagtgcgatatcccgattggctaagcaatcctgtcgttgtaaagaaaaagaacggcaaatggcgagtgtgcatcgattttacagatcttaacaaagcttgtccaaaagatagtttcccactcccacatatagatcgtcttgtggaatcaactgctggaaacgaattgctaactttcatggatgccttttcgggatacaaccagatcatgatgagcccagaaggtcaagagaaact

SEQ ID NO: 34846 - DNA, 6404 bp, Arabidopsis thaliana landsberg
  unsure (1)..(6404): unsure at all n locations
tacatttatatacaatttgattttgcaatacaaatacaattttattctatacactccatcttattgtgttagttttccttcttagttaagaaaattttaagttaaattttttagatatagaaatataaattggtgtatgtatttttattggttaaatttcctatttcttttagaaaaaatatttaaaaaatctcgattatgcaatacaatttaaatatctattttattataatacaaatacaattaaatttgattgtatacatttcaaatacaattcgattttgcaatacaaatacaatttaattctatacactccatcttattgttagtttccctttttaattaagaaaattataagttaaatttttagatatattaatataaattagtatatgtaaatatgtttatttattttttaaagaaattttttttgacatatgtcaacatctcaatgatagacctgacacgtgtcatgatctcatggattagtaactttcaaaactgtattttatataataagatatatgcttatatgtttcatatatatatatttattagattgacaaaaatattaaactatcattactagtttacttttttgaaatatgattttaataagtatcatataaatgtacaaagtgtatacaatacatgtttttatatatatatatatatatttttttatatatataagcataaatatatagacgaacaaacaatgtagacagacctaggcacctagctatgatctatgcatacggacgaaccttattatacgtacgcatgattattgaatataccttcaaatataaacttgtgagcgtaaggttattatgttttcaatactgacgaatgacgattgtgatcatgttttgaaaaattaataaagtttaaaccatcgaatgcgtaaaccaattattcatcttttaccttaggaaaaagctggatatcattatcatatatttattaagcatattaaaccagaccaatgatttaagtcgaaaatgacagctttcaagctttgcttattggccaataaataacaaactaaaaaaagaagaaattttttaaaacgaactggtgaagtctcgtgttatcacgtgcatggagccagtcagacagagacatcatcaggtgcatgatggaccacggtagtccatttcttccctacaaccatacacgtggcctttttacatttaacagtcaaacatctggtcaacaacactctcatctgggcttccttacatcaaaccctactttttttttgtttatcaaaggcccaattgtatataagtgaaaagtttccaatgggcctttcaaggattattcccagcccaatatttctggagattaggtttatttatcatcgccaccaaagaaatttgagccgaagcttcataatcgcagtctgaggtatttttctcgatcctcaaacatttccaacacctaaaggcttattcgttacagatttctcaccaatcttcggatttattgtgctcgtacgataagcatatattagtaaatttagtggctatttaggaaatttctcgtttgatttcttgttgttgttgagatttgaatctgttgtttatggtttttgtgattacttggttttgcagagacaatgtcgacagtcggagaacttgcttgcagctacgctgttatgatccttgaagacgagggcattgccatcactgtatccttaaatctcttgacattttctgaatctcatgtcctagctattgttgtcgctatatcttgttttggttggatccttttcattatcgagacaacatggtgtgagtgtttattttaggtttatggagctctcttttgatgaaatagtcagtaccaagattcatgtttgctttggcacactcaatagtcttgtttgtttatgtgtttgcagcatcattttagtccttgatcattgttgggcatgtgttaaatgacctatctgcaaagttgttggtttagggttaggaattaggattcttttttactggatttaagaaacgtgtttgttctattagttttgatatgtaggttcaatgtttgggttaggtatccttaaccctattattgatagtctgataagattgcgactttggtcaaagcggctggtgttgagattgagtcttactggccaatgttattcgccaagatggctgagaagagaaatgtcacagaccttatcatgaatgttggtgctggtggtggtggaggcggtgccccagtgtctgctgccgcacctgctgctgctggaggagctgctgctgctgcccctgctaaggaggagaagaaggtacaaatttaaagaaacaaaaacattatattgttatatcttttagctaggtttgcttattgatactctctatgttgtttaattgtttgtaggacgaacccgcagaagagagtgatggagatcttggtttcggcttgttcgattagttgtctcctttcattttaagtttcatatgttctattgctttagttgctttgagattttaagttttgtcatttcgacactactacagtttactcttatatcatgtactggagttagcaattggctcacgaccttctttgtagttcatgagagttatcttatgctcaaaatgcattggagcttattgaatttgacttttggattcagctgcgtcttctttcctaccaaatctcagtctatttataatttgatcttgaaatagaaaagaagaacaaaaaatctggaaagatatgaacatctgttacaacttgataattcagtgaatacgcaggtttcatgaaccatggtttctcagaagttttataagttttttactgattatactaatgttgtcaaatgtataaaaagtaaaaattgaaccttctgcataatccagaggctttcattttttttttcttttcttcttgtgatggactcgttttagctgaaattagaacgtcggttagtaccggcggagaatgttcggagtcgagtcagtcagagagttctgataataccaaacggctactttgaagttcacggctattaagaagtcgcacatggaacttgatctcgattcgttcctcgtatcggactcagactccgattccgatttggattcttcctccgttcctcaccgtactgnnnnnnnnnnnnnnnnnnnnnccagttcttcatcggcttcgtcttctcctccttcctcaccaccgtcaattaaccggcggaaacaagacgatccgaatcgccgcttatcagaagcccttactaacgttgctgtagtgagacctgaatctgaattacatcgcggatttcctccgacgcggcgaaattcgacttcttcttcttcgttgagacagttgcctttgccttcactattggcaggagtaaggtcgaatgtgaagcctggtgctgcgcttgctgcggctgtggctgcttctagattggttcctacaccacacgctgctattatcaagtcaaggagagctagcagtgcaagtagtgaattgctgctgcaggtttcaaatcaagaggaagatgatcacgaagtactttcttctaatggagattctgttggagttgctgctggatccgtttctgctgatgattttcgttcttttggtggagaatctctgctggaggatgaggataatggagtttctggtgttgcaagtctagaagacgaagctaaagtaatggaagttcaagctagtgatattactgagagcttaaaccctgacttagtcactgtttcctctggttttgattctgaaggaaacgtctctacagagaaagaagcggagaccacaatggaagccggaaatgctgctattgatgacgacacagatgagacaatgttagtcgcttctttggtagagtcttcagaatctcaacatttgactgattctgaggggaagtgcgatgatgctaaggtaagcaatgatgaggaatcaagtgttggagatgttaagagtgataaatcagatataattataccggaatctaaaaaagagggaggtgatgcttttattcctgatgatggaagctcaatgtctggcatttcagagcttgtagaagagaggattgctgagttggaaaatgaaaggatgagtaaaagagagaaattaaaatcgcaatcttttaggaagcagcttgtgctggctgaagagtttgagaagaaacaagcatatactggtttgcattgggaggaaggggctgctgctcagccaatgagacttgagggtgttaagatcggttccacgaatttaggttactttgatgttgatgctgacaatgtcatcagccggaccatttcatcgcaggcatttaagcgagaccatggttctcctcaggttttggctgttcatttgaattacattgcagtgggtacgtccaaaggggtcattgtcgttgtaccaagtaaatattcttctgatcatgcagatcaaatggaatcaaaggttgtcttttacatcattacttttgtccatttctaggttatttgtacacgagtttattataaccttacctgggtagatatatgctcatattattaatatctatgtttacaaatctttagatgatttggcttggtttacaaggagaaaggtcccagtccccggttacctcagtttgcttcaatcagatagggagccttctgctagcaggttatggtgatggacatgttacagtttgggacatgcagagagcgtcgatagcaaaagtgatcactgaacatactgcaccagtagtatatgccttttttctaggccgggattctcagggttctcgccaatttaaagttattacaagtgatactaagggtgttgtttttaaacacagtttttcttatgctcggctgttgaacatgtatacggtggaaacgcaggtaaatttagtattctgtaagatcatatttgcttttgcttgtgattttgtgtatgtgttctactggtttcttgttcagccttactaacattgaggaatgggtttgtacaccttattttaattgcatcagtgtcttctcgatggacaaaaaaatggaacagtcctctcggcatcacctttgcctgatgaaaattttggaagctccttggtgtcttctaaggggggtaactctgcagttccatccagcagtataagtagcatgatgggaggtgttgttggggttggttcgacttggaagctctttaatgaggattcaacttcggtggaagaaggtgttgtcatatttgccacctatcaaactggactagtggtaaatattccagatatttgttcatagtcaatttactggttacgcttctggaaatgatccttttctgtttttgtcaggtaaagctcattccaaatttggaggtgtatgcacaacttcttaggccagaaggggttcgggaaggttccatgccatacactgcctggagacgctcaacaggtaattcttctccctggtataactgtgtactttacatgtactgttttacataggtaaaattttgcagaaaattattcgaaggaggcagaagatagggtttcttttcttgtcattgcctgggatcgtcgagttcaggttgccaagttggtaaaatcagacataaaggaatatgccaaatggtcacttgacagcccagctattggtgttgtttggctagatgaccaggtgtgtatactgatataagttttttctaagcaaatacatattcatgagttttcggcttttctctgcatattcagttgctggtgatcccaactgtgacgggccatttgtatctgttcacaagagatggtgtggtaattcaccagacaaacttttcagtggctggttcttcagggaatgacctgatttcctatcatacgtactttactaatgtctttggaaatcctgagaaagcttatcacaactctatgggtgtcagaggggcttcagtgtacattctcgggactgcacatcttgttatctccagacttttgccgtggaaggagcgggttgatgtgttaaggagaggaggtgactggatgggtgcatttaacatggcaatgtcactcttcaatggtcaagctcatggagttgttgacctccccaaaactgtggatgccataagggaagccatagcacccagtttagcagagttgctactttcctatgtagatgaagtattttcttatatttcaatagcattttccaatcagattgaaaacaatggagtaactcatgagccaagtagtggaatcaataatgtcaatttagagatagaagaacaatacaatcgtgttggtggtgttgccgttgagttctgtgttcatattaacaggatggatttgctctttgatgagatattttccagatttgttgctgtacaacaaagaggtatatttttcacatctagatgtattaccatcaacttccttttttttgggc

SEQ ID NO: 34847 - DNA, 3020 bp, Arabidopsis thaliana landsberg
tacaaaaaatctaagatatatatagcaccaatttttaaagagtttgtttttttgtgatttcatgatatttatcaaatacacatgccataaataatctaatttttcatgtctttttagcactagttggctagctaatttttcatgtctttttttatcaaatacacatgccacaaaatagtcttaactcaacaaagtatttattaatttcccaataacacaaaacatttgagaattgggaagagaaaaatatatatatcacaaaaagttaagactatatctagtggcacaaaataaaatcccgtgatgcaatttaatcccaaagtaatataaatactaatcactggagccacgtcttcactccaaaaacattcgccaactatacacatataacaaaacaaaacactctcttgtgacttctcttctcttcttctctctcgatctcttccccaaaaatcttcagatctctacatcaccggagagacgagaaacactcaccgtgagaaaaccatgattccttacgctacagtcgaagaagcttcaatcgcactgggacgaaacctcacacgtctcgaaactctatggttcgattactccgccacgaagtccgattactatctctactgtcacaacattttgttcttgttcctcgtcttctctctcgttcctctccctctcgttttcatcgaattggctcaatccacctcagatttgttcaatcggtataagatccaaccaaaagtgaaaaactcgttctcatcgatgttgaaatgttacaaagacgtcatgaagatgttcatcctcgtcgttggtccattacaactcgtttcttatccttcgattcaggttaatttctgaaatttgacttcggatttcggaattgatgcgatttaggttgattttgtttttcgtgtgttgaaacagatgattgagatacgaagtggattaccattaccatcatgtatggagattgtagcacagtttgtggtttacttcttggtagaggattatactaattactgggttcatagattctttcattgtaaatggggttatgagaagtttcatcatattcatcatgagtatacagctcctattggttatgctgctccttatgctcattgggctgaggttttgcttcttggcattcccacgtttcttggacctgctattgctcctggtcatatgattaccttttggttgtggattgctttacgacagattgaggctatcgaaactcatagcgggtaaggaaaaggaatggttttgaattgtttatcttagtttataatgcgttggggctatgtgggaagtttcaatagtgcgtttaccttttgttggtggggctaaggttaggcactagccttttctgatgcttcattgactgtaattagctctaggtgattgtttagagactgcttagttaatcttttgtggtcaacatgagcaagaaatcattcttgagatgataagcatcttgtcttgttcaaataagtatttggacaatatgatgattgcttggtgcatgaaacttgtttctctggagataaattgacttgttttttttatttttcgtttgcttttgaagatatgatttcccatggtctctgacaaagtacattccattttatggtggagctgagtatcatgattaccatcactacgttggaggacaaagccagagtaactttgcttcagtttttacttactgcgattacatctatggaactgccaaggttagtattcatcaaaagtttaatcaaatactcaccgaattaggtttccatttttccggtttctatatactaattctggctgaaaacatttgatcatgtggctatatcagggttacagattccaaaagaagcttcttgagcaggtaaatctatggatgccacttttacttttccgaagacccgtaaaatgtttctatttaaccgtgattttcatgtatgcttcattcatttcagatcaaggagtcgtcgaagaagagcaactagcataccggaggaataaaatccgattagtaaaaaccggagaagaagattttaacctttcaaagaatagctaagcatgcactactacaagttacgtagtcagcttcacgaaaagagaaagggagtggattgaaatttcgggtgtgtctctcttatgtcatcagagttgttactaactaccttctttctttagttcacatgaaaaatgctctgcttccgacatgtgggtcattgatgtataagtgtgtcggaactcggttttgctctctgtcattttttaatatttatgtttcgtcgtcttgaagaaagaagatgtcgtcatcaaagtcttgtttgtctttcatagtaagagaccttgttcgtaaatcacctcttcggtaacttaccacttaggttaacagtaaatattatatattgattgtctaacttactaatcaccaagcccgtctagctcagttggtagagcgcaaggctcttaaccttgtggtcgtgggttcgagccccacggtgggcgcttatttgtctttttagaaaatccccatttattttagaaatatctccgtcccaaaaaaataataataatttttagagaaataggaaaatgacgaaaaataatgagatgtcagaaatcttccaaccacgttttcacagagagccacaccaccttcatcaaacttcttcataacaaatcacatttctctctcttctctgcttgaatccattacagaggtacgtgatttcttcatcagatctttcctcacagttcgattacgtcttcttcctcagaatttgattgttggatcgaattttcaattgatttttgatatgttcgcgttctgactttttttccagggattgtggagtggtttggtttgatttgatttcgatctgtgacaatggtggagactagtatcgacatggaggaaggaactctcgagatcggaatgggttagtcaccaccgatctttgcgttggatcacatctgttcttccgttttctctagaacgtttggttggaatttgtcta

SEQ ID NO: 34848 - DNA, 4128 bp, Arabidopsis thaliana landsberg
tttgttattcataatcaatagttactgtattattcttcgttcgaaaccgttaaaaaggtgaattatatttctccattatatatcttagtaaaacaatttccttatctgaccagcaaattctcaaggaatcaaaattgcttcggaaatcctaatactggtatgcataaatcaaattaactttcaaacaaaactttgtgaaatttcctgaagtaacagtattgaaaaccgttacccccatacgaacgttacagagaaaactatttttaaaagaaatgattgaataaataattgagaagtaacaggaatatgttttagtcaagtgaatagtgattaaatttgactccgtcttccagagtttgactctgttaaaacgtaatagagatggactaataaattaggaagtttaaaacgaaaactttataaaataccaattatgtaatttccgtactaatcacccgaaataactagtgtccaatttataaaagaaaaccattacatgataatacgtagaagtacattcaaacccaataaacaacaacaaggatcggcataacctcacgaacgcaacaaacactaatcaaagcaaacaaacatgaaaaccacgaacacgaaacaaatatttatcctcttcacttcctctgtgtctcacgagtagtggtcgtagtagtagtacttggagctgaagaaacatgttctttgtttccttcatcagtgcgaagccctaaagtgtgcttcaccgcatcagtagctcccatagccatctgtttcacctgctcaccggtctggcccaagatcccactggtcttctccttacctgcttctgcagtctctttggtatattcagctgcatcgtgtgccttgttcttgattgcttctccagtttccgacatgtagcttcctgtcttgtctttggactcttgagctctctcttgagtcgtttgtgcagcttgagacgtcttgtctttagctgactgagctgtttcatgagccttttgttgggctgactgggctgtctcttgagttttgtccttagctgcttgtgttttgtcccccatcgttcccatagcttccccagttttctcctacagttcaagattggatttacattataaaaaatactaatcagctgttttttttttttttttctaaaatcaaataacacgaaacatcacaaaattgaaaataataactttcaaactcatttttgttttttcacatacaaacaatatttacttttaggttttgtttaagtttctaaaattaaatcatttaatgctgctatccaaaaagtattatagttatgcatataaatcgtttagtacctgagccttgcctctggtttcaccagttttgtaactctgttcttgatgagacgccattttctctcttccaagaaattcgaaaccaaatttttcttgatgataaaagcttttttttttagatcttgtgttttttgtgtgtttggatttgtgagttgtctccgactcgttattcagagttatttatagcaactcttggtcggcgagagaacaagataggtgttgcagtttcgcgacaggtgtgtaggtacgtgccccgattaggttgatgtgacgaagtttcgaaacttggagttatgtgcgagtgttaaagttaggtttctcgttctcatgatgacctatacctatgtgacacgtcatggtaaaaacggagctacggaagatgttggacacgtggtgactcacgttatcttgatattggatattcatctactcacaggcatatattatgcaaccgccattactgcatatatatttacttttttctaaaaagaaccaatacactattgttacgtggattcgaagtaattttaatataactataaattcttgaaaatcgatcggatgagtttttttattgtattcgttattgatatattactgataatatattttttgacaacaataaaaagtcataaataattgtcaccggaaaaaaaggtttaagatcttcctattgcctgtcatcctacttcacttcttgaccaagcaacgttagggtaataaatcctcaaactattcacctccacaaaaaaattagccatgtcaatcgtcaatggtatgttattttccacgtgttagtgtaatgcttagatttaggattttactaaaatatacactttctaattatataaataccactataatgcatatcaaatcccttcaagtattctacaagcttacaatcttaattaattaagacatttcacagaacaaccaagaagatgtcgtcgagccagcagttgagccacagcgccggagaagtcaccggtcaagttcaggtacatacaacacacaaaatagcgacatttgttttgcttatatgatctgaaatttgacaattttcgaaatctgatttttgtgatgaatgaaccatcaaatatatgtttatttatagctgaagaaggaagagtacttgaacaatgtatcacacgcaatgaaccagaatgctgatcatcacacccactcacagtcacagttacactcagagcatgatcagaacaatccttccctaatttctcaagcctctagtgtcatccaacaggttaacgattcttctcaaaaaatttgttcattattattaattatagacaattatatgcattaattatgattttggagtgtagacgggtggacaagtgaagaacatggcacaaggagcagccgatgctgtgaagaacactctcgggatgagtccggctaccaacagccctagcagcccggctggcacgacccgctcgaacaagcccggttccaagaatatctaaaaaggagttatttaagaaatattggctcaatcttttccaataaaacaaaaatgaatattgttttctgattgctttggttgttcaaatttctgaattttgtggtatagtactgtatgttggagacatttctacgtgtcttatataacccctagtaagggtttttatataataaattagtcatatacaataagattattgatttcttatataaggaaaacaaattaaatctcaaatatgtacgtatgaattgtcgatcacaaggtgttgtggttttagaagaatgaagaaatctcttatacaaagattaaaatattattaaacttaactgttcttgaaagttctcaactcttaaggattctacaaaaaatatgagattaccaccgtatgacagataacttaacttgtaattctagactcaatccggattactcattcggttttgatttatgatatgttttaaacttttaatcaattatttgttggaaaaaaacacgagattactacatgattaatcgatcaaatttttactttttttacatactcgattgaaatagaatcatgttattatagatataatattctaagtgtatattttctattgaataaatatttaatataaatacacatctataaaaaaaattcaccaaaaaaaaatgtatatatatatatatatatatatatatatatatatatatatatatatatatattttggcgcataaaacccttacagtttctcatgtcaagggttcaagtctctcaaataccattttaccatatttttaatatttatgggccaacaaaaaaattggcagtcagtctataatgttgggccaaccctgatcatagacaatgacattctacttcttaggcttcggctacacttcttaaagttgtagctgaagcagtggtctatatgatcatatctcgaaacaaagaaacaatatctatcacaactctcaaatcatccttccctcaatcatcttcaagaatattgactgatggattaggaaaatatatcagtcgaaaacacatgaagcgttggaaagatcttatcttgctttggattccaagaaacactaaactaaatcaaacacaaatttaatgtaatcttattttagtgttttttcaagattattcttttctctagattattcacttttgtaatttatttacttcgttaattaataatggtatttacattttagcagaaaaaaaaaaaaaactaaaataaaatcaaaatggagatcacttctaccaacaattagagatagggagggaaaaatcattttttgtgatctcctgatgtggtttcaaattact

SEQ ID NO: 34849 - DNA, 3740 bp, Arabidopsis thaliana landsberg
gaaaattatacaaaaccttcattatttggttttgcaactgcaatgtttattttttggtagtgtatagactagcttaggtgggcaaataaaattaatgatctatatcgtactcttatatataaaagtgttgttgtaatatgtataaagttataaaaaaaagaagagaaattgttactacaagactaaaaatacgagacatacgtatgtaataatttattttctaattcataaattgttggattttattgaatgtagaatgacgtccaatcgtcgacggaacacaaacccttccagatgaacatattcaacttatcccactgaaatttctactcctcccacagaaacaacaatacgggtaaatttagtaatatatatatatatatatatatatatattaaaaatttacttaaatttgatagaataaataacattgtattcacgaaatttgtagaacatagacaagtacaaatggacgtacatacatgaaaaaacattaattcaattgttcgacgaagcaattgccatgaataattatactctcaagaatcctactgctatcggtagagagtatatggttgaaaagttcaatatagcattcaacatgaaaattacttatggtttttcaaaaacaagcttgatgaattcaaaaaaagttacaagagatggaaagctcttacgcacaaaataggcatcacggttgatcctaatacatctttcataaatgcatctgacgcatggtggacagaacaagagtttgtaagtacatcaaatatttgtattaatcaattataattcaaaatttttgtatcacgtatttatattattttaaaattacagggatgcaaattaacaaaaagcttgaaccgaaaaccgcttgtattttgggacgtaatgcaacgatgtctcgtattacatgatgttcaatcacaatctcaacattttgctcgtcaaagaagagaacaattgatccacgagcatggagttgatgaagaaggtgaagattactcagatagtgacagtggtaacatgccacaaaccgaagttcctgaaacgctagaagaagaagaagtgtatcgtgttaccattgatgatgatgaaatattccaaaattctgctgctggaaggcaacaacgaggtaggccaaattttcagtcaaccgctaaacgtggaagtagtgcacaaagatctggaggaagctcacgagtttctattggaagtggttcacgacgaagtcggcgacgacaatcctttgaaacaacaatacaagacagcatcactggcttcagagaattccaacgacaaagttttcaacaacttcgtcctggtgcttttgaccaagatgattacgatgaatttaaaaaagcggaagcgatatttatcgcgctagatcttccctagcacactagatttcattgggcatgcattaatgcacttaaaaagctagtattttggcgtaagtatttcattgatatagctgcaagcactgacgaggataaggtacaactgttagaagctatgagtggtgttttacgcaacaaccaagatatgccaaaacagttatgttcagaccattcatttgggagtccagattcaggaggtatatcatctggaagtccatcctcagtgggtaataatttgggagggcaaaattcacccgggttttggggtcccatttatccatagtggagaacaccaccaaacgttgtacagtggggaacaccaccaaacgttgcacagtgcggaacaccatcaaatgctccacattggggaacaccaccaaatgcacagtagggcacgccaccaaatgttccacaatggggaatatcaccaaatgctccacaattgcggcaaacagaaaattttcaacaaggtggttcaagcggaacgactccaacaaatgttcaatatggattttcagttggatgccaacaagatggtgcaacaactgaaactccaccaatcattcaacaaacatcatcatctggtctcggtttcacaaattattttgaaactggacaaatgccacaaacacctagaccatgaggtctctttaatatttggggaactccgcaaggatctaatgcaagtcatcacagtgatgtaggagatgaagattagtttgtgttatttgtggtttatcaatctcatttatgttttgaaatgatttatgtttttttttagtttaatgttgaatttatatttgtaaaataatctatgtataatgtaagaaatcgtttgtattgaatttcaggcattttgtatatgtcagttgcgatcataagaccttaacaatctaagttacgaagaaagaattgaattgtggaatttggaaaatgaacaaattgaagagttagtaattcaaccagctttgaattattatgaccgatattttcaaagagcacggtccaaactgatagaggtttgggatggagaaatatatggcgtcgactacaccaagatgatgctgcttgtcttcaattattacggatgtcatttccatgtttcacgatattgtgtaatatgttgcatacaaattatagtcttcagccaacattgaatataagtattgaagaaagtgttgcgatgtttctacgaatatgtgggcacaataagtttcaaataaatgttggtttaagatttggacaaaatcaagaaactgtgcaaagaaaatttagagaagttcttacggaaactgaattattagcatgtgattatattaaaactccgacaagacaagaactttatcgaattcctgaaagacttcaagtagaccgaagatgttggccttattttagtggattcgttggagctatggatgggacacaggtgtgcgtaaaagtaaagcctgagttacagggaatgtattggaatcgacacgataatgcatccttgaacatcatggcaatatgtgatttgaatatgttattcacatatatctggaatggagcaccaggttcttgccacgatacagctgttctgcaaatagcacaacaaagtgattccgagtttcctttgcctccgtctcagaagtattatctggttgattcttgctacccaaacaaacaaggatttctagctctttatagatcgtcacgaaattgagttgtgagatatcatatgtctcaattctatcctggtcctcctcctataaacaaacatgaactgtttaaccaatgtcacacatctttacgttctgttatcgagagaactgttggagtttgaaaaaaaatggaggattctttctgattttccaagatataatgtttttttttttttgtcaaccgatataaattagaactcaaaagagccaatcccgagggatattgtttacatacgtgacaagatataatgttcatgttcaaaaaagagtggtaattgctacagtgggattacataatttcatcagaatttcaaacttctcagatgcagattttgcagatgtaatgacagaggcaaatataaacaacatagattttgatcatgatttagatgacatagaagcaacagatatagcagatggagaacatatgacgcaaataagagacaatattgcaaatatgttatgggaaaatcaaagtaatagataatattttttttaatgttttttatgatgaaattagtcgacgcatgtaacaatatgtatattacaaaattaaatttctattttgatcaatttttatattactggtgtataaatatctgttattgtttttttattaacataaaaagttaattactta

SEQ ID NO: 34850 - DNA, 6354 bp, Arabidopsis thaliana landsberg
  unsure (1)..(6354): unsure at all n locations
catgtctctgtctaagacttgtcatttttaatggataactgttgtctaaagaccgaaattaaaaactgtttatgatccatatgtctaatgtctaagtggttttaaagccgtagatactaagaagaatcaatgttcagtctcaaatctcactctaaagactaaagtttgaagccgtgggtaccattttcttcgtaccaaacataacccaagccaatgttttgtctttcaagtctctatctaaagacttttcataacccaatccaatgttttgtccctcaagtctctgtttaaagacttgtcatttttaaagtcgtgggtaactgttgtctaaagaccaaaacaagaaaccaaacatgatccatatgtctgtctaactgatttcaaagccgtgggtactaagaaggatcaatgttcagtctcaagtctcagtctaaagactaaagtttgaagccgtgggtaccattttcattgcaccaaacataacccaatcaaatgttttgtccctcaagtctctgtctaaagacttgtcataacccaatccaatgttttgtccctcaagtctctgtctaaagacttgtcatttttaaagcccttagtaactattgtctaaagaccgaaacaagaaaccaaacatgatccatatgtctaagtggttttaaagtcgtgggtactaagaaggatcaatgttcagtctcaagtctcagtctaaagattaaagtttgaagccgtgggtaccattttcattgcaccaaacataacccaattttttcttttgtctaaagaattggttatattgaacctcaagtctctgtgtaaagactttttaagccgtgggtaacttgatttttgtctaaaaacacaagaaaccgaacatgatccatatgtttagatattttcaagcccagggtaccaagaaggatcaatgttcagtctcaagtctcagtctaaagactaagttagaagccgtgggtaccatcttcctttcaccaaacataacccaatccaaacttttgtctaaagaattggttacttcgaaccccatgtctctgtctaaagactggtttaagccgtgagtaacttgatcattgtctaaaaagtgaaataagaaaccgaacataatccatatgtctagagatattcaagccgtgggtaccaagcaggatcaatgttcagtctcacgtctcagtctaaagactaaagtttgaagctgtgggtgccatttaccttccaccaaacataacctaatccaatattttgtctaaaggattagttactttgaacctcaagtctctgtctaaagactgttttaagccgtgggtatcttgagctttgtctaaagactgaaacaagaaacagaacatgatccaaatgtctagaaattttcaaggcgtgggtaccaagcatgatcaatgttcagtctcaattctcagtctaaagacaaaagtttaaagccgtgggtaccatttaccttacaccaaatataacccaatccaatcttttgtctaaaggatgggttacttcgaacctcaagtctctgtctaaagacttttctaagtcgtgggtaacttgatctttgtctaaagactgaaacaagaaactgaacatgatccatatgtcgagagattttcaagccatgtgtaccaagaaggatcaatgttcaatttcaatctaaagactaaagtttaaagccgtgggtaccaatttcctttcaccaaacataaccccatccaatcttttgtgtaaaggattggttacttcgaacctcaagtctctctctaaagacatgttttaagccgtgggtaaatagatctttgtctaaagactgacaaaagaaaccgaacatgatccatatgtttgagattttcaagccgtgggtaccaagaaggatcaatcttcagtctcaagtctcagtctaaagattagagtttgaagccgtgggtacaatttaccttccaccaaacataacccaatccaatcttttgtctaaagaattggttatattgaacctcaagtctctgtgtaaagactttttaagccgtgggtaacttgatttttgtctaaaaacacaagaaaccgaacatgatccatatgtctagatattttcaagtagaaggtaccaagaaggatcaatgttcagtctcaattctcagtccaaagactaacgttagaagccgtgggtaccatttaccatccaccaaacataacccaatccaattttttgtcttggttacttcgaacctcaagtctttgtctaatgacctctttaagccgtgtgtaacttgatatttttctaaagactgaaaaaagaaaccgaacatgatccatgtctagagatattcaagccgtgggtaccaagcaagatcaatgtttagtcttacgacttagtctaaagactaaagtttgcagccgtgggtaccatttaccttccaccaaacataacgcaatccaatcttttgtctaagagattggttacttcgaacctcaagtctctgtctaaagatctttttaagccgtgggtaacttgggctttgtctaaagactaaaacaagaaacaaaacataatccatatgtctagagatattcaagccgtgggtaccaagcaggatcaatgttcagtctcacgtctcagtctaaagactaaagtttgaagctgtgggtgccatttaccttccaccaaacataacctaatccaatattttgtctaaaggattagttactttgaannnnnnnnnnnnnnnnnnnnnnnnnnnnnnnnnnngagtaacttgatttttgtctaaaaactgacacaagaaaccaaacatgatccatatgtctagatattttcaagccgagggtacctagaaggatcaatgttcagtctcaagtctcagtctaaagactaagttagaagccgtgggtaccatcttccttccaccaaacataacccaatccaatcttttgtctaaagaattggttacttcgaaccccatgtctctgtctaaagactgttttaagccgtgagtaacttgatcattgtctaaaaagtgaaataagaaaccgaacatgatccatatgtctagatattttcaagccgagggtaccaagcaggatcaatgttctgtctcaagtctcaatctaaagactaaaatttgaagccgtgggtaccatttaccttccaccaaacataacccaatccaatcttttgtctaaagaattggttatattgaacctcaagtctctgtctaaagacttttttaagccatgggtaacttgagctttgtctaaaaactgaaacaagaaactgaacatgatccatatgtctagagattttaaagccatgggtaccaagaaggatcaatgttcagtctcaagtctaagtctaaagactaaagtttaaagccgtgggtaacttgatctttgacaagtaaactgaaaccaatcccaagtatatttgtcaaaataataagccgtgggtaaaagatcggttttttcagtctcaggtcaaaatccctcataagccaactcgacgggacaatgtccccaagaaagaatctgacagaacactaatagttgagtgtctgcctatgatttctcttgggtttgaaagaaaaacaaaacaatgaagaaatcaaacaaacaaaacagcaaaacaagagcaacaaaaccacaaccgatcgcaacaataaagcggtacaaaaaaaacaaaacgaaaaccaaaacctaacacaaaaaagaagaaagaaacaatctttaattcacataaactttgaaaggcagagtcgcgattcgtttggttttgcaaaacgaaaagagaaccaaacaaaaacatgataataggaaaatttagaaaccctagaaatcaagtggattagaagaattcttacagtgattatcgctacaaatcttcttcggccatgaatgcttcgatcgagagaaacatgcgaaacagagaaagatttgatgataattaaatttagaaaccctagaaatcaagagaattagaagattacttacagaggattatcgctccaaatcgtcttctgtcatgataaagcgatcgagagaaatatgccaaacaaagaaacaagaagggtaaacaaagttctgagaaattatgacgctctctgataaccttccccttttttatagacactacaacggcggtgccagctggctgatttccttttttctgtaacgccaaatttcttcttttttagttaacataactttacttatttgtagtttccatttattaaaagtgggccttatgttagcccaatttaaattaaaagtgtgccatataaaagctcatagcttctccaaatgatgatgaaagaaagttgaaaaaagagagctcctcctcgccttcaacttccattcagtttggactttcgagacattattgtgttacaaagacaattattgaaaagatgccgagcatcagatgatggattagataacggtgcaattgtatgtgaataagaagccaaaccagctatttgttggattagagcgatttgggtctcaccttctaacagaagaaaaggcatagccacatggttactcgataccacgaagtaaacaactctagcataccacctaaaacaattgtcatggacctcgcatgctagcacgctaatgttttgttaaccataaaccaaaaaaacaccagagcagttcttgttcttgtctgtgccaggctcaaacccaactttgaatcacagcaatatgaatggtcctaataattatcacacaaggtgtatgctttggtaagagcttaacaaagaacaaaccggacaatcgagaatccgataagcctttcaaaccagcgaggtgtagttagggaagagatacatcaatcggtctagagtttcaggattaaacttccgagcaaataggtaacatggacgttgctctcctttccatagacacggctttactgtcgtcactttctgcatagaggatggttatggatcagtaacagaaattccaagaaccatgataatgagaagaaagctcgggtgttttacctttaaatcgcttgtgacatggtaagcaagttggatggactgcaaatcagattaaaaccacaaaataagatcgcagaaaagaaaaatctaactgagcattgagaaagagaagaacaagaggaaccttgattttcctgatgaggtaaggagtgatgtctcttgcattgtacagcttcggatgccatttgccctcggaccaatctacatgtgtgaccgaccagtttgctattccatctggatcaatcatctgaaagaaagagatcatgagcggagagattatgatgaagttagaggaaaatgagtactttaaggcttaagggtaataaaaggaagacgcaagcaagcagtacaactgacattgaaaagagttggaaaataatgctcgtccgcatagcagttgcgtccttccatatttggctgtggaaaaattagtataagccgataaggaaaattctgcttagtatacaaatgctaacgattagagatcaatagtgaaattccatgacatcaaaacatgtctgatgtctcagtattccaacatatcgtgtctatgcgataagaaaggaaaacacatgagttttgtttgaacatcacacagcataaccactttgtaataagctacaatctcaatgggcatccacttgctaacttgactagatgacttagttgatcaccaaatatgcagagcacaaatattatgggagatatgcagcaaaaagtgtcacgagatagaatattaggacatacgacaagatatggtctggctggttataaacaaatatcatgtgaatatgagaacacatgaaatttaaggcttacttaccctacagtaaagcttgaattttgtgtagtaaaggctgtccgccatgacgactatagcatgtctcctcttcattgaaaaccactgaaaaagatgattataaagacgcaccggaacatgtcaaggttatatagaactaacgggaaaagaaattcagccatcattatcaggaatgagaagcaaagtgagggatgatttagatagcagggagagacgaaaggtaacatcgatgaatacaataataacattgaccattgtttttttctgaactgtaaatccctcctacaaacttctaatataaacattttgcaggaagaagaaaggggaaaatatgatatcttatcacataacgcattaacgcatacctgtgagcccttccgaaaatccttcttttcaacctcaggcagcatatgttgtgaatacctaccagatccatgtggtccaggatcctcaaaactggaaaatgcaagatgaagatcttaatagtaaatacagagaagatagatgacagtgagacataaa

SEQ ID NO: 34851 - DNA, 1247 bp, Arabidopsis thaliana landsberg
aacagagttctctcataatccaaggcttgctttgatcttttagaacattctaatattcacagagatgtaaccaaactatacagttgcatccagaaaatccgactcaagcgatttcataagcacgagtcaaccaccacagatgaaccaaactatatacagtttgcatcagaaaaaaattctgattcagcggagttcatgagcgagccacgaccatcattatctgaatttagccttgagcccagcagttgaggtacatgacttgtcggagagactcatcgggagtggaagaagaggtacgacgtctttcttccgaagggagagagtcgccggttagatctgcggcggcgagaggacggagatcggaggaaagtcttcgttggagacggtgagcagaggtgagaccgctttttaacttgacgccgtgatcggcgtttccttgaacagctacgaacgatgctgccatccacactttgttcagataactcattctttaatagtgattatatgttgtagatcctttcttcgtaaattggaaacctttgaaagatttgagaagcttttgttaaaaaggaagattagttcgatttttgtaggaaggaaatgaagagatgaggttggtacttatagccagagggatattggggtgagggtaaataggtaaattcaaaaagatctaaaataagcgataccgtgcacaatggattagtgggatccaggtttaggaaagcgatacggtacgatatggttaagttatcgtgaaatatctcgggggaaattgaaagtgctgagtaatgaggaaacaagtggcgagcttagagggtcctatcctcaagatgagtcacccttgcttcaattatcgaccccttcatgtgggccccattcttaattatttttgtaatttggtttttttttttgtttttttttgttgaatgtaaatttgttttgttttgttttgttttatacgaaaatgaaaaaccgataggtcggcctaaaaccaaaatggaacgatggttttatgtgaggggtggggtggtgcctagagactaggatagagtcccaggaggggattggttacgtgttaaccgattattgggtcatcacgtgccccttcacgtgatattactgtccatcaatacttcttgtccctttgcttccggttgatttattattagtagtgagaaattgaaattactttgatttgctaagtgctatctttaatgacaaatccacccaattatatgtagact

SEQ ID NO: 34852 - DNA, 2549 bp, Arabidopsis thaliana landsberg
ctgttattttctcgttgctcttttttcccgcttcacaatttctctctgaagcatgaaaagccctcgagatacacaagaaagcttaaagaatcttgagaatcgtcttcaatggagtcttcttcttctatcaaggaggggaaactctacaaagatgctaaagatcacatcgctaaaggaaactacatcaacgcattgaagatacttgaagatttgattcgaatccatagagaagatcaaaacgcatggcttattcgtatcaaacaaggtcaagtattcttaaaactatcgctagaaacagagaattctgatatggaattcacatacttgttaggttctgtgggatgttactcggaagatgagaggttatcatcattttgtgcaaaatcgcttcacatgttggccaacaagcttggatctttgatgtactacaagaaatgtttcgtgaaagcaaaacaagctttatctgttactttcccagatatcacggattctgttgctcggcaaatacgaatgaatgaaaaaaagaaggagatgttgagcgtaatcaaagatgcagagtctaagattgcttctccggagactctagttgcttctactatgaaacaagtctctaaaccaaaagttttggagtcagagaaaattccagacacacgtgagggtgtggtgaaaagattgaggtcttattggatgggattggatattaagatcaaaagagactttatgaaagtaagcattgcaaagcttaaaagttttgtcgagggagtacataacagagagggacgagatgtttttgagaaagttctcacttctgctaaggcagatagaaaatggacgttttggatgtgtagaagtaaatgtttgaagaagctttctagtgctgaagaatgtaagaatcattttgaacaacaacatgatgcagattttaaaaatgcttcgaaaaaggatatggtccagaggataggaaaggactgggctcgtaagatatcggttggagcttgggaaccagtggatacagtagctgccgttgaaatgatcaagaatcggctcgcagatgtgaaagcgtttgcacctaagaatggatggtccgaagagtggcctttagctgcagatgaagatcgcagtaagttactcaaggaaatcaaattgctccttgtgtcactttgtgaccataaaattcttccttctagcattcgagagtggctgatgcgttttccggttcaacatcttgcaaaacttgatgtttccgaacagagtcttattgattctcacctagtgggaacacctcagagtatctgttttcttgaaagtcatgaactcaatcaaatcctagactttctaaaaaccatcaagtgtaaaaggaatgatggtacagatctggtttgcagagcagtggacagtttcttggatcatactcgagtcaaagaaaagatcgactttgaccctcagttttcatttctgcttctggataaaagactgctgaaatgcaataacgctccatgtgatgatgaagggacaatcaatgtttttgatcccattgcccactacgccaaggcacatgctcagggggatgatatcataccttggttatatgactacaattcagtagataagatctttcccaaacctatcagggaatacaatcttgatatatggctagctgttctcagagctgttcagttcacatgtaggaatatggaaaccaaatatacaaatcaaaagttgttcttaggttatagcgcaactcttactataatcgagaacatatgtatgagtgaagatgaaaaggagaaggaatcttcaggaagatcagtggatcagatatgcatctattctgtgcgataggtgtgaggagatagtccctgaaatttccctcgctagaaaaatatttgtgtgtgcagtacgagatgttttcgaaggagcattgcttccaacatttgatgtccctgatttagatgactgcttgaatcttatacgtgagcagaaaacacgtagtgacgataaagtgctggagtccataggccttctgaaattagcggtcatcttcaaggttctttcatgactgtaactttcattatttgcaacagagtaacatattcttcccatcttaataaattatcgacatgacttacagattttgctaatcgattcaaagattttgctggttgataattcaaggattagtttgctgaacaacctcaccaggctttctttatttgacaaccgcacttacatccttcaactactgaaacctttcttactggtttgtttgaagattcggttatatacacagagatttccctttcagttttatttggcctttgaattgtttcttatatgttattatgtattttctcatctagaatgaaattgtgaatatggaatccaaagccaagtcagatgcagcagtagcagatcttttactcgaggaggagaagaagaatccaaagaagtcacagtcaaagaagaggaaaaatacaagcaaaaaggtctttgaaattcaacatttctcgatttcttttttgaatttgtggttacccggttgtaagaac

SEQ ID NO: 34853 - DNA, 3473 bp, Arabidopsis thaliana landsberg
ttgaactgtaaggaatggtgccaactgttggaatcttgtatgtccatgtgctatccgtcagaaggagttcttctggatcttctatgtactcttcaagcgtgaaaaacccaagtccttgaacaaaagatccttcaatctgaagcagaaacacacaaaacacattacaaaaatgattcatttgctttctgaggtctctcttcatatatattacctgtcctaaatcgacagcgggattgagactttttccacagtcatataagatatctgtctgtagaactgtggtttgtcccgtcacaaggtctacttcaacctattaacaccatgaaaacaccaaagttacttcatttctccactccaatttcagatttttgagaaaggaaaaaagagcttgcctcgctgaccgcagtaccatagttcaggtactgcatgggagtgtcttttggagtatacaagtcactagctgataagttcacggattgtgcataagcctgagtttggacattaaaatcttgaatcagaatgaagaagctcaatctttaattcgttgacaccaacaataagcagcaaatcaaggaagaatacctgagaaatcaactcattccaggtgattggaccatctgatctttccattaaaggtttcaatctttcgactaaggtttcgcagcagagacgaacagctgcgcagcttccctcggatgttgtgctacctcctgtgaaatttccttggaccatgctcaatgaatctgattgtataactcttatcttctccaagagttcttccgttccatcgcattgtagcataccaagagcataactagtcatctgcttcacctttgtccataacccttgtcctagctcgattccaccaatctcaacaacaatcgtcccatcgctcaaaacacttactctccctggagtagcaaacaataaaacctcatagataataggtactcgagatatccctcgttttctccacatgttagactcgttgaactctctgacaacagaaaccctctcctcaaacttggaagatacgccaaccttatcccacatcgaagataaagtatactcatgtggttcaccagcaccatccttgtagaacagggctaagctctcatgtgtatggagattaatctttcttattgtatcaacctccaaagagaggctagaggctatattttcgatgatggcttcagcaatatacgtaccctgcacgtcccccggggatctcatgattgctctgcttagaagatttgttttacaaagtttgatatcaaaagataaggcgccccaattgtacttctttagcgaccctatgagatttgatggaataaacatactaaaaccataacttgccccagcatcaattagtatttctagctccaaagctgtgatcttccctgtagatttgaaccccacactatacgttatcttcatcggatgcctcccaccagtcattatcatatcggtcttgcggttgacataagttctcacaggacgctgcagtttattagcagcaagagcgcacgctgttgcaacctgagacagtagaaagctttcaggtttcggtccatttcttgcagaaagtgaggggaaaaagaggacaatttttgaaaacttactggcattgacttgacagatttccctccaaaacctccaccaacacgtctggttatgacacggatgttattttcagggatgcctaggcaagcagcgaccgatgactgtacgtactgaggggtctgtgttgaactatagactacaatgcagttgtcttcatctggcactgcaagagctgtttgtgtctccatgtagaagacgtattgcgatccgagtcttatctgtttcacatcaaaagttacaacggttgaacatatatatctaatttttacagtaaaaaaggactatattacatacttccgagctgagaatttggtgatcagcttcagccattccttttgatgtatcaccaacttgttgtggataaaggaaagggataatgtcaaacagactagatttcttgaccgcgtcttctacagataagattggtggttccaaatcctctgtctcgtattcaacaactgcaaggtttactgcagcatccgcatgtctctgcgtatcagcaacctgcaaaaacaaagtgttgctaaaaatgctgctgatggaactgattctcatggacaaatatgattgaacttaccacgaaggcgatgcattcgcctacactagtggtgaaatcctctgcgaacaattggtcggagcctaatccaatcttcataccaatattctttccgcctttaggaacatccttgcgagaaatgactgcaacaactccagtaggtaccaaatcgtccttgaagtgaataccttttatcctagcgaatggctttttgctatagataaatgctccatagagacagtttgtgggagatggaatatcgtccacataaacagcctcaccagaagcctgaagggaagctccaactttagtaacaggctgaccaactggattatattcattgtttataggaacattttgtgaagaagacaacattggcaacggttttggtggatccaagtggtaaccatttgaaggtttatctgtagtaggatgggtcattaaggtgtgaaggaacttgaaaaggaagccaggcgccaagcttgacctgtaagcaggattgcttgtaccgtcttcaggcaccacaacattgccaagtaaggtaatagcctcatacagaactttgtcagtgattactttaccagacaggaactcttcgatttccttacacctaatggcgtgtttggtcccgtaagccccgaaagccaatctacagttaactaccattgtatccttcacttcagccaagaaagcagcattcaggtaagccagagcgcttccatgtggacgaggtgcagctctataggtttcaaagaacaattcagagtttgtttcagaatgccaaaaaggaatttcaatactcagaaccagatcatgagcctcaagaggagaacgttcaaggaactcttcaagtgttagcttttcgagtcctcttgatgagctcattatgttaacaaatgcaccagctgcaagaagtattgtagccatatcagaaggaaactgtttcctctgagccatcacaaggtttccaccaatgctaccaaagttcctgataaatctcgccgctatcatttccatatgagtagcaagttttccaaacatcttctccactcccggtgagaccctaatctccttcagagcagcaataactttagagattgttaccactgatcctatctcaaccccattctggttttctctgatctctttaaggtgcgggattcgagttatatctatgcatttgtcgtaattctgctctctttcatctttacagtatcccatacttgtgttaccagcggccaatttcatagacgctgtaatactaccagcctccccagcttccaatgagctcgaa

SEQ ID NO: 34854 - DNA, 1160 bp, Arabidopsis thaliana landsberg
gggaaaaaccagagatctcatttctgagtcttgcagttgtggtgttttagaagaactttggtagaaaaggctttttgcaatcatcccaggtggtgattgagtcatggggcagattcttctcccagatgtgtgctttgtcacccaaggagaatggaaaaaacagagcttgaatccgtcttcactgacaccattgatttttgttaggttgcagagtctatcgaattcatcaaggtggtcgagtgaatcctccattggcagaccatggaatttgttcccctgaatcatcgagatgagaccactcttaatctcgaagttgttgttctggatagcaggaggtgcaattcctttccgttgacggtgatcacgtggtgcatctccagcaccaatgttggcagggccattttgttgattctgttcgtcagccatttcgagtggttgttgtggtatttggttggctgtctttctcctttctctgagttcgcgagctatgcagtcgatgttgtcgttgaaaaggaggttctagttgcctgttgatcgagtttgcatacagcagaggtgtacctggatcaagaggacaacaagaaaaacccacagttagcaaccgaattgaaaattgaaaaagaactttatctaatcaagtctgaaatctcaaatgtaacaaacaaacacccaattggcaacggcgccaaattgataataggtttttaagatcaattaatcctaaaccattatcatgtcgttgtagtactaaaggttgtcaatccaaatgggtgtgatgctaacaatcaagatgtgatcagaagtcactaactcaagccaagcaataacaggttttggtgtgttctagcaatcctaagtgaacatgcagaaaacagaaaatcaagcagaaacaataaaacactcgaccaacacagctcgttgcagagcactgggtgtggtcgagtgacaggtcgagtaacaaacagaaaatgtaacagggatactcggctgcacagtctattgccagacaactgggtggtcgagtaccaggtcgagtaacagtaaagaattgcaggaactaagcaacagatgacaagatgcagttaacaatagtagagtaaacaataaaatcaatcagataaagaatttccgaggatggggtaattgagtagtttcgtttc

SEQ ID NO: 34855 - DNA, 4208 bp, Arabidopsis thaliana landsberg
  unsure (1)..(4208): unsure at all n locations
ctaataaaaatgacatgctttaaataatgtcctcactcgtttttgtctataaacttggaattttgcaacgggtaccgaaccctctagtctctttagtactgcgtacaagcattatatttgatacatactggtcttgcattgcattgactatgtagttgctttgggatctcttgtcatgcaggccatcagcatggactatgacaggaaaatggactatccatctaatggtgtatccatacttggatgccttaggcccgctttccttgacgaggaatcttatataagaagattatttctttcggaagatagagatgactatagctgggaggttcaaggtcctttcatattttctagtcctcaaaatgctgtttttgattttgtaccacctcttttacatagaacttagaggaatctctgtactatacacgtacacatttctgtttgacatcctggattcacctccctttggatatttatcttcaggtgatgataatccaatcactagttccagacgtgacgagaatgatatgagttcaagtctatatagattagagattgtgggaatagagcttctctccctctatggagcagaggtatgtttttgccacctgtcaggtcatttggatgttgaaaaaattgcttgaaacgatggctaacatatgttgagctgttttgcgaacattgactttcatacaaactctctgtgtgtcatttttgtctcccacagtctcaccgtgagttgatctagattctttgactattttcagtcttctataagtttgcaagattttcaagatgctgaaccagacatcctagtgcactctacttctgcaatcatcgagcgcttcaacaacagggggattaactccagcattgcacttaaagctctctgcaaaaagaagggtcttcatgcagaggtattgtatccatgtctctgaatataatctggaagtacagttctggtttacatacctaccacattttgtaacccagttttgctactttgtggtaatctcatgcaggaagctaacctgatcagtgttgatagtcttggtatggatgtgagagttttcgcaggtgcacaagtccaaactcaccgtttccctttcaaaaccagggtgagagaaatctcaaactaaaacatcaaacaaagatacacctttttcaacaagaaaacaaattcataaggactctgatatgataatgcttctctcatcattgtttatgacaggctacaacagaaatggcagcagagaagaagatccaccagctactgttccctcgttcacgcagaaggaagttgaagtctcatgacgagagtttgaaggatgcattttcgttaaaaaaaccgttgctgatcaaagtcactaaactagaaaatgaggaaacagagaagaagctgttttgccactggatctgtctagtacttataagagttctttggcctggcgattgtgtacataacgatgagctttaaagtgactgttctagaactgtgtggagattcagcctcttacgttttagtagtaagtaaactaaattaaacccaagaataaagagaagttgatacaattgaagtaacttctataatagtccaatgttgttcttacaatgtaaatcttcgtttatctttacaatcaagatcaaataaggccctttttctcactctttacagtcaccaacggtgtccttacttttctccactcaaaagatcctttatttttgctggatgcaataatataatatcacacagtcgatggaattgacaaaaacctatgtggttaggttcccggctcatcatcctcacctaacaacttcctctgcatagccgcctcgtcgcccacttcttcaaatctgtgttcctcttgatctttctccttcctgagaagcatccaacatgggaaaaatggagaagaataataagttcattgatggattgtttattgtacttgaaaaatgattagaaaagactgtacatggagtatatgatcagtccagtagctgtagtagcaaatgccaagaagtagagccaatcaacctggtattaacatcattagctgatttctacagatagaaaatgtaagggtttcctgatgtttgatattcaaagtgagcagaccttctcgtggtaaccaaaagtgcggatcaaaacagcccacatatctgatgtgagcaacgagaggttgaacattgttgcaccattggtctgagagaagatcatatttcaaaagatgttacagtttcgtagacactggcatgaaaaacaaaagagggaaaagggttttgatcatatgacttctgtattatctcataccttgagtaagaccgggactaatgggtagaagagaaacattgtgagtgtgaatctaaggaacggaaaaacctgaaaccgcgaaaaatgtaataaatagacaagaatgtgtcgtctttggtttgcagatgttaaaatggaaatggccatagcaagaaaacctacagctccagttgaccagtgaatagctttaagctcatcacgttcaagtatacttctatggacaagtgaagtcaaggccttagctgaaaaatatggtttttctggagaatgtgcatataactctaagaaacataagaagtcatagctttttgcataaaggatacacctgaatggcactataatggctccaaaaagtcccatgaaggtcatcaactcaactgtgtctgcattcttcacaagaaactcctataacaaatgagcaataaattttacatttttgcgggatataacaatttcttgttgtagcacttgcttacctcggtggtattactgacagcatataaagttgctccagctagaacaagaaaatctcctttaacaggattacttccacctaaaaaaacgcaaccattatcataagcgtagattgagttttacttgcgtgacaagtaacgaatgattagtttctaccatttacctgctcgacttcctgcgtgaacgtcagagaagagtaccatgacaacaccagcaatacagataagtacaccactgatcttcattaatctgtattttgttttcaggaacatccaagttaagaccaacacacaagggatcgcccagcaatcaagtagcatgatactcgtaatcgatgtgtactgattcgccttcaccactgttaaaccaaagcaataatgaagttttattcaaaatctcactacaacagcaaccaaaatgtaatggaagtatatacagtttctaagaaaacttgtctccaaaataacttcagatcagtgctcaagccaaagaagactgtgtcaataagaaaactgaccaagaaaattgccttccacgtcaactaaagcaaggaggaaatagtgataccacttcccctacaagagtatttgcattgaagattttagtagcacatactagttacgttataagcactcaatagtgcatgtaatcttgaaaaaaactctcattacaccaaaaagagaaattagcagtaagtaacacaaagtgaaaccaaattcaatactgaccttaattgttggtctccgatagagcatgatacctccatagacgactgccagtaatgtataactgaggaacgtttgtgacgttggagcatttattcctataagatttcaaaattttaaaccatgaatgtataaaccataaagatcataaatctatatgatcgatcgaatcttaaagctagcataaacgagatgcatgcattaaaaaaaatagaaacagtaaaaccttttctggcgagctcagaggatgtgaaggcattagaagtacatagaagtgagaggatctgtcccaagccaagtccaattaaagtcttctttgttttgttcatctcattnnaatcgaaacccattgccattattgcagaagaagctgagatcttcggtgaatctataaattacagacattcaaatacaataagagattcgcagacggcagatcagaaaggatttgttgttgctgtcactacctaccgttgacattttttaagcttttctttttctccttctcttttccctccattcaactaagcttagttttaattaaggtaaagtttgcactttttgtatttgatttcgaacatttgtctaatatgaaaatgttaccaaatataattagtttgaaaaataaaacgtgttatatagactgatccaataaattaagaaacataaattagtttaaacaaaaaaaacatagt

SEQ ID NO: 34856 - DNA, 10114 bp, Arabidopsis thaliana landsberg
  unsure (1)..(10114): unsure at all n locations
gaaaaagaaagagagagagagttatacagacaaagtctcttcattaagaccggaatagagacagacatgtgtttaaccttatttgcatgtaaaattgtcacctaggaaaaacactcaacaaaaaaagcgaaataccgtaaacattaacaagtatcactgcccgggacatactggtgtttatatatacagagcaaagtcattgtgtattaaacagagaggaattgagttctttcttgatgaaaagtgaaaactaaatcaaatcaaaccaaaccatagaaaatcatctgtcgtttcgtactaactcacatagtttgaagcagttcagggctcaagtacacagttttccagctttggaaaggagacaccaagttgcattccaacagtaactaatgtctccaaggacctagcactgttagctaagagatcctcatcaatcttaatcgagtcctgtaatacatgtcacgtgaaaggtaaggttgatgtaaatgcaataactcatccagggacagtattacaaaaatgtaagatattttgtcacaagattttcaaatcaagacaattcatttctagggtactgtaagaaaaacaaagttaaaagctaaccttttcaaagacgcatataactgtgcttccaccaaatgaaaagtaaccaagctggaaaaaggagaatgctagtttagaattgcataagaaagaatgacatatctttcaattagaaaaaaggttcagaattgattacctcgtcccctttcttcacatggtctccctcttgcctaacaaagctgatactaccaaccattgttgctccaatcgcaacaaatgcgacctgttacatatattaagctgagatcaagttctgcgataagatcagattttattgtacaccttcgtttataaaatactgcttcaatttgagttcaaagcatcaagcacaagaggcaactgagaaatattttcattcagcagaccgagaaatttgatgtttatgacttatacaagatgacatacctttccaaactctgctgttgatataattacgatggtccgtttattctcagtgaacacattacagtacttgctattgacagcaatcggattaacctgagaaccaaggatacaaaagtaactccaataagaaaataacggaagagaagaatgctcttcaacgtgaaaaggcagatgcaataccgtatataagcttccagaaacattgacaaacttttcaatgacaccagagacaggagaatgaaaacgatgatagtcctgtaatagatcaataaatgcaaaaagagagcgaaacaagtgttaatttttagcttttgatcaaacgacaagaagcatggagtcctcttgtacctgtggcgccaatcggaatatcaccaaagatccatcaaggaaagcatccgactgcacatcatttccaaggaggcctttgattgaaaacttacggccctaacaatattgaaaacagtctgaaaattttagaatagcgagtaacagttgtacagtgttgcaggttatcagcagcatcaattgtgttaagagttattcaacttttcatatgccttgcctagtgtattgtgaatactctagaggccgctttaccttgatccagaaccgtgtgctatcatcaaccgattgaaacgccattaatcgacaatcagcagcagatacagcaacatcatcctgatccatgcacgcaattggtcttgcaccaggctttaactcccgtacgaagaattcattgaacgtctgcaagtaaaatgaccacctttcaaatccatgaaaagtacacaagctttatagttaaaccaaattataaagggtttttcccatctttgataaaaccggcaaaaagtttagcttagatttacctcagtgtcacttacatatttattttataactactaacacttctattgtaatctcgtggttgaaatcataccatgagttgcctttgcgtaccttaaaatggtccagaggatacttgacttcggccatgtttatttgatcctgcaacaagtacataattcaattttcagttcatctaaacttacaaaaggagggcgatcctttataaaaatcaaggagatctagtgaagcaactccaatctacccattgttatctctagaaagtataagagaggagtgtttccttatctctatcggaagatttctcatagtatttcaattcccaatagtaatatcgagatcggatttcagttaataatcacagaagtttttctaagatattatatcaatatcaccaagccacaagccaagttgtgtccggcttaaactcagcagccatttgacacataataactaataaaaaaataatctacaccttgaaaaactcgagaaagctgggaatattttgggcagattcaactgagttcatttttttcccctgtttctcagaaaggttcnnnnnnnnnnnnnnnnnnnnnnnnnnnaggatatcaatccataatgaagacttgtttgctttgatacaatggcaagaatgtgtagcacttcatcacaaaggcactatggccaggtgcatattagaggttaaggacccagtttgttaccttggtccataagccggagtcctatttttgactggtaaatagctctcatagacataacaatctttgaatcaatcaactcttccacgagcctcttagtcttcctatcaatcacctaaagcaaatatcgaagtaagtatacttttagtgcattttctcaccattaggagatactcaaacgaaatccacaaaaattgataggaggaatgcaacaaatatcaggcatcgctcaagccaggattcactactttgaatgaatatagaaaatcaaacaacttgataataggcctccaaattagatgtttatcatgacataaacaaaagtagtcgaaaggaaagataccacaatatgtgaagcacttgaaccagtattcaaaccaacatcgtaagttgatagatgagtccattcacttagtttgaacatccatctgaaaattgttaaaaagttgaatgcctatcaagcaaagaacatataagctacatagaatgtcatattcaaatcttttaaaaacaagaaatctaacccatatgaagcctgcctatcagtcaagaaccctccggtcatttgattaccagttccttcgtcataacagagagtcatatggatcattgcattgagcttgtcaagttgaagagcctcaccgcaaaccgcacaactatttataattggctccctgcaatcaatgcatgcaaattactgggattcaaggatgtacaaatatttgtgtatatacagaagttctcaacataggcactttatagaatgttattactgttcctgttgaacggcaagaagtgcagccaactcatcaattgtaacaacaccatccccattcaggtcagcggctttgaacaactcctctttctggtaatcaattaagtgaaaacatcaagagtgccttcagaacaaaaaaacagcaatctagcagtatcttataaaaaaatgcctaggagacaacttttggtatttgacatttctcagactaattgctactacactataggaaacaaatacatatacacaagcacgaaaagcagaaagaggtgacaaagctgctgaaggtcaaaccttgttagcagccactacattcccaaaagcattcatcagatcagagaactctgagaatgagagttttccatcttcgtcataatcctgcatttagatgaaagactccaacaatcaatcataacggctgcaggatgccataaagttcaagagaaaaaactgctaaagaagccatcgaaaagagaaagtagcttgtaaatctgattaaaaacgtctttatcatcaatcattagaaaattaaagaaaacaaaaattgtaccatgcaaatgaggttaaaatcacaaagcatcacaagaactgaacaaacagtggaaaattaagtaaagcataccactatggacaaaatacgcttcgcgaaacatgtctcggtttcaacaggatcctgcaaatatgagcaaccacaaatcagaaaccattaccaccgcgttgtttagccactgttttaacgtttaacatactgcatacctcaacggagcatgaaacaaacatgctgccaacaacgttagatgaggccgggtctaacaggtcaaatgacttgcaagtagagtcaggttcctatatcacattatacaaaagagaagtaaaataaacatgtaaacaaacaagtttctcgtcgattaatcattcaagatatctaatccatgcacctactattatcagctaaactgtggctgaatctcctcaaacaatggaagataagtgatagaaaaaactagctgatacttattagtcgagctagaggaataacggataaacaacttaaacagctttcatatgaaaaaacaaactttagttactgaccagtactacgaaatcaagtagatcaagctcacaataaccaacgatattgttcttcaagagtctattggtctgcatcaagaaaaggaaaatcatctcaacagatcaataactaaaccccaaatctagaaagcagaacgtaaaaaaactctgaatacttcacacctcaaatacagagattctagccagacttggtccatttttctccaggagaagcttcttttcctatatacagaaacacacaaaaccgatacaatacccaactattcacaaaaggcgctacaaagaaatagtaatcgagagttttcttaccgagttccaaatcggcttctctgtgctgcaaaattcaacagaaacaagacattgttaagtataagattccaaaaagttacaagcaagagtttgaaaaatcgttggtaacatacgaatctgaaatttccgaacggaaagtttgttccccgaaggaaacacaggcgagccacttgtccttgaacttcatctccgcctaagagaaagatgccaaaagacacatgactatcgtaatcgaaatacgaagttgactaggacaatatacaatcaggagagaagtaaagccgtacgccgataagagtgagaagagcaatgccggcgaaatcatctgcgctcacagatctctgactagccaatccagagacgcttccggatcctggacgactaagacggcggcggctgcgaaagttttgaatcttcttacgcatctttgatcggcgcgactctttcgtctccgttgagtttccgtttcccatgattctcggtctatctggccctcacgcgcttgttaaaccaatggatcggagatggaggaagacgaagtcagtgagcgccagtgaccggactcgttttatttggaagcaaaatatctgtgtcaccgagaagctggagagggaatttatcacaccaaatacttttcccgaatttttttgttttgtttttaattttacttgtattatctaaagtgttttagctttatttaattaaaatcaggaaagatttttgtataagtaaaagatgtgtgaaataaccaaaaaggtgggagattttataaccaaataatacaaacaaattataacaaaattatgcaaacgatttataacatattaaagatgatgtttgacaaaaaaaaaaatagtaattagaaaacttcaacttggtgttggtgaaatagttaatacagttttaattcgacttggttttatttaattatttgtggtgatggctccctttttgtaaagggttttgtcatttagtaggacatgatgaactctggagattcctgaaaccaatcaagttgtccttttgttgatcatttcctttggagaatgtcgcagtgaaacgtgctgacgataaagacagtgctcaaaaataactaaatccaaatttgggtgaaaatacatagccaacgtttcagaacattttcctattttggatttcgtaactttttttttaccaacggtaaatcaagaagattaagataatcacatcaaatgagtatatgatcaatattttccacaaaaaaataaaaagaaaaagagtttttcaataaataaagtatagtacttaatttaaggttgttgctgctgctgaagactgataagtttaaaatatggaccactcttgtttagaacgagcttacggtggctgccttgctctacgatcttacctccgtgtaatacacttatcgtgtcagcgttcttgatcgtcgatagccggtgagcaactatcacagtcgtccggttagccattaaccgatccaatgcttgttgtacctaacaatattcattcgttgtatactcattagtccattgtgactaaattttacgaagtctaatggtaaagaaacataccacacgctcagattcaacgtccaaagcgcttgtggcttcgtcaagtaatagaattgctggattcttgaggatggctctagcgatagcgatcctctgtcgctgaccgcctgacatttgaactccgcgttcaccgactttggtagagtaaccttctgggagagaggtaatgaagctgtgagcatttgcgagcatagctgattcgacgacttcagattgagatgctccttcgtttccatacaaaatgttctcgtagattgttgtggcgaaaagtgctggttcttgttgaacaagaccaatgtgtttcctcaatgctttcaaatctagtttcttgatgtcttttcctgcaatttgggtaagaacaaaaaaacagcttatttcagctaaacaaccactttcttttgacgcaagaaaccttggtgttcagagatttcttgagacgcaagaaattttttgttcataggtcaagtgcactcaccctctatcatgacttttccagcagtcgggtcatagaaccggagaatgagtgatataacagaacttttcccggatccactctgtccaacgagcgccatgctctttccagcacgaactatcagatcaaagtcccggaaaattacaacatctggtctcgaagggtagctaaagtggacgcctttgagctcaatcgtgccttccacattagtcagcttctcattggtttctccaacgatctgagttttccggtccaagatctcaaacacggacgcaaccatctggtttcctttcagcagatccggagctagagccaatgtctcacccatcgctaacgccgtcacaatcaaaaccatgaatgttttcatcactgatttgaagcccgctaatcctttgtccatcaaagttgatccgtacctatcaaatcaaacaattgacaattcaatatttaaaaccggtgaatccctatgcctattctttattggtctgaaccctaggcctattaatttacaatcttctatatacatagagacataccagagggcgaggccataggaagagaaaatgaagaactgagagacaccgtagaaaagtcctgcaatttgtcctcgcctgaaagaacttttggaaggttctaaaagctctcttgaataaagttctagaatcttttcctcagcacagaaggcagcgaccgtgcggatgttgctaacagactcaccggccaacatgttggcctttaagtatgctttgttcaagtctcctccatatccttgcatgaaaagtttctacaaatacaacaaaaacacaaacgtaaacataaacataaaggaaaatttttaaaagtggcaaaacggtgcgttaattacctcgctgatatgtccgcttataaccaatgggtatgtggccaagacgacaagagtgagacgccagttgagtataaatgctatgataaaagaggtcacaactagacctaagttctgcagtagaatcgttgacctatcgaccactatggttttaagcaaagttgcatcgctctcaagccgcgatgccaacattgagcttgtgttgtccacctcatcaaaccacccgatttcattcttcaagattgctattaaaccaaaaacagaataagtatcacatgataataaaaattgggatctctaatttctgaagaattttaaatttatcatttatttaaagcttgcattgagagtttgagacgaacctctgaacatattttcgcggacacggagagtgagacgctcgcccatagtgccaaagcagatatgctcaatggtgtagacaattagagtgataacggacgcgcagcagaagaggatagcgatcttcttgatctctttttgagtctcatcccaaccactgtaataggaaactaaggcttgcgagacgccaagcgcgaaaaggggcatttgagatccagcgataaaggcacatatcgtgccacacacgccatacatccagtccggacggatcatagagtaaagacgtcccaccgttactttcacttttttggatggatcagccccatccggtcgagttaccgattccctctctgaacagaagctggatcttgttcttgatagttcccgcgagtattttatactgcagatgtgaaaagaaaaaagaacgaagaacagctatgagaattaagggtttggtttctatacctagttcgaatgaaaatgttgagagacagaggatggtgctaagcgatagtacctatgtggtctgcttagcgtgcgattcaagaagggttacgctgcaatgaggcagtctcttggagcggaaaaaagaagagtaggctccgtcgggattagatatgagattctcgtggtttccaaactcaactattttactttcgtgtacaactgctatgatgtcagcatttcttaccgttgagagtctgtgagccaccaccaccgttgttctcccaaccatcactcgatccagcgcttcttgcacgctcttctccgactctgcgtctaaagcacttgttgcttcgtcgagtaagagtatcgatggattcttcacaattgctcttgatatagcaatcctttgtttctgtccgccagatagttgaatccctctctcgccaacctataagtgaaaaaacagagttttagggtttgacattgatgtttcttttaccctaaggcgaaagtggaatctagggtctacagttgttttttgtattcgaaggtatcctattgacagacctgagtctcaaatccttcagggaggttgttgatgaaagaaatggcttccgagagctttgcggcacgggtgatctcctcagcagttgcgtcgtctttgccatacagaatgttctcacgaatcgttgttgcaaacagagctggttcttggttaaccaaaccaatctgtcctcttaaccacttaatatccagctcactgatattgttcccgtctagcaacactgctccagaaataggctcgtagaaccgctctatcaaagatatgaccgtgctcttccctgatccgcttcctccaacaagtgccacaattttcccggcagggatagctaggtttaacctgtcgaagatcaccacatcagggcgagatgggtaactgaaagtcacgtctttgaattgaatgtgcccgtctactttccctagtttacggccagattttgcacttgtttttgtcaccgtgttccgttcaatcatcttgaaaattggataagcagcggcttttgcccgtacaaacgcagaaatatcgggcgccgcttgtccaagagacctacacaaaacccaaaaacagagtacacttcataatcccacaaaaagagaaaacaaaggaaacgtggagagcaagcgaacaagttagggagatttatatttacaggccggcgatgacaacgttgagcatggtagtgaatgatttgccaccatcggcgatatccttgtggaccacaacacttgtgaaccatacgagcaaggcccaagatagaaacaagacacagtgcatcgatccaagacctaatcctttggttaaaccagcttttctcccgtacttatacgtattctccagcgcttctcggtataatctcaccgccctttcttcaccggtgaatgcttgtacggtcctcacattcccgatcacctgaataatcacatagatatatgatacacaccagcactagacactagtatcggaaataactgaaaactatacacttataagtttccttgtccacgaagtagcaacctcttctgcaatctcccagccttgatgtatgatttccggcacgagcaataagtccgatggcgacgatcgcatagatg

SEQ ID NO: 34857 - DNA, 2834 bp, Arabidopsis thaliana landsberg
ggattaacaaatcagaaccatgaatctttcgatgatgggacttaaacagtagatctcagccgttgttttgtccggatacaacttgtgtattttgttttacagccgagagagttcattggacataaaactgtaaagctatagtattttgtgtttctcatgtaatacctacaaaagtagaataaagcgtttatctttaacggaaaaaaacatataacgaaatgaatttgtcgtaatttgaatgaaagtatgtttatgataaaataacatcctctaactctatagacggacaaattgataaatatgaaatgaatacttgctttttattttgacacgtctctcttggtttgtattttttctcacaggatattttataagacctgaccattaattgctgatttgcttacaagtaacaaacaacatttcattgacacagttagtctaaagttacatgatgacaagatattgttatggtaaaccttctaacaaaaaaagaagaagatattttgttatcgtaacgtggcgatgttgattaatttgttgaattaatatttgtatttcttgttttaactaatgcaaatcaaccccaaaaaaagaaaagaaaggggatcaaaaggagaacacgctaaggtatatgattcgcgtgtctatacgaggctttcctaattttgtcgtcatctattttgtctttttggtgcgtgtgctcacattttccactccttactttgaataaaactttcgcacattaattgttttcttccactatcgtttgggaagcgaaataatacctgtggtgaatctcaaagcttaaaagaacttatgtaagcttcagaccaacacacaaacaaggattcgaatgaaaaccgaataaccaagaacttttgtgaaatgagaacagaacaccaaacttaaaagagagcacacgaaagctttgttaacccagttcacatcaaagatgctacgtctgggccgggacctgtctcccggaatccactaatcacagagtttcacaataagatctctcaccccctaagcccttgttacaaagcttctctcggattcaatctcactttctctctgtgtttccccaagaacaaaatacacaagtttactctaggtttttgctctctatgtttttctgctttttttttcaactctctcaatcaatgcctttatatagaagctcaagattagacctagtaccccttgtgcagccgcttgcgatgttgcctcttctttggcgttatcaccttcactgagctcgtccttcttgttgcataaccagacaaagctccttttgcttttgctttaacagcttactgcaaaaccaacggctatcttacaccttgtaccttgtggtcctaaaatgagtcatcgatatgagctggcaatacttgctcttcacgctgcttccttattcacattgcttctttgttttactaatttcccaacacatccacgattgttaaaaaatatctagcgcctgaatgcgacggagtgcgatacggaccccataaatcaacatgaattaactcaaaaatatgagaacttttattcatactcaagggaaaacaatctcttgtttgctttgcgcgaagacaaatatcacatggtttattcaaagtagaagaagaaacaacgctagagagaaacggaagtttagcaaccactttagatgacggatgacccattctcgaatgccacagctcattggttttgaaatcttttgtcgaaactgcagcagcgatctctgtacctcgaaagtggaaagtgcctcctacacgtttacccaacccaatcaccatcctcgaaattcggtcctgaaccacaagaaactgatcagccatttgaacaacacacttgttttcatccattaactgccccaaagacaacaaatcagatttcaactcttcgacataataaactgatttcataacaagatgactaccaaggctgatagaaccttctttatacgacacttgttctctaccatcagccataactattaacacaggaggcatatctcgcacatttgacaaagcatcaaatcgtcccgtcaaattatgcgaagcacctgaatccattatccaaggagaataagaacacgtaccagattgtttttcagaggaactctcctttcccgcattgagaatggattttatcatgcgccactgttgttcgttgaggccgtgagctccgtcgcgatcatcatcggtgatgacgtgattagcctgctcttgagctgaattttccacatttggaacatacacccgatttgcaaccacggttggagccccacgtcctctgccaccattagatgagctgctgccacgacctttgcctggaagtgtgcgtcccttaggtctgtctccccaccattctgggtatccaatgattgcgtaacaacgttcagctgtgtgaccggagcggttaaacaaattgcagaaaaaactcttttccttatcatcaatccgataccgcggcttagattgagcaacaaaggcggtcaaaggaggagcttctgcaacttgaggacgcaagtcttcttcctgacgaacaatattataaacctcctcaagcggctgaatcggagaacgagccaccaaagttgatctaacagcacggtattgatcgtcaagactattgagaaactcatgagtcttgtcttcttcacggtcagtttcctgtgcggcagcaagattacaagtacactttccacattgacacactctcaacggacggtgtgaggcaagattgtccagatttttgtcaatttcccaaaataagcttcatcgccagccctctctgtttacagcaagcaagttcagacttgagct

SEQ ID NO: 34858 - DNA, 4621 bp, Arabidopsis thaliana landsberg
  unsure (1)..(4621): unsure at all n locations
cataaacccgatcttgtcaatctccagaaacaaaaaaaaaaaaatggcgatcaagacatagactattctaattccaagttgttcatcacctgaggatctaaaacgcgttttgcaaacgctaggttcgagctggggagatgtagttgaagatctggagcgtcttgaggttgttccgttaaaaggagctatgactaacgaggtttatcagattaattggcctactttnnnnnnnnnnnnnnnnnnnnggaaagttcttgttcggatctacggtgacggcgttgaccttttctttaacagaggtgatgaaatcaaaacgtttgagtgtatgtctcatcatggttatggtcttaagcttcttggtcgtttctctgatggtcgtcttgaagaattcatacacgccagagtacgttttcttctttcttttctttaaagttttgatttttttaggaagatcagaggaagataggtttagttagtgagattagagataagaattgtttgcgtttcaagaaatctcgtgatagagagagattgattgtgtatgattggtttggtccgtttaccagactctttctgcagatgannnnnnnnnnnnnnnnnnnnnnnnnnnnatcgctgcgaagctaagagagtttcataagcttgatatgcctggtccaaagaacgttcttctctgggaaagacttaggtaaaagagaaaagaaatttcatttctttatgtataagcataacaacgtttcttgataaagtctttgttgattttttaggacttggcttaaggaggctaagaacttggcttcacctatagagatggataagtatcggttggaaggtttggaaaatgaaatcaatttgttggaagagagacttactcgggatgatcaagagattggtttctgtcacaacgatcttcagtatggaaatgtcatgattgatgaagtaaccaatgccattaccatcatagtaagctttttgaatcaaaagcttatacccttttcatcaagaaagtgttctgtttttaataagtttttgattgcaggactatgagtattcgagtttcaacccaattgcttatgacattgcaaaccacttttgtgagatggctgctaattaccattcagacactcctcatgttctggactacactctatatccaggtccatatctgtaaatgcaagtgtatatatctcttatgttactcaagggtagtttagagtctgattgtgtgtatatgtgtggaatgataaacaaacaggagaaggagaaaggagaaggttcattagcacatatcttggctctacaggtttgtgtcctatgaagcattaggtacttctccacacctcaagaaaaactcgtctctaaatcatgtttttgtgaatctcagggaatgcaacaagtgatgaagaagtagagaggttattgaaagatgcagagagctacactttagcaaaccatatcttctggggactatggggaatcatctcggttagctttctctctctttctttcccttctttgtctaaaaaactccttaagactctgatgttgaaactggtagtaatctctagtgtctgttaatgcaaagcagggacatgtgaacaagattgagttcgattacatggaatatgcaaggcagagatttgaacagtactggcttagaaagcctttgcttcttgaaggatgaagcagattcgcattgaaaagccgatatacaactaaaagtttctgcaattaggtcaaaagaaaaaaagaaaatttagtagactatatgttgctattgttactctcatcagtttgtgtgtttcttcccttctatatagaggtttgttaactctcaaaacagttaaattgagtaaaacttgttttaaacaaagtattatatgataatagaagaagcaccagtggtctagtggcatgatagtaccctgccacggtacagacccgggttcaattcccggctggtgcacttttcgtatttttttttttttttgtacattacgtttccaaaatgtggcagggtatgaacagttgtctctatactgtatatatttggttgcaacttgcaaatattaatttatacactagtactttttaactcatgactagattcatcggatagacgaaaatcgacaaaacctaacatatttgttaagtagcttatgtagctatatcatactcatacaatatttgcataggaaaaatctggcttctaacatttgattatgtagctttggcagtgccgtattttacacgtagtttgttacggaacaatataagacaaaatcattagaatcttgcttgtaggttacggcacttagtttagtagtttactcatctgcagaagcagaggaatggtgagaaaaacttgaccagatttgttgccacatcttctttgacccactgacctaaaccactgaagctgcttcttccaaactggtttcttttttttttgtctgtttttctgatcgtaactgatgtttcaaaattacataatccacgttcaactgttcatatacataatatgtggatcgagacaatcagtgttcaaaattacttataaatcattaggggagaaagataaataacttggaccaatatttacatgaaaacaacaaaaagaagactctctaacttcaaaagacgattaaaaagaagactttctccaagtctctctcatcggaacaacattttgagctcctcaagtcttgcagaccggacttcttcatctgtcaaagctccggcaatcatcctctgcttccttgcctgaacttgctgcatccgttcctccactgtatcctgcacacaatcatccaaaacaaacacaatgttacttacttacgagatcttgcttacgatgctagaaactcagagaaagttgcagtttatatagtgttaccttgacaatgaatcttctgacgaataccgttcgtgtctgccctattcgatgaattctcatgatcgcttgctcttccaccgccggattccaccatggatcctacgtatttcaagaaacataaccaaatgatcaattcatcatcatcaagaagacttaaaaaaacaaagcttgaagagagatggtaccattaagaagacacttgaagctgcagtaagattaagaccgactcctccagctttcagagacataagcaaaatctgtaatacatcacagaagcataaagatcttaagctcttgtttgatttagacaagagttagttagatatttagacaatgacttactgttttctctttggtgtcattgaactctttcaagaccttttctcttcccttctgagccagcttcccatcgaatctaagaaactcgaatcctcttcttcgcaatggaatctccaaaagatccaaaaatgaagtccactggctaaagacaatgctcttctcgcccgaaccagattccttgatcttctctaagcacttgagcagctctgaaacctttgaagactccttccagttctttaccacgtcaacacggaatatactatctgtcgggcatgagataagttcggttctcttcaggattgtcctgcagattgggcatagaccacaagatggagaccgccagctagtaaggagacattcacggcacattctgtgagcacaaggtgtgagaacgggatcatctgcagactccagacatattggacattctttgctattgccatcgcgtaaatcctgtataacttcctcgatatatgcccgagaaggagcgttttgggaaacagagtcagggttgttatcaagaaacctccttgcaaggctatctaagtcagcgtactgttgtgaatctgcccggctgcaatttatttccaggtataagaatccatttcaatggaaataaaagagtttattgaatgaacttttgctttgtacctcataactagaaaagggtggttacaacattggcgtagacggaggaggagctcgaggatgtttgcatagttgtgaagaacttttccttgtgcaacaaactggtcaaattggacctgttccagaataaaggagactgttatgcatttaccaaagcatcaagaaccattacaacagatcataatcaatcttataacggactttattgagcttgaagcctataactataaattgataacacttactttggatctcttgaaaagggctgtatagaagtcacgttctgcttcagattgttcacattcaatgacttggacatcggttggaggaagttcaagaattagactgaaaatttgcagaaaaggtagtggaaagttaagcataagacaagcaaatgaaaagagaaaaaggggactgaaacagagaaaaaaactaaccttccttctttgtcccttgtttcctttgttcttctcagcatcaatggcctcaaaatcgccttgatcagcttcagtcctcgtggatcaccattttcataaggcttctgtatcaacttactccacctatatatacatacacaacacatgagtaaaagttaaataaaatagaattatacaccgaagaatagcacgattttagatgaagtctgatcataccaagcccaattgaaacatggttcaacatgcaggaaacatagaagcctgtaaagatcttcgagcctgttctgcattaaaagataag

SEQ ID NO: 34859 - DNA, 2877 bp, Arabidopsis thaliana landsberg
ggacctaagctaccaagcatcacaagttgcacaagatattttttcttttgggcaggctggctcttccctcaacctcaaccttcacaggcccaccactagtttcaacgggtctaacatttaaagtcccttcactttctatctctctcctcaatcactatgtgcacaaaattccaaccatggttttgcaagtcgaatgaatctctttagcctttttctccctcattatcttcttgatgggtaattaaatcctaaaacatcttatcaaagctccgtaaagcaaaggactagctccacgttaatcttagtataagccaaaaacagaattgtcaccagctcatcttacctccaagataaccaaacaaaaaacgtgggtagtacatgaccattctttgagaaacattcaaactgctttcaagaagtgattatctcctaaccagacgaaaactgttagggtacacagtacatctttggaatttaggtacacagtatcattcatccctggttggtgaactcggaatttgggtacacagtacatctttggatgcaacacacagaaaaatctaagctgtccccatacggatgaatcattaacgtggtgtatttgactacatttggcttggcctccttaacgaatcatattgcagaaaaaccacataaccttcatgaaattttcccttcttgcagaatctccaatcactaaactacaagcctgaaagtcacttctcatccaaatcttgatacaaagctaggcaatactcaaaacctgcatcattgtcatatcatttctctaccctaccttacaatactccttgatcatgcctgttgtaagtaacatgtagtctgatcctgcaactgcccacaatctcaaatacatgctttgtcaaatcaatgaaacatcaagctcaccagagaatttgaagtatgcaaattgggttcaatcccattttctcttaccttacgcctaaaccctcctctaccattccaaccattccaaaactcataatcagagaattggccaaaaaaaatcagaaaagacccaatttttttctaatttgatcacaacctaatcctatcaacatcgttaaccaaacaaagccaatacatttaccaaggatatacgtatgcatattgcaaagatcacccgattttatgaatttcagaaaaaaacttccgcctgattctcttgaatcgttttgatcagactgccgtatcggcggagaccacgatggtgtagtccttgaatgtctagaaccaaaacggtaggactcgaagcaaatggttctatggtctagcggttaggacattggactctgaatccagtaacccgagttcaattctcggtagaacctattctcctttttttgttttggtttcaatgacacaaacattttataaaattagatatagcttctcaacagtgcagaaaacaatttataaagaagatcgaaaccactttcttcctctcctatgttctttaaccatatcaaaatactccctagccgttggatgttacagacatagctgtcccttcttttaaagagtaaaacactccctctgttgcagtttactcccacttagactctcctcctaacccgatctcaacctccatgggaagatcaatcactacactcttgctttgcttcttttcactcttcttcttcttgttagctttagtatctatcacttttactaaacctgtctcttggacgctgcttttcttcttcttctcaataccgtcttcagaaccctttggcacattttcccgggaaaagatttctgcgaaagaggtttcagcatcatctatagcatcgagttcctcctttggagtagcccttttctgtttcttctcagcatcatcatcatcatcattgttacttgggattgtcttctctttatgttcttctttcttttttgtttcaacttgatctacatttgtgttgctcttagacttcttcttcttgcttttgtgatcctcattgttgacttcttcttcttctgacttatttctcttagagctcttcttgcgttttcgatcttctttagattgttccccttctgctgatttattgtgataggcatcaaaggtttcatcatcggtatcaagccgaatatgctttgcattccttgagcttttttctaagggttgagcgttgaatacattcactgaagggagaagcaacgttctcacctgcgacatcaaaacaattttcctcattcttatacgatttcttcacgcagttacactaatcacaatggaaaaaagaagtagaaaaagttgttttaccttcttagctgacttatcgttatcagaaatcgggtttcctcgaatattcagatttcgcaagcaagatagtgtacccaaaacctatcatttgggagcacacaaatttgatggtttattacacgatcaccacaaaaacttgccacaagctagggaaggctaacaaatttgctttcacctatatgaattagactatacctctaaaccagagagttgcgtaatcacattgtttcccacatccaaattgagtagtcttttgttgactgctagttctgctgggagagcctgaacagttaagcgtaaatgaaataacgattagcaatataaacaaaagattgtgagaagaggcaggtttgttctgtagattgcataaatgtaagaaagatcaccttgatttcattgttcgcgagccgcagctctttcaaatcagagcatgacttgagagaagagccaatagcttttattctgcagtcagacaaagaaatctgaaaccgagatgggattagacaaggatcagtttagttgtgaaaccgaaacgggaggaaaacaagagcttacttggagaggtttttcaactttgaaagtgagtcaccatg

SEQ ID NO: 34860 - DNA, 6870 bp, Arabidopsis thaliana landsberg
  unsure (1)..(6870): unsure at all n locations
ccagacgctgaaacgaagtctacaccaatgccacccgaaaaaacatcaaagaggttatgaatctttcaaagtagaaagttatgagagttaagtttaccgagaaagtctttgcaaagaatagaagattctccagtgaaatgaatccagctcctctgataacaatagtcgcaagaaaaccaaagtaagcactatttgacatgtacggttactcaagcaagagagagtttaacctgaaatcagtggatggatcttttccttgccatcccatatttttccactggtctgagatcaaatcttgaagcttttcatcaggatacgtagctgaccacagtgctcttaatgcatcctgatgatcgggccgtgatgcatcatagtaattcttcattctcttcctcaaccttttaagtctttcttcctatgaaaataaaaaaaacaatcagactcagaaaattgaatgctttcatacaaaaacgagttaatggagctgttgtttctatttgtgttaacctgcaatggtgtcaagttagagcaaatgcgttcatatgctctcttgcggttaaagcaaacacatgttagactcttcttgattctccaactaggcgtgctactacaactcgcatcttctgcatccgcgttaattagtcctgtataaacaaacaagaacatattaagattctgaagatttaaatccctccacaacacgatgcaaagtaactaagaaaggttccattggccttggaaccaattaagtattaattaataccatggtcctataccatattttgttccggtttggtatgacttcggtattttaagaatacattagagattttaaacaaacgtaaggatttaatcggtttacttctatagtttgtgttgggttatagtaaagcttagctcagagatggaaaaattcagaccggtttagtttattttagatttgattttcggatcaatttttaatggttttagtttggtttagattggttaaactggattggacactcatgtgacaggttgccccaataatagaccatatatgtgaccccattgtcatatagaaacaatgtgattactatttgaagtgagtaccacatcccttcactccaatttataaactttttgttttagattcaatttcatacatctgtcaaaatttgctcttgaagctgatctagacattatatgtggaccaaacataaattcaattctacaattaaatcatagatagtgtagtttactaatttacctaagagagttacgaacataaagatctactgcagtttgtttgagtcacgtggcagaccgattgaatcaaaagatatttttacagaagtggacgaaaaaaaatttgctctcaccgtttgtcaaagtgagaactggttttcatgttttgtcttttcattcaatttcggaccaaattaccctgggaaaacttaataatggcacaaaccaaaccgtacagcagttcgtatcggttgagttgacggcgtaaaccaaaccttacagcagttgatttcggtttagttgatgcggttcagttttgaaaaagacaaaaaaaaaaaactgaaacgaagaaacccgagaaaacgataaagagaagagagtaacggagagatttgagagagaatcagaaagcgaaacgaaattaagtatccattgcttcaaaattcaacataacttcgaattgttgggtagttgaattgagccacagaactcccacatccggggaagtgaaagttaatgtttttcccagcgaagccaagagaaagttactgtttattccggcaaaatttgaacctccggcgagatagcatctttagctatggctgggaataaagctaacgacgaagtcccgaggaagcagcatggtccagggaaggagaagcgggtattaagagtttccccgcggagaaaacgctctgcgacaaaggcaacggaggaactgggttagaatctctaatttaccgtttgttgtctttgggtgtatcagaattgtaaagcttgtttgattaaagggttagaatttgtcggaatttagcatatctttaggatgaaaaattgagaagtagaattggaaatctctgtttccgccaaaaatatgattttgagttataatctggaaaatgtctgtgtacgtacactacttctgtttgctcaacagtatatgacttttaattgcaggtagtccaagtgttgctccgactgaagatcttacagttgaagagttaccaccaagactctttgctctagaccggtacccttccgannnnnnnnnnnnnnnnnnnnnnaaaccggagtacatttctgacatagcaaaagtactaaaggggaaatcagagatgcagttccttctcgattctccatttggggaactttttaaaatacccaaaaacaaggcatctttcaatgctaagcttgtccttggactaatatgccgtcagttagtgacaaagaaggtgaatgagatgtggattgtattcggcggtcatccaatcagatttggattaagagaatttagtatcctaactgggctggaatgtgggaagtatcccaagaagaaagacgttgatgatgttatcagtgtgaaacctgagtgtgagagtgtttggaagactctgtttgatgagaggtttggggacacggttccaacaattgctgatttggtgagctggctgcaggaggaggaaagcatggaggggtggaagcaactggcactatctcttattattttggtagacggtgtggtagcggcccacagtaaccccaacagggctacttcgaagactgtcgagatgacgaagaacctggagttcttctgcaaatacccatggggaagggtgtcctttacccgtactttggggaggatagcaaaattccaaactccttacgatgctcaacaactaataaggggtttactggtagggtcttatgcactacatggcttcccattagctcttcatcttttagctttcgaaacaatcccatcaattgctaagctaggacctgatgatgtacctaacaggacatttgctgagaggtctatccatcgtcttgcctcactgcgggcaatccggacatctcgttttttggagtgtgaggctgctgatgaggtgtgttaaattgtgtatgtacgtacataataagtaaatgtacattatctatggttaacatacttatttgtgtaggttgaggtcaactatattgtgaaaccagctgataatgtttgtcctccatctctttcatgggatgatgaagttgatgatccaagggttgattacattgaggcactgttgatagatgggcaccagtggcaggaggatgaatgggttggaggctatgctagagtaccaaagcagtcgcgcccaccacacctagaagagacaggtaagtataagtataaaggttttttacaaatttttttggtattacacccagaagaaaaccaattaatagcagcaactggtctattgtagatgttaagaggaaacgaaatgcaccgggcccgagccctaaagaacctgctatgaaaaaacagaaatctgaaaatggactgtgataaagaagagaacgctgaggattgttttggagagcctgtgcctgagaggtttattgttgaaatgaggaggtctttcaaggagctggaagaccaaatgtatcaaatgcatgaagatatgaaagactttgtccgtgaccagatacgtgctgcccttgatccaaaaggcaaaaggacagaacaaaccataccttcccatgattcgcgggaaccacctacttctatggataaggcaccggttactacgaagaagccatcgagaaggatgtctacaaaaggaagcactggaacgagaaagtcttcaaggctgactcgtgtttctcatgatgtggacactcctgcactttctgttggctgtaattccaaagaggaagatttggatgtccctggagtacataccactgctttcggcggaagaagaaaaccttcaaagccgaagaaaaatgtttcttttgctgttgacactattgaggaacctgattccaataaggaagatatgcaaggattcattgatgaacaggtaagtcatgtacgtacattgctaaatattttataatccatatgtataactgtactgtctggttcgatacaggatggcgctaataatgaaagtgattttactgcaaatgatggattgaattcttctgccgctgaagaagagatattagacactggatttttaatagttccttatgctggatccacacaatcccatctggtatgtcgtctactaatactcttaacaatctgtttaaatggtgtacgtacatattcgcttaagaagttagttaaactatgtttcaggatagaggaaatgttgttgttggtaagactgtcttcttaggttcaatgtctgggactgtctttgtaacacaggaagagaggcctgtggaagaagctactgttgacaccgagatggaagaagttccatctaatgtgtctgcaatagtttcagaggtagatcttctggtaatcgttatatacagatttccatgactatatgcatatatattacattaatttctccacttatctaacgcttaactctatggtagcctatgtttcaggataatggaccaaaggatgttgccgaacctggcttagttggtacccatacaggggccgatgaaatagctgatgctgacatagagatggtagacaatccatcaggtttaccttcaacatctgcacacgtatgtgttagtcacttgttctttttccatatgtgtacgcccataagactttgcaaattatttttgtttcagaaagaagcaagagatgcttgtgctacgactgaagctaatggcagcgagtccgaagaaacttatgagccttctgatggagatacagctcacatacctggcacaagtgtacgtacatttttgtcactatggtctgtgtacatatatattgtttcaaacattactaaaaagttgctttcctttgataaattctacaggttgaggcggcaagagaatccaaattagtgacagggatggaagttgaaatacctgagaagacccacattgatcccccgtcaccatttcaagtagttaacaatgtaagccaactcttgctgaaaataaaatgtactattaactgttcaaatgtataaaatttatattatgcaggtcacacgagagttggataccaaagtcgttggtgatttgggtgcagctactgatgtggaggtaacaatttgtgtgtttcaattcctattctcggaatagcatacataggattatatgtgtacattatatagacttgtgtacgttaacttgcatagatagtgatggaagagctgggtattgtcgaggggtctgtaggaactgaggatcctaacccagggtcagatgaagcagacaagaccgctattcctaaaaataatgtatgtacctattttaaacatagaaaaacgtataaaactgttgttgacaatcatatttgttaacaggatgaatcagacaatgttgctgctgtcgaagcaaaagaagaaaaaaaagcatccccaaaggtcccaaaaaaagtgaagaagcaacttgtctatgaacaggatgatgcccatcctgatggttttaaggcaaaaacagttttggtgcccgatgtaccaactcaacagacagaggttgttatcagggctggaaatgtctcatacaaccccctggacatggttgacccttcaaaagtagaggaattcagcaatatcattaaaggaccctctatgtaagtacattatattaaaatggattatttaatatctcaatcatcatttttccaagtcttaaggttgttatcaaatatttttctggatttacaggattcacactctttttcgggtttcgcaaagtgcccaacgagttttttgcgaaccttctaacacctggtgaatgggtcgaaagttcggtacgttgcatttatatacgtacattccttgttataaattgtacatagatgattaaatttttcgtggaagtgtacgtacactgatatattttttgaacatttcagcatttagaaatgatggcaatgttgatgtgtcacaagaacggggaacagatgatagcaaacagatgtattgtattggacatgatgctgacgcatctacttaccaagcgggtgggcgacttcaagaagtgtattaataagaacgggttcaaatggggtaaattactgtccgacattgctaatggagttcacataaaccgtgaacccaatatgaagtggctgaaggatgtcgatgttgtgtatgatccgatgaactggaaggctgaacattgggttactttgggaatcaaccttaatgaacggctaataactgtgtatgacgctttaatatcgcacacgcgcgagtcggctgtgaaggcgagaatgactcctatttgcgaaatgatgccgtacttagtcagagcgatgtgccaggatgtattgatttctccgtactcagttgaaccttttgagtatgtgcgttgtcctaccgttgctcaaaacccaactacaggagattgcgggccttacacgatgaagttcttggagttgcttgcgtttggacaccctttttcggaattgacaaccattcgagaagcagatatggtcttctaccgtcagaaatactcggttgacatctacgagcacggcaagcgtgaggccggtactatgcaatttctttaatcgtccaagaacaatattctgattctttgcaactaattattttgaacaaacctatctttgatatatgattgcaactacatttaatttggagattgtcagaagttaatttagtttcctcgatcactctcttgtcgtacacatcgttc

SEQ ID NO: 34861 - DNA, 1832 bp, Arabidopsis thaliana landsberg
  unsure (1)..(1832): unsure at all n locations
gtgaagtggtcgcctatagtgattcgcaactggctgttaaccagttcaatggagactatgaagccaaagactcaaggatggaagcatatcttgaaatggtcaaagatttggctaggaatttcaggaagttcgaactcattcgcataccacgaggagagaatagaaccgcgtacgcacatgcagctctggcgtcgacgtagatccggaagtaaaaagaatcattccggtagaatgcattttggaacgaatcattaaggaagagaaagaaaccctcgtcattacaagatcccgagctgtggcacgagatcgcggtgaacctgtgtttgaattgccactaatcaaaagaagaaaatcaaaaaaggcagccatacttgagcccaccgtgcaagcagaaaatgggatcgaggaaaacatcggacaaacagaagacacagttcctgaaaacatcgttgaagccaaagacaaaccgctagttgaagaagacatcctcgaaccaaatgagcatcccgagccagaagcacgaatatttcatgaaattgaccaaattctggctaaagattggggggctgattggagggagccaataaaacattacattgtgacaggcgacctcccaaagaataagtggcaggctaggaaaatgagaatcgttagcggaaaatcttgtttgtcaaaggacgcattatataagcgaggtgtcagcgacccttacctactatgcatctttgggctcgaatgtcaaaattgtcatgagcgaagtgcacgaaggtctgtgtggtagtcattcatcatgaagggttatggctttaaaaattaagagaatgggatattattggcccactatgataacggattgtgttaagtacgcccagctgtgtaagcgttgccaacttcatgcacctctaatccatcaatcttcggagttattcttttctatctctgcccaatacccgtttatgaggtggtcgatggatatcattggaccattgcacagatcaactcgaggcgtacaatatcttttgtcttaactgattatttttcaaaatggattgaggctgaagcatacataagatttggcagtaaaaactttcatttggaaaattaccaaatgtcggcatggtgtcccatacgagatagtcacacacaacggaccacaattcattttgcacaaattcgaagctttctgttcggattggggaatcaaagtcagttactccactccacgttatccacaagaaatggtcaagccgaagccgcaaacaagacaatactaagcaatctaaaaaagcgcttgaatcatctgaagggaggatggtacgacgagcttcaacctctcttatgggcttaccgcacaactcctagnnnnnnnnnnnnnnnnnnnnnnnnnnnnnnngtgtatgggatggaggcagttgttccggccgagctcaacgtgcttggactttgccgaacagaggctcctctaaatgaagatgaaaattctacaatgctcgatgattcgttagataccatcattgagaggcgagaccacgctttaatccgaattcagaattaccaacacnnnnnnnnnnnnnnnnnnnnntccaaaatcaaaagcagacctttctttgtaggtgattacgtcttaaagcgtgtttttgacaataagaaggaagaaggagcaggcaagctcggcattaattgggaaggaccttacattgttaccgaagtggttcggaacgacgtttataggttaaaggacttggaagacagaccagtccagcggccttggaaagtggtcaatttgaagaaattttatgtttagtaacatgcattttatttgtgatgtacat

SEQ ID NO: 34862 - DNA, 1668 bp, Arabidopsis thaliana landsberg
agactggttgttgtggttacttcacggtagactcggagtgtcagattacaacaatgccttgaaggtaacacaccatgaagtatttactgcatttaggcagaaagtgtagattaataggctgctaaacaaggaaatgtgactcatcaaagtgctttcctattttggatttgagtgcaggtgggctatgatcctgagagtgaatcatatccatcatggttgctaaatcagccttattcccagttattacccaaggtgcaagctcctggaacgtcaataggcaatctgaaagaaagcattagaatgcaatttggtaagtttttcttacatctaacaagaaatcaatgaaaataaacatagatttttagttttcttttttgcttgaccaggatttccggatgattgcattgtctgcaccggtactactgatagcatagctgcatttcttgcagcacgcgcgactgaacctgggaaagcagtgagaactctgcaatactttcggattgctaattatatctcagctatacacttaaccttttcatgtgaaaaaactgtactgtgagggacatattgatgtttccatgaaatgattcttttctatgattatttttcgtaggtaacttcattgggttcgaccttagccatcaaacttctcagcaccaaaagagttgatgatgcgaggtatggagtctacagccaccgcctggatgacaaatggttggtcggaggagcttccaacactggtggagccattctcagacagctctttagtgacgaacatttagagagactgagccaagaaatcaatcctatggtcgcatctcctctagactactatcctttgcaaagcagcggtgaaagatttcccattgctgatcctaacttggctcccaggtttgtctgcctttctcatgttctcacaggtgtctcaaacgtcccttaaagcacgtaaaacacttttctttctgtgtgtattcatcggaaaatatgtttacctattgcagattacttccacgcccagaaagcgacgttgaatacttgcatggtatattggaatcaatcgcacgtattgaggtatgaacaatcatttccaagcggttgctactgagtttcagatgactcatggaaacagtcagaataaaatgatttataaaactccacatctgagcaggtctcttactttatatcaactttatatttctaagtccatgctcttcaagaatcacaagtttcaggcttaaactaggcttaatatagtttttgtttagttaccaataacgatcaagtaagtttggtttaaacatgagaagtaactaagagtgactcatgatggtgttgaatggtaacactatcaggggaaaggctacaagttgctgaaagagttgggagcaacggaggccgaggaagtgttgacagcaggaggtggagccaagaatgacaagtggataaagataaggcagcgagttttgggtttgcctgtgaaaaaagccgtccacactgaagcttcctatggagcttctcttcttgcgctaaagggcccaaaataaaatagtggtttgtgaagcacaacacattttcaagaccagaacatgtgaacaaatgcttgggcataaaacacattttcttgttagacaaatgattatgttgttggataaatgtactgattatgtt

SEQ ID NO: 34863 - DNA, 7884 bp, Arabidopsis thaliana landsberg
tctgcataaacttcggctcacccactttatggagtattctaggactctgctttgatcccgctgatatcaccttgacgtcatctccttccccgtccggcgaaacccttccgttattatgacagtgtttcacggcggcggaagaaatgcaaatgccacacccctctttttttttcccacgcggtggcggcgctgtttcttagcagctacgaataaccgagccaaatccgaagcattagcagctgacgtggcacgcgtcatagggaaagctacgtacacgtggcagcctttgatttgaaggtcgtcatcggctgctaacggacaaaacttccgaccgatctttaaagacttagcgtcgacgaggaagaagcttggaatctccatcataagctcggcagctttcatcggcgcgtgaatgttacgtactccaccgtcggggagaatcactttcgccgccgatgatgatgatgaagacgttttgcttagtgcggaagaaacatagtttcccattatatgaagaaagattcggattcaaggagagattgtaggagcaagctagcaaaagctatgaagaagttttgtttggttggtgtttaggagaggatccaagaagagatgagagtatatatacaagagaatgtttggaggaaaacagagttatataaaattttaaaaatattatttggtggagatagacagttgtgcatatagaggttgacattatatggttgaatccgcgtatttgcattatattatattcaaatatattagccgtgtttttcagaagtctatggtctcattaggtaaatttctcttatcatttgtttatcactttactctacatagaagttatcagttgtaaatggccaaaactatttgatttttgtcaatataagttagttatgagttatgacaagtgaaaaaaatgtaaggtttaactttaacggaaacttaaagaattgttttgaatagtttgtatattttaataaagtttctgaatgttgggttttttcaaaagtttgtaaattttttataatgaattttggtatttggtggtcatataaacatatataactaaaagcttattatttgaacttgtgaaagctaaatttatatttattttcagttaagatggtttgttttcagtatacgaaaacttacattgaatacaaatgaaaatctaagtatttataattgacgatagttaacttcgattaaaatatcaagtgtgaactgaaatgaaagttgcataaacaccgattaaactagattaagtagttaagatttaacaacaacataccacgtagtatgagtgaaattaacggatgctgaaagtatggaaggacgcaacataatctaatagcattattacttccagttgttatctcacagcaagtttgaaatgataagatttataataatcacgaataattaaaattaagattataaaataaggtttgtgccactaatataagttgcgtgtgggacccagcctgcgtttccttcgtactttcgatttggtgattgctctacggaaccgaacctttcctctgatttggaggatcctttgacttggagatgcgactgctccctttatccatgggactccaatcattttttaatcactagtttatatcaaattttatgttctgaataccattatatatcacataatcattattgtagaactaaagagaatttagaattcattgactagctagctaggttgaagtcagacacaaaaaaaacttgtaatcttgtatggtttaacttctgatctaagaattagctgcttataatataattgaatcttttataaactcttgacaccaatattcattccgttatactacacaattctataaacacattatggtgtatgtgttggtcgtgtggtaaatatgtttggtgatagtagaattattagattcgacgttcgttagaagagatttcttctcctaaagaaagaaatttaatttggtgtgaatctcgtataatggaaatataaggttttcagaattgaactaccagtaattaaaaaaaaagagttgaaaagttatataaacacattcaaacaaatccttcaaagtaaactttttttaattgttttagtaaaatcatatgtaacaaagcttcaaaatttaaaattcaaaaaaaaaaacaaagaaaaaaaaaatcttcaaaacttgtaataaaatatgaatcatagtttatataccatgtatcatgcttgtcaatattacgagcttttattaggatcaactcaagaaaacgttatgcatatatgcaccatcacccatgacttggtaactatataaagttaatctaacgttagtaagtgaaattgttgcgtaatatataatatctaagcaatgaggattgatatatatatacgataacaattaactagtacttctaggcttctagctacttgaatactcttattactgcttgctaacaattttcttatgctgagagatttagttgctggttgaaaggaggtacgatcttatgaaacaattcatatatattgtgcatacttttgtgagattgatttttaattacttgtacaaagaacaaaaagaatatattaattaacgagagaatgcactcaactaaaatgattcttgccaacatttcccttgattctgtcaaattttgttgccactcgtgattttctccactgagtttcgtgtgccaagaaatcgtcgcaaaatttcatgatatctgttggaatatcccaaaattaagacttaaattccagcatattcttctttagtggtaaccccaaacctggaatatagggagcatgcgtaagatatcgatatcagttcaataaaatgaccatttacttacttttgaaataaataaatatcatgatccgattatttaattggagtgaaaaaatatctcaaatccacaacaaacatcaagtattcagagaatatcatcgagaatatcagagaatattccaataatatacataattcgatattatcaccaaccaaaaaaaaaaaactaaaaaaccctaattaatacttctatataaatcctaacgtcatttcatctcaaaaaccatcaaaaccacatttcttctcacttcacatacttaaacctcaaaagtttcctaaaaaatccaaaaatgaagaatctcgcaattcttgttgttgccatgatactcttctcaagctgtgtcacatctcaagtcacagcaaaaaatgtggattcatttccattacgtactgaagagctcgaatggtggcattacaatcctttctaccctcacttttaccctaagccacattggccattccccaccaccggaaaggctctcccaccaatcccagccggcttccacccgattccattccatccaccaccggttgtaaccaaatgcttggccgattgcaaggatgtaaaaacatgtttggcggatatcgctaaagctttcttcacccgcaaaccagctattggattggattgttgcgcctccatccagaagatggatgaagattgtgataagactgtctttggagcctaccacaaccctttctttgactgtatggttaagcttcattgctctaccaaagctaaatccactccgtctgctcccactccagcttagggttttaattaggaatttattagaattagaagtactgatttctcttagctagtttctttctttctttcttttcattttaagttatgttttttttttcactttttattatgctttactatgttactcttctagagttttaagtttttctttcttaataaagatatcagtgctttttatttattaaattttgtgcattgttatttgttatcatgcttacatttacgcaatttggtacagatctcataccacataagaaaaagaaaagaaaacttagaataaaattaaaattagtttgttatattttaaaaaatttacattttagaatacatgtctatctatttacaagatggctatagctttagagcaaatacgttcccaacctaccttgccagagacgagtgatatcgtgatctcgatttatgcgacctttacacgtttgagtttacaatcctaacaacatatttatatgcaaaacaaaccttactagttaatcttgcaaaattattttcattttttaataatgaactaatccaaaatttgggatcattcagtaatcatttcaacaactattacgttaaacaacattgcgctatccaaggaggttctactagatctcttaatcctatgtataatggatgatgcacaaggaacaaaaaaaaaaacagataaacgtatttaaaaatacggcaataataataatatcaaaagatattacaaatcaaagtcaaatgaaacttggttcagtaataaagggaaatgaaacttacttcagcaataaagggaaatgaaacttggttcagcgataaaggggaatgaaacattcaaatatccaaatcaatgcaattatgcattattaataaaagtcttcaaacatttgaagtaaatatatttcgattagcagataccactcgtcttcttcctgtcggcgacaaacttcttccagccagtgatgatatctctctgcttgtcgatatcgctcttcttcaccgtgaccatcaagttatcgctgttagattcactcttctcttgtccaagtgatattttgtgaatcactctcgaaggaagctcatcgagctcacgcatcactttctctatatcgatcacaagtctctcagcgagtgttctcgagaaatcttctctgataaccacacgaagaacagtgatgtgttgtgcatttggaggcattgtgtaggccggcactatccatccatacctacatatcaaatatttatagagtaattaattacatatacatagtcattaaatatctacttattttatgaatctttaaccaaagtttaaataagaaaagagtatttgaaatctttttagttaagacaactaactaacctgcgaagcatgtcggagatttcgaactcagtgtgacagctgctatctttcaaggagaaagcgacaagtggcactccctcgtcctttgagacgatgttgaacctttctgtcttctcaagtccttcccttagcacgatcatattctctctgcaattctccatcacatttctgtaaccctgtttgatacatttttattgttaaagtaatgtctaattaattagcttgattaataaatttatataatcgtggactgacttacctcgtggcccaatcggataagttggtagtattgagcaatgacttgacttgaacctgcgtttattgacagaagactttttgaatacgacaacgtttaattatgttttccccaattgtaatatggaaacaaattcgacctcccatccctttgattatataatgtactaccgatttcttaaactaaagtcaaacaaattggaaaaaacaaaaagtggaaataatttacgtgaagtttcccacaattgcttaatctaatcatattgattgatcaattactacactactacgaattaaaaaacggtgtcgtttccgtatttttaaaatggaaagcaatttgatctccatcactttgatggttagactactttagatcatgactaataatgaaaagtcgaacacaaaagattaagacaagctacaaagaaaaataataattaaaataaatattagttacctttggagaaattgagagtaaaggtgggttggtcagcaccaagataattgatatggaagatgagttcctcaggcaaatcctctttgtttctccagatcacccaaccaatccctgcgtacacaagtccatacttgtgaccactcacattgatactcttcaccaagggaagtctaaagtcccattccaattccggatacaaaaacggtgcaatgaatcctccacttgccgcatccacgtggattggtgtatcccatctatcaaaaacatgcatagttgttttaattaacttaaatattctttatcgtatagtgtaatcatgtagacaatccattaagtaattacccggtttctttgttcttttcgaccaagagatcgttcaagagtttaacatcttcgaattctccattaagagtggaaccaagaatggccgcaacacaaatggtgttctcatcaaccatatcaacagcttgttgagggtccatcacatagtatccttcactcaatttcacttccttaagttcaacctcaaagtacctagcgaatttctcccaacacacctaaacatttgaatcgttataagaaaattgatcaaaaagattatgtttagtaagcatcttttatttagaaaacgttacttgaacattggctccggtgacaatgttgggtttatcgacgggtttgccttcagctttgcgcttgttctgccatttacgcttgaaggccaaaccggccaacattatggcctccgatgatccaacggttcctactccgacggcggtctccgcctcttctaacggtgcattgaatagatgtgcaatcatgttcacacatcggttctgttttttaatattaaaacaaaaagaataaattagtgaaacccacttgactaatcattttctgacatcgagattgatgcttaatacaatattcttagtggacaataaacaatgtgacagatgtgaaagcaaaactaagattaatgcacacactaagtcgtggagataaagttaatctaacgttagtaagtgaaattgttgcgtaatatataatatctaagcaatgaggattgatatatatatacgataacaattaactagtacttctaggcttctagctacttgaatactcttattactgcttgctaacaattttcttatgctgagagatttagttgctggttgaaaggaggtacgatcttatgaaacaattcatatatattgtgcatacttttgtgagattgatttttaattacttgtacaaagaacaaaaagaatatattaattaacgagagaatgcactcaactaaaatgattcttgccaacatttcccttgattctgtcaaattttgttgccactcgtgattttctccactgagtttcgtgtgccaagaaatcgtcgcaaaatttcatgatatctgttggaatatcccaaaattaagacttaaattccagcatattcttctttagtggtaaccccaaacctgaaatatagggagcatgcataagatatcgatatcagttcaataaaatgaccatttacttacttttgaaataaataaatatcatgatccgattatttaattttagtgaaaaaatatctcaaatccacaacaaacatcaagtattcagagaatatcatcgagaatatcagagaatattccaataatatacataattcgatattatcaccaaccaaaaaaaaaaaactaaaaaaccctaattaatacttctatataaatcctaacgtcatttcatctcaaaaaccatcaaaaccacatttcttctcacttcacatacttaaacctcaaaagtttcctaaaaaatccaaaaatgaagaatctcgcaattcttgttgttgccatgatactcttctcaagctgtgtcacatctcaagtcacagcaaaaaatgtggattcatttccattacgtactgaagagctcgaatggtggcattacaatcctttctaccctcacttttaccctaagccacattggccattccccaccaccggaaaggctcttccaccaatccagccggctaacaccggattccattccatccaccaccggatgtaaccaaatgctaggccgattgcaaggatgtgaaaaacatgtttggctggatatgctaaagctttcttcaccgcaaccagctattggattggattgtgcgctcgacgagaagatggatgcagatgtga

SEQ ID NO: 34864 - DNA, 2619 bp, Arabidopsis thaliana landsberg
  unsure (1)..(2619): unsure at all n locations
tgccaacctcataatgccaaatggtggaccaaaaggaaaaacatgcatttatttattctcttgacataagagaaaatgcatttaacttgtcaaataatcgcaaggaaaaactctataaaaagatagaaatgtgaacagtataaagtaaataaagaaatatgtgtacatgaaagacctctccaatgttcacttgctccagtttctccaagattagaaactgctacgtctctctctatagctccctcgttttgctatgtggtaattaacaacagacaacagtttttgtttgtccgtaccgttttacttactctctcactgtctttgtctattaccactctcgtctctttcttttttccttctgttctgtttctctctctaaacccaaaacagtcaaaatcagggaagccgaaattttctttgctttcttctcctttggtcctttctttaaacccgagacagttaggtttgtgtgagagagagaatgatgagtaaaaccctttctgtctgagtaagaggaaaccaacatggagatgggttccaactcgggtccgggtcatggtccgggtcaggcagagtcgggtggttcctccactgagtcatcctctttcagtggagggctcatgtttggccagaagatctacttcgaggacggtggtggtggatccgggtcttcttcctcaggtggtcgttcaaacagacgtgtccgtggaggcgggtcgggtcagtcgggtcagataccaaggtgccaagtggaaggttgtgggatggatctaaccaatgcaaaaggttattactcgagacaccgagtttgtggagtgcactctaaaacacctaaagtcactgtggctggtatcgaacagaggttttgtcaacagtgcagcaggttcttttattcttcttcccagttctaccctttagttctattctttattaacatgttttgccattgccggagatattcgagtccggccaaggctctgcttgttccactgttgtgaatcaaatctaaaggctttagctttttgtgattgtcagtgtcatatgcttttttggctttaacgtctttttattttcattttttaaaaaactttacagcttagttttgtaacctggtcttgtgtttgttggactcgttgggctcatttttgggaatatgtttacgtctacttgtagatgcttctcttttatttttcttttgattttgtctttctaaatatctaatccaaagagatatgaaatgaatggacaagaagaaagccgttgccctcatttttgcttctttaggtcatatcattattgagggggacaaaactagtgtaccatagcatcattgacgtgatcattgaggaactctgttacattatattacaagggtgtggttttagattttaattcaaaactgatgacaaaagcttataatgactgatagaatgtatacaaacggtagttaacgtggagagggcttgcctttggaatggtctgctatgttgcttttcttttgaagtaactcaatctgaatcaatcacataggtttcatcagcttccggaatttgacctagagaaaaggagttgccgcaggagactcgctggtcataatgagcgacgaaggaagccacagcctgcgtctctctctgtgttagcttctcgttacgggaggatcgcaccttcgctttacggttagatccttaagctcgacacataagaccgattcatgtacttttcatccttaaaagatagatgtatatgctacagaaaatggtgatgctggaatgaatggaagctttcttgggaaccaagagataggatggccaagttcaagaacattggatacaagagtgatgaggcggccagtgtcatcaccgtcatggcagatcaatccaatgaatgtatttagtcaaggttcagttggtggaggagggacaagcttctcatctccagagattatggacactaaactagagagctacaagggaattggcgactcaaactgtgctctctctcttctgtcaaatccacatcaaccacatgacaacaacaacaacaacaacaacaacaacaacaacaacaacaacaacaacaacaacaacaatacatggcgagcttcttcaggttnnnnnnnnnnnnnnnnnnnaatggctcaaccaccacctgcacctagccagcatcagtatctgaacccgccttgggtattcaaggacaatgataatgatatgtctcctgttttgaatttaggtcagataagtagtggcacggcaatgggtgagttcgagttatctgatcaccatcatcaaagtaggagacagtacatggaagatgagaacacaagggcttatgactcttcttctcaccataccaactggtctctctgacttgtctttgcatcagagaatcttcttacaatgaacgattctgcaatatcttatctttttgcttctttgtttattctgttatctgctatcaataaaccagacaattgttgccagataatggcttttgattttgatttgttgttttatctccatgaaaatccaagttatgagatcagattgatttctttagcacatcaaggttccatataatgaatctataatcatcctagtatattagtcaaaggaggtt

SEQ ID NO: 34865 - DNA, 6286 bp, Arabidopsis thaliana landsberg
atattaaacataaattaacaattatgaaaacataattaataaagaaaaaacagaaatctacaagaatatttggaagtcaaatatgtttaaaatatatattttatatatggcataatctcgttagttaattttacatcatgcaaacttcaatgacctttttaattagttattattcatactaaatgatttttaaaaaataatacatgctaaatttaattgaccaaataacacatgcaaaaacagatttgttagttttccttttagttaaaaaaattaaattattattttcagataaagacatataaattagttattatccatactaattttatttaaaaatttatatatgctaaattaattgaccaataatatatgtaaaaacaaattggttaatttttcttttggttaagaaaaaataaaataaatttagatttagacatgaatttgtatatctaaattttcttaaaaggttttttatttctttaagaaaaaaatagaaaataattttttctgacacacgtcaatatttgatcgatagactttacacgtatcacgatctgatgagttagcaactttgaaacccaacttcatataattagatattactctaatatataaaagagatattatgtatacatatttattatttattattcaatttagttcatacattaaaatatataatatatggaaataaaaatcgacattggcctgaccaagttcggcacaatattactaacatatgcagaaggaattgtgtttctccatactcaaatacctaacattgtacgttcatgatgatacatttcacatggcatttcaaatctatcagccagccaaatatatccaacttttttcgtatgaagataaatctaacttcctcatttattttcgttaattttgaatttcctaacacactaaatttgacaataatacagatcttttattaatgtaaaaatttcgttcattttatttggcatttcctcagtttattcgttggttgactgtactttattattcgtgtatgattagttctaacagttttatgtaaaatctaaattttctccatcatagcaagttagcaaccaacaaggattagatttgtgggccttcgcctcccaattaaattcaaatttatttgcctatcttttatcctctgagataatgttagaaaaatctctcttaaagctaaaaggttatagaatattttaatatatactattaaaagctgggaaggcatatatccctgaaaaaattggttctcatcatagcataattaagaaatctgagcttaaataatctaatcggtctcgagttaacatgcacttcacataaagtaaatattttaatgtatgaaatattgctttaagataaatcatggaaaatagtgtgagacttaactccaccatttatatttttttaaaataaagctatagtagtggtctcaaagggatcaatttaaaccttttttcatcgcctcccaaaaaaaaatatttactatatcattagtgatttatattatactaatatatacatatatatatatatataattaaattagttattgagataatcaataaatgggttactatattcagctaccttatcacaaacgaagaaccttccatatatgttaaggaacaatcaatctcattcattcattcatcagtaaatacacatattgaatttgtaacaaattcctttcacaatacacttaacaattgtcttgagtggacgacattgaattgaaacacgagtacacgacacatgcttcgtcagcttcgacaacataatcaaaatacaataacatgacccaaccataatacaaatcaaacaatataatacatgaaaaacaacaacaattttaatatttcacttcagaagcctaacctttttctgaacattctcaaaccccaaaagcatccaattattataaatctttcaatgcttccaccaccttcaatctataaatctcttatagtttcttcttaaattcacaaagaaacacaagcctttcatattaaaaaagaagaaaaaaaaaagcaaataaaatattttcagttttatcatctgtatatgtaacacacaaacacactcatagctagctctagatctttcttatctaatttccagtagaaggaggtgaattacagtcgcaaacaacctcggtttcagtttctctccgatggaaactgcgatggcagccacaggcggcgcacgttagcgctgccaccgtaccttcctctcctcggcttgccatgaactcacggcagccgtcaacagcgtaacctcccaccgccgcagcgtggttcttctgacattctccgtacctcacagttctcactgtcagagacgaagccgtcgacgagcttctagaaggttcctctggcgaggctctcctcaacaccacctgacgcttcctcatgctttctcacttcaattctcgtctcagctctttcttcttcttgacttttttttatgaaatctaaacttgtaataatgtatatatattaaagaggaagagaaaaatgcataataaagtttttgttcttttactttaatttctacggctcgaaatagttagggagtgaaagatcaaaacaattacaagaggacctcggttgttaaccctaaccctatatgtgatatttatagcatttctgatagcaatcgacaaccaaaccttagatatttttcttgcaactgcatatatatatatatatatatatatgtgtgtgtgtgtatagagtaaggtgagcatataagcatgtatagatagagacctttggaggagagggtagccgccgatgaagtggagaagcttgattaggagggagacggcggagtagaggaggatgaggagaagaaagaaagatgttgagacattgatgaagagacttgctagtgcttcttcatttgtataacattgcattttaattaaaactctttttctctctttcttttatctttttgtatctttcttcttcttcctatcaaatggagagagagagactacctcggctacaaaatcaaaagcaaagtttgtagttttacaaaaataaaaaatagaaagttgagttgagtgcgtctctttttctttttttttttctttttttttaattctaatcttttaattgtctcaatacatgtttataaatttggacttcttataattttcttgagacaagattatacgcctactcattctttaaagggcatgctgaaattataccaagtgccaagtttaaagatcactgaatcccttgagatatataacccataagtatatctcataatcatttgatttgttatgaatgaattgtgaaatatacatgggttagttattcttacccaaaacttaaaattagcaaaacttgtggaagatgaatgtagtggaagactctatttttacctgaaagaataaaaacaaagttgatgatgtttaccgacttaccaaaggcaagaatccaatatatattgaatattatggatgaaataaagaaaactatcttcgtatgaaaattatggatggagacaagataaaaagaagatttctggagcaacaagaaagtgaagaggccaaaaccgtgtcacacgcttctctctaatgtaaacttgtgtttataagcttttgcttttccaaaagacatattatacaatatacatgcatgttacgtgtacaattaacatggtacatgtaaagaaacatattaataatttcatataaatatatttaacgtacatatctaatgcatctctatattttattgttgtgttttgttttgagaaaaatggtaaatttttgaccaaaaaaagagttgatctacaggcgccatagactaataagtctagaattttaaatgggccggaattatactaattgggcccgtattatacttggcccaggtttgttcacaagtactcttgtgttgcgtctttaacacacaggttaagctcggtagcgattaccgacgagaaccatggcgggtaagcagatcggcggagacggaggtttaccggcaaatctcgccggaatgactaaaagtcagctctacgatattatgtctcaaatgaaggttctctcttctttcttttctatacttttccgattatcagctataacactatcctttacggattcgaatagagaacaattgatttcttcttctttttttcgaattctgtttttttgatcagtcgaatctaattgtgcagacgttgattgatcaaaaccatcaacaagcgagggagattctgattcggaaccctcttttgacgaaggctcttttccaggttcttcttcacttcgctaatcttttccatcttctaaatctgcaatccgtgtggtcttataagcaatgaggaattctgatttggagcttcttacttgagtaaattgattggactagtttgggtttagtattgttgaagaagcaggtaggttaacaattagggttttttgttagtttccagatatgaacaatctttaggtttatgcctctatttacaaatagatttcagaatttgtatatggtgatgatgatgctatgtttgttgaaatgccaggcacaaatcatgctcggaatggttcagcctcctcaagtggtatgtacttgcgtcctcttaagtcattttgttaatagatttcatttcaagcatcttaaattttacaaaaatctgtttctattagactccgaaagttgagccacaagctgtacaacaacctcaacaatctcatcaatctatcccgccaaagccaaacgttcaagctcatatgtcttgtttccaaggcggtggcagtgtacatgagccagccaatacgatgcagccacaagccccgattcgaaaacacccaacaccacaaccaatgcctatgcctccaccaccgccttctgtttctgcaaatagtgctcaatcacagcctcgtttttcgcatccccagcgtcagggacatctgaatcctgctgtcacttctatgtctcacccacagtcttctcaagttcaaaacgcgcctcctccggcttcccatcatccaacatcccagcaacctccttttcatcatcttgatataccagcttcctccactcagttgcaacaacaaccaatgcactctggtggaggtcctcatgtggcacagcaacagtctagaccatatcatcatcaatatggacaagcccaaactggtccaaacactggatttcagcaccatggcgcacctactcagcatctttctcaacccatgtatcatgtgagtcagagttatgacttatgagtagctattgtcggtttccttttatttccctcattgtgaattatgaagtttttgactgactagaactcgttatttgagccaattttgcagtcaggcaacagaccccctgcttccggtggacctcaattcccgcagggacagccacatctgcctagtcagccaacatatcaggtattgatactcttactttttgacctttaggcgatatgtttgatgttttgcagactgagtatgaaattatgttgctttatctatgtgctttcttccgagcactacaccttcaacgagtagagattaccctttaatgagaattctctctaacatctatcattgttattcttaatcagatatgagaaatgatttcttctggcaataattcttctcatcttttttcattgtcaagctatcatcatatttctagacttctagttctgattccgttaaaatcatgttctgctttagattaataaatcatctaaatggaaactctacatctttttggttttgcttttgggtctcactgcttgtaatcttgtttattgtttcagggaggaggtcaatatcgtggagactacaacaataaccaattagcaggtctgatggctcaagacagaggtccttcttggatggctggccaatcagagagctcgaacattactcatctgccaggcttaggaccggtgcctccaccaagccaagttgggcctggaggtggcccaccacctcgccctgcaccggtaatttatcttttaactgcaaggcacagccattgaaccgctgttactgctacgatgtatattcatgtcgatgactcagtagttttattagcccccccaaatcaatcaaattcgacgttcctttccagtagatgttgtagttgtcttttgccggaattcaaaatgataatttctgattacagagcaaagagcttttgttattttttgctgatgattgtgtttttcttacttgtgcagatatctgcagagatggagaagcactacttcacaagtgatg

SEQ ID NO: 34866 - DNA, 3739 bp, Arabidopsis thaliana landsberg
  unsure (1)..(3739): unsure at all n locations
cctgctcttctaattctaatcgcgaacatccttaaactgctgaactcctcatcatactcacgaacggttcttgtgccctgacgaagctccatgaactcatgatctaactgttccatagcttcccgcggaaagtacttattattgaactcccttaagaaatccttccaggtaggcacatatccagcaggcaagcccttctcaaaatttttccaccaatgatctgcttctcccctcaggtaatgcactgaaaaatccttctnnnnnnnnnnnnnnnnnnnnnnnnnnnnnnnnnntttctccaacatctgcctccaatcannnnnnnnnnnnnnnnnnnatccaccactaaaatactttgtgcccatggtactcatgagcatcatcgtcccaaaatattcggtctgtgcaagcggcactggtggctgatggtactgaggtacttcaaccctaggtgctggtggcagtggcggtggctaatggtactgaggtgcagcaactcgagatgccggtggcggtggcggtgcatacaccggtcgatccaaaatctcacgcatcatgtttcggagctcctgcatcttggtctgattcgctgcaatctctgctgcatgagctgcattagctgcatgagctgcctcatctgcttgaaatgcctgagctggttgagctaccacaggtggctggcctagtccaacaactggcgcattcgctactcgttttacccgagcgttcgcaggacgtactgatcttcttggcgggattttctgtttacacaagactaaacattaggacccttataataaccaacaatttacactactactttataattaagcctagcacatttggtgttttttttttttttttttttaaacccctgttcctatatcaatactgaaaactctttctttttaaaacgctttctaaaactataaaacacaagaaaactttttttcataaaaataaatatagatatagttagtcttccgggtcaacacatgcttgactttaaacctccactctgataccagttataatacccgtctctctcaatgttgagatgacgtactttcatcttttccattcatttattcatcttcttcaaattaaatcttgaaataatatatcattatttcgggaaactttcttttattaagaatcaaaaataaattatcttaaaatagtagcataaataaactaaaatctttggataaaaatgtataaagaaaccgtgtttagaaatataagaaataacgataaatcaaatgaaaccccaaagttcccgaaataacaccaagcgagcagctactcaacattctcttcctcacctgaggggaaaagaaaagggggtgagtaattaattactcagtgaaggcagtcaaaactgtccaccgaattacaatacacgattatactttcacacaatatccatttcataagcatagactcaaacaaaaagcatatagcttaaactttcctagtaagctataacagactagcttccgtcttgctcaccgcaagatcttttgttttcttttcttagtttttaacatatgttaacttatggttcctcaagcttatttatggaagaccacggctcgtaactcgatccttcctctcattgctcgtcagcgattaataacctgtaataaacccgtcggttccattacagtccaacatcctcaatcttatcctttctttaatatcattattctctttatttatttctatatttttatttaaaaatacgtcttaaagacgtcaaacaaatcaacatgtatatcacgctaacaacctaacgcataacatcacacaacacattttataatattttaacaattaattcctaataattaacaatcaacacccaatgtctaatcctatacaaatgaacttcaaaagtacaaaagtagaaaggtgatactctgtttccacggatcccgccctcgccttagcaactcggttggataacacggtttaggactagcaacaacggaaattggtccaatagcgatctcaatctgcgacggtttaaataaccggtcaaaaattaatttccaaaaataatctataattaatttcataaccaacccaaattataactcttgattaattggtttgactatacttcaataaattaactaaaaataatttaataaattaacccaaccaagtctaataattaactattgaacgtgtacgactacacgtaacactacaaccataaattgaatccacgcatgcacgtgaataaaagcttccggtttagcagcaattaaccaacactttaataactaaaccaatgaaccaagtcatcttcttcttcctcacgacacaatttcacgtaacctctaactcaacaaacgattcattgattttaactggtttagatcatggtttagtaatcaaggcaaacataacaacaacaaaaccagatacgagacaaggtttgatgagttaccttcctcaacaagctttctggtcggtttcacgtgacggaacgaacggaaaagtgcaggacttgttatcacagatctgtgatggaaaaatccatgattagatttattcaacaatcctaaagaaagctaagagatcaaaaccgaattgattcacgtggttacctctccgtgaggatgattcatgcgtggctccggctcaacacaacaacgatcaccgtaggtctgagttgtgatgcgtcggttcacaacaagggtttgagttaggctgagcacttaaaaatgacaaaagaacaaaggcttgagttgagatcgagacttaccgtgtttgacggcgtagggtttttgtggtgtgactcgcaacttgcgttttatttttataatctcgtgggatcattaggttttcacttaggttcaaaacattagcgagctggacttgggctttatggtctaattgtaaaataggggtgttacaagtcataacaactgtctcaactgtgtcgagttttccatgttgctgtcctgaaggggaaacatactatgaggttagatatgtgacatttaccatcagagataatcagtgagttaacaatcatggatgtatattggtattgaaattcgttaggaacagacatatatgtgtagtatgataaatttctatattcttttgttgtagtgagaggatcataacttgtgttgctagagggagtgcgtgtgagtcttttctgtcaaagttttatcgacttattggtatgaaaagttacaactatgagccaatcactacagtgctccggttctttagaacctctatgtttaaaggttagtggaaattcgttaatatgttagtctcttaccttaaaatgttaaatcttgttatatataactaatcagcataatgataacaaatattataggatctaaggccttaatcagcgagtatgggtgttcaagggtcttcattgagtaatcgtttccagacttcgatgtaacatgttacatgtatgtgaaagacattagataatttgttattgttcattagatactaactttttcaaaaagtttgacatctttttatattattgttacagcaatttttttgcatgtgaaccagatgggtctgttgaaaggaggattgagtatgttgctgaggactaatcctagagtcagattcgtctgaagaaagatttgtataaacaatttacattgcttttaaaaatcaaactgttcattcttaagttgattttggttttatcttttgaactattgttgaaaagtttgtaagaatg

SEQ ID NO: 34867 - DNA, 4717 bp, Arabidopsis thaliana landsberg
  unsure (1)..(4717): unsure at all n locations
aaaaaacgcacggaataggacaaacttttgaagattttctcgagtcaaatcggtagtcactttctttctctcgggagcataattaggacctttctttacggaataccccttccatatcctgagaagtagtaaagatatcagctattgataatgatgtctctcaataggaacgaaacataaaagaaaagtagaatcaattactgtggtactatgagttttctggctttaagagaattgatactttctttgtcaaattcctgaaggggaagagagagtgatgctccaaattaatatgaatcattaaggtaaatacaacagaggaactctctactgaaataacatagcacaaaccttcccttgttgtatttgtaaaagctggcctttcactttatcttctacatctttaacctacaaaaaaatggttcagattgatgcagactaaacaattgaaatgattcatacactaccaaacatcatccaaaaacggaggtagcaaacagaaagtaaaaacaatctagcgttaccttcctcgagacttgctttcccatttccacccacttgttttttccagcttgtgaacagccgatcttgaagactgcaggagctaactttttctgaaatagcacgaattttacagtagttgttttagcatatgactaaacaaatcccacactatatacatctacatatccattgcaatcaataacctggagctcatcttttgatatgctgccttcttcaggaacagctaagaaaagttgaacctctggtgacccttctgccgcatatttcttcccttcatcagtcagaatccatgtctcctttttaatgtcctgcagagaatagtcaacccatgtgactgacaatgcaaatctagtccactaaaccttgttaatgatagagacttatggcaaactgtgagattcatcagtggcattcatggaaaaagtacaaaactttcaaccagatatcaaaacgtcttactctaacaccctagaccaataatccaaacccttttatcgaaattccagcacgagtacctgaacatcgatgtaacgaaaaccatggagacttttgatgacattgacgagttcgttgtggtcgatgttgaactcggcagagaattgacccgaatcagtgatctgttcattgttctgaaggaaccctagtatcgcctcttccgccataagtaatctcttgaagtgttcttttttttttttaatcgaaagagctttgccctactcttctatctcctccggtcaaaaacagagagtgagtaacgccgcagaatagtatttgcattaaattggtttttaagggtttgactttagagtgcgtttttaatagtctccaattacttttgaaattgcaacatagacccaaatacttttaaaagaaaaatgaaagctaaaatttttttcactatagtaaaatatgtaagttatgggaggaaagcaaactccaaacgagttaatgaacaaataaaaccaaataatagtccttcttgcacatatcagtgaatgatcaactaattaaacacatgtctgataagccattgcatcaaacatcaggagcaagagcacgcactaattgatttttctcatcggttataaagacaacgtcagaccacttaagcaacccccaaatctctccttgatgttttttttcaataacaacttcttcacaccagattagtttcttcttaatagtcacgcactcctcccacaaaagaactatgtttcctccataattcaccattttaacaccttcaccacgaggattcataatcgacctgcgcacgaatcctttcaaatttttccatatttttctacatgagtcataccattggagcatctcgtaactataacggtagaacacgttctctatcacacaattagagaaatgaaatccatgacttaacgataagtgtggctctctccatctacctttgtgtatctcgtaagtcatgaaagttgcacgattattttctaatgaacttacgtggatagcttctttataccctacgattttgtaattaaaacctctgcatacctcttcgttaggaatctgcaaaaactcccatgtttgggtcttcgtatcgaaaacttcaatccaatttgttgaatcgggatttttgcagccttctattacatatattttcccatcaaggacgcaagtagatggaaagtcatcacgtgccacgcgcatgcttggagcctcacgccatgtatgagaacggcagtccatgaccatgaccttagacgatgcactattatttaagtttcgtccaccaatagcatagatatcagaaccaaccgctacaacacctgatctgtagtcaaaaggagaatcaagagatgatattgggaccaaaattttggcgctgctacttattttttggcggagggtgaaacaaatttgtctgtaatcagtattcgtacggaaccgtaaacacacgtaaagaccactgctagtacaacctaagaatgatctaagctcttgaagctccgttgaggcaatgagagaccggaatttcttggaaacgaaggaaaggctagggtaatacactttggaaacacgggctaaacagtttaataccaaatcatcaggaagcatcgaaaacgtcatctgtgactcatcttccttcgacattaacataattgtgggatacgtgaacgaaagcttcgtacgtacgttttcgcttcctctcgatctctaataataatcctaaatccactgccacaaatacagtatatatgcacaaaaattaaaactcgtatcccttggaaagtggaaaaaactaatttgtattaaaaagatttaatttacaaacgatatatgacgaaaaaaaaaagatttagttaacaaattgtactgttacgaatatatagattttatctaaaactgatttacagggatggtaatattttatagttgacaaaaataaaaaaaggatgacatgataatattttcttatgtttatttttaacgcacaaaaataaaaactagggagggtgtataatgcataaattaaaagttagagggcaaatttgtgctacttctgcaaaacttaaccgatgccgtttgggttgtagggtttagtgcatccgttttctgttcacttgttccatttcgctgtgtaagaaaagaaaaacgaaactttcggttgtgcgaaatcttaagatcaaagatggcatcgttttgcagatcagcgttaatggcaggttccagaaacttagtatcaagatccagaaccgtaactcaaaagtccctcaatcttaaacccacaactacttcatctcctttcgcttcaatgtctcaatccatccctcgcgcttcgaggtaactacttcacctttcagctgattcaagaagtttaactcattttctcttatgctcaactttggaaaaaggaaatttagagaaaatattcagctcgttttaatcagaaacattttatgtgaagggttctctctgctttgggaagtgttgaaacgatgattccacttcacagtgccgttgcttcagctcgtctccggtcaagcatcgctgctgattcctcttgttggagcttgctttctcagggtatcttttttcctctatttttttgctgttttcttgcaaattatccttatatttgttgtctttttggtgggttgattctgttttctgctttatctgttgtgcatttggaaagtttttgagaataagattgaaacaggagatcaatttcttagtaagcttgaatctctcttatgaaatgggatcacaactcttaaaaagatagcaagtattagatgatattcttgaatagcagcataattgtggcaagagatttttcattagtctacactcgttggattcaaagtttttttttttagctcaaacaatactgattagatgtgaaactggatgatatctgtgaaagatatgttttttaagtgtaccaaagattgtggcttcactagatatagtttcgactgggacaaagcctgataaagatcaaaactttgaagaaaggaactgttacttctcttatacaatcatgtcttcttgagatatatgtctagttggtcttagattatttagttgctccttttgatttttctaaaactttgcttctttctctgacttgtggttcttctacttaatgcgataggacttgcaacgcctttgtgaccccggtctgctggatcgatataaggcggaaataatcaatatattacaatgaatgaacaagaatagtgtttttttttctagttcgnnnnnnnnnnnnnnnnnnnnnntgtgtggttcacaaggacttcttgtttcaaacttcttgcaatctatctattcgatatttggatccacacattttggggcctttttccttcactaaagtcagcatttgctttcttttgttcatgcacattgtaacgaggaacctctgcatttttcaatttctgaatcttgttcactgatcctcttcccatttctctcatctctttagaactgggagttcctcggtgacaccatcattagctttggtcttggtcttgaagcgtccatgggttgatacttgatattgtactgtttaagactacttgtgacgttgccagcttcttagaccggttcatccggttataggatacaggttgtttcccaattttatgttatcgtttagactttagatcttttttgagcatggaaggggatttagcatcatttttaagtc

SEQ ID NO: 34868 - DNA, 4400 bp, Arabidopsis thaliana landsberg
gagttgctcttgcaaattcacctcataatttatcgttgaatcaaaacttttctatgcagattttcatcacttttccaattaaatgtagtttattaatattctataggaaaatatgctatacagtatcgaaactcgcacggattgatagccacatgttgagttatagccatggtgcatatcttatagatcacaatctcatgagtcatggactaaaggattggacaaaggtaaactcgtaaaacttataaccatgttgtatttatatattctaaccttgtttattcatactaccaattctctgttcctccatccaattcctctttgaacacttatcaaagttgcaagtatttttctatgtgtattgaaaacacagtcgaagataagatcattctttaatgtttcagcctcgtcaatgacatatgtgggattcaggtgagtggaactgaaacttgagaacgagttttctttcgagattaacgaaaaatagagtgcaaagagactgctttcgaaatagaaatcaaacataaaatcgagttcttcgatacaaacatagtttaaccaaaacagagtactttatctttcttttttcttggttcaaagttcaaacagagtagtttaaccaaattttaaaacaatattaaaatttggaaaatttgattaccacatgttgtgcgcttataaccatgtcgtattttttataaagttcaaaatctcatggctaaggatcgtaaaacttataaccatgttgcattcaaatattcttaccttgtttattcatcccgtaattcatactactttgttggaagataatgcattttttaattcatactatttccaaatccaataaacctattaagagctccacatgctattaattggcaaacacaattactcttggatcggccatggctactactgttcatctcagctcatcctccctcttcagccaatccagaggaagaagagacaactccatatcttccgtcaagagtctccgaaaacgcaccgttttatctctctcttctgccctcacctcacaagacgcagggcacatgattcaaccagagggaaaaagcaacgataacaactctgcttttgatttcaagctgtatatgatccgcaaagccgagtctgtaaatgcggctctcgacgtttccgtaccgcttctgaaaccccttacgatccaagaagcggtcaggtactctttgctagccggcggaaaacgtgtgaggcctctgctctgcattgccgcttgtgagcttgtggggggcgacgaggctactgccatgtcagccgcttgcgcggtcgagatgatccacacaagctctctcattcatgacgatcttccgtgcatggacaatgccgacctccgtagaggcaagcccaccaatcacaaggtatgttgtttaattatatgaaggctcagagataatgctgaactagtgttgaaccaatttttgctcaaacaaggtatatggagaagacatggcggttttggcaggtgatgcactccttgcattggcgtttgagcacatgacggttgtgtcgagtgggttggtcgctcccgagaagatgattcgcgccgtggttgagctggccagggccatagggactacagggctagttgctggacaaatgatagacctagccagcgaaagactgaatccagacaaggttggattggagcatctagagttcatccatctccacaaaacggcggcattgttggaggcagcggcagttttaggggttataatgggaggtggaacagaggaagaaatcgaaaagcttagaaagtatgctaggtgtattggactactgtttcaggttgttgatgacattctcgacgtaacaaaatctactgaggaattgggtaagacagccggaaaagacgtaatggccggaaagctgacgtatccaaggctgataggtttggagggatccagggaagttgcagagaaactgaggagagaagcagaggaacagcttaaagggtttgatccaagtaaggcggcgcctctggtggctcttgccagctacattgcttgcagacacaactgatacttttcatggactgatcaatgcatctaatctcctaacaagtccttttacttggatctatggtcttgtttcttataaatcatctatgccgtgtgatcatctctctcatttgttttcaagttgtattatgtttttgaatcttaataatgtaatgcgaaaaatatcaataagatttgctcataggaactaaatcgtagcgtaaggattcagatgatcagaactaaaacgtgagcgcaggtttagcttatgggttttcttcacccaaaacagagtataaagatctgaatttttgttattgaagcagcagcaagaacgaattccagacaaaaaccacagttgacccgatgtggttcttgttgaatgcagaccatgatattcacaaacactgctgtatcgtaacttggaacgaacttaatgccagtcagagatagagattgaacattgattgcttggattctcaattaattcaatcatattaaatgattgtctaacattctcaacataattcagtcatattaaatgatttgtctaatgaatgcttttaatgttcactaatgtgcccaacccaaacattacagaatttaataatagcttggattttcccactaaatcaaactaaatcttcgtcagacattttccctcgcaatatgtgtccaaccataaaaaaaaaaaaaaaaccactaattacgattcgtagttactttattttgttttattcaaatcagccatttgaaagtttgaagcatcagcgcaaacattaagaacagagtttctctaaatagtttttcgtctttatcctttttacagtaacaacatggaagcaacaagaatgggttttggtggtcttagcgttcctctctctctcacgcccaacctctctctcattcctcagcgtttgcttgacaagcacaatctttccctgaaaccggtaaagatacaccacttggtatgtgtaaggtctactaagagtagtgatgatcttgagaatactcgtccattgacgtactattctcccactctttggggagatcactttctctctgttcccctcgaccacgctgtaagtagatagatataagaagcacaagatgaccccaataattgttggttcagacaacatgaacgattttttttataaattgcgttgtatatttaataattgtaggaatttgttgaactagaaagagagattgaaactatgaagccgctggtgaaagacatgctcatgtcttctcaaagcagcgacaaggagaagattcgtctaatccatttgctcgttagcctcgggagctcttatcattttgataaggagattcaagatatccttaaacacagtttcacaaagttggatgacataatagccaaggaaaatgatttggaaacaatctccattatgtttgaggttttcagactatatggacataagatgtcttgcggtatattgacaattatttaaaccagttaattagatcagtttttttgtttcacaaatatatataacaaagcatataatggtttggggtagatgtgttcgagagattcaaaagcgaagatgggaagtttaaggaaagtttagttggggatgttagagggctgctacagatgtacgaagccgcgcatctaggagcaccatctgaagatataatggatgaagccttgagttttgcgcggtatcacttggaatcgttggtaagccacgaaacaagctccaatctctttaatcatgtacaaaacgaattgtatagagctcgatatcatagcatagagatactagtagaacggcagtacatttcgttctacgaacaagaagaagatcacaataagatgctactcagattagctaagctcaatttcaagttattgcagctgcattacatcaaagaactgaaaacttttatcaagtaggatcgcgtatattcattgtcgatttttttgtgaactttcataacaatattgaataattctcttctttattttttcgggttttttgtgtatgctcttttggaagatggtggatggagctagaccttacatctaagtggccaagtcaatttcgagagagaatcgtggaggcgtggctagcaggattgatgatgtactatgaacctcaattttcaggtgggagggtaattgccgcaaagtttaactacctccttaccattttagatgacgcttgcgatcactatttctctattcctgagcttacaaggctcgtagattgtgtggaaaggtacataggctaactttctacctctacattttcaacttatatcttgagtaatggttaatttatttatcttttcttctcctagattagtttaatttgcataatcataaac

SEQ ID NO: 34869 - DNA, 3190 bp, Arabidopsis thaliana landsberg
ttatgagatcgttaaagaaggcccttcacacaaatctttatttcaatcgactgtgatactggatggtgtcagatatacttctttgcctggattcttcaatcgtaaggctgcagagcaatcagctgccgaggttgctctccgggaattagcaaaatccagtgagctaagccaatgtgtttcacaacctgttgtaagcacctcatctttcttatttcgctcgtgattattgttaagttcactgcaaaactattgaacctagcctaggggtttagcagcgaattgtagctttgccatctcagcagtagtccttatgcttagtttgagcgttgaaggtttaaagggaagctcatggttagtttcagagttgaaggtttaaaggggagctgtgagaatacgttagggggcattctgtatttgtctaggctcttggttggacaatgatcgagattcaagagtttaaagaatccactcattaataaagtgtcttctgtcttatcggatttatgtgtattgccaacttctagagggaagattcttaggctgtttctgtaagttattgctcttgtctaactttgaatggcttattaatgcagcacgaaacgggactatgcaagaacctacttcaagaatacgctcaaaagatgaattacgcgattccattgtatcagtgccagaaggtcgaaactcttgggagagttacacaattcacatgtactgtagagattggaggcataaagtacacaggagcttcaacaagtatctaaaaaagatgctgagattagcgctgggagaactgctcttttagcgatccagtcagacactaaaaacaaccttgccaactacaacactcagcttactgtactttcttgtgagaagaagacaatacaggcagctatcccacttaaagaaaccgtcaagactcttaaagccaggaaggctcagttcaaaaagaaagctcagaaaggaaaacgcacagtagctaaaaatcctgaagatattatcatccctcctcaacctactgatcattgtcaaaacgatcagtcagagaaaattgagacaacgccaaatctggaaccttcttcatgcatgaacgggttaaaggaggcagcatttgggagtgtggagacagagaaaattgagacaacgccaaatctggaaccttcttcatgcatgaacgggttaaaggaggcagcatttgggagtgtggagacagagaaaattgagccaacgccaaatttccaaccttcttcatgcataaacgggttaaaggaggcagcatttgggagtgtggagacagagaaaattgagacaacgccaaatctggaatcttcttcatgcatgagcgggttaaaggaggcagcatttgggagtgtggagacagaagcaagccacgcataacagtgtcaagatggagtcttgtgagtttgtcatagttactatatggttacgtagccattttgtgattcctatctagtctagtagtaattcacagattgaagagaagtaatatttgagcggaaaatcaaaactaatatgattggtacaatttggtggtcgattgagtcattcgaataaagtaatgtggggttgcaaaacagaagcttcatatctacatataaatgaaaattactctcaaacttcattatttgtgggccggttataaaaacacaaacccaacagaaggtccattaccctcactcttcattatttgtgggctggttctaaaaaacaaaagtccaatagaaggttcattaccctcactcttgattatttgtgggctggttctaaaaaacagaagcccaacttgctgacccaacaggtccgttcccgtggccctgatctcaatgcagagatataaatacactctgccttcctcatttcatttcttcggcgatctagggttttagttgtcgcacgaggaggaaaaatgccagcgggtcatggagttcgggcgagaacgagggatctgttcgcgaggccattcaggaagaagggttacattccactctcgacttacctgagaaccttcaaggtcggcgattacgtcgatgtgaaggtgaatggtgcgatccacaagggtatgcctcacaagttctaccacggtcgtactggtcgtatctggaacgtcactaaacgcgccgtcggtgttgaagtcaacaaacaggtctgatgaactctcctatctcttcagcttttgtgtcattgaattaggatttgagcttcttagtgtgctatttggattgttgatctattgctttgatgtagaaatgtgtgattgagtataggtttgtggaatgtaaatcttcttctatgctacaattgagctcagattttgagttttagctcgaagatgttatcttctattatgcagtagcgtggttcgtgatcctgtttcagatttgaaagttgattgctttggtctcgtttagtctttagccttagcacgcagtgttcatatgttcccagttattcaatacttcaactcgtgttcattaaactgctagtgtgttttctttcatgactatttaattgttaaactttggccttttttactcatcttgtttttataagtctctctatagatgttactgtgtaatatggattatggattatcctatgacaataacacaaatctttttgctagtactacttatattgggtatcatgactgacacatgttgggggtgtttcagattggcaacaggatcataaggaagaggattcatgtgcgtgtggagcatgtgcagcaatcaagatgtgctgaggagttcaagctgaggaagaagaagaatgatgagctcaaggctgcagccaaagccaatggtgagaccatcagcaccaagagacagcctaaaggacccaaaccaggattcatggtcgaaggaatgaccttggagactgtcactccaatcccctacgatgtcgtcaacgatctcaaaggaggctattagttctatcttcttgtgctttagaactctttttcatatgttttgtagcagacttaaaactaagaattatgatttactatataacaggagtttgcaatccagattttgtaaggatggtttatttttattattggtatttttgatcttccaacccctgttcccttttgtcaacggtgtcttacgaattttaaatatgtctgaaattgatttaattatgagcctcattttaagatacgtgtgac

SEQ ID NO: 34870 - DNA, 3968 bp, Arabidopsis thaliana landsberg
  unsure (1)..(3968): unsure at all n locations
acctagcaattaaaaatgaaaattttaaccttatgaaggttgaattaaaagaaatgagaaaactgaataaaaaaatcttgaaaatttccaacttttaagatctaagaagagaaagaaaaaagaaaaatctagatctactttttggtgtttttgatgagagagaagagagataatgtctcaaaccatttccttttttcaagaagatatcttaagtgttttgtgtgtttaattttgtaaagagtagagaaaaaaatgaatgaaaagagagaaaaagtaatggttgtaaattatggtaagtttggattgcttaggttgggttgatggtgtagtagtaaaaaaactttaaaaagtgtttactctttctaaagtgctttattgcgtaattgagtttcaaaaaagtgtccaattacctaatattctcaaaaacatttatcatgttaatgacatttctgtaattaacgtaaatgagaaggatatatatggttgatttttcttttcttttttatagttacttaattttcaaattattaatgttataaaactaaaaactattcttttagacatatatattaatatagccttaaattttaagtgacattgaagaaaattacgatggaattgaaaatgcttacaacgatattaagtagcttaaaaatatgaaattctaaaatgtgcaattcataaatttaagattcctagatgtagtccataattatatttttatctgtttggttttttataataaattagaaaaaatggataaaaaatgtaaccttagctaaaaagaaaaagaaagaaagacccaataaccaacgaaatccatttacccgtccataggtcttgggttcggcccatcagtttcccgccacattgttcccgccaaaactcatagtcgacataaagccctgcccccactctctctcttcgtttagaactttttgataagagagaaagagatagagaaattcgtaacggagacgaagcaacgatgtcaggatgggacgaaggagcagtttactacagcgaccagccgcagttcccggaggccggagacgccgcaaccatcagtccccacgccgtcttaaccaaatttaaggaattcattcgaaacttcgagatcgaacagaattgtttcccctacagagaagctctcctcgataaccctaagcgacttgttgtccacctcgaagatctcctctcctttgattccgatctcccctccttaatccgatctgctcctgccgattatctccctgtggtatgacttaaaaaaaaattagggttcatataagctttgtattgagtgagtcaatctttgaattgtagtttgagaaagcagctggtgaagtgttgactggattgaaaatgagggaggctaatgagggaggggtaatggaggaacctctgactagagatgtgcagattttgctcacttcaagagaggatccagtatcaatgagattacttggggtatgtctgtttttttgtttttagtatcaatgagattacttggggtatgtctataatgtactctttactcttgataggcacagtacatctcaaagttggtgaaaatctctgggattagtattgcagcttcgagagtgaaagcaaaggcgacttatgtgtttttggtatgtaagaattgtaaaaagacaagggaagttccatgtcgtccgggtcttggtggggcaattgttcctcgatcatgtgataatattccacaggtgagttcttttgattcgtttgtgatttgagtttgtagttatccttggtgttgattagaccaaattggaatttgtttagcctggagaggagccttgccctcttgatccttggatggtggttcctgataggagccagtatgttgatcaacagaccttaaagctacaggagaatccggaggtatagatttacattgtaatgttttcgctttttttgcacttgtatatattaaatgcttctgagttttgaaggatgttcctactggagagcttccaagaaatatgcttctctcagttgatcggcatcttgtacaaacaattgtacctggaaccagactgacagtaatgggtatctacagcattttccaagcttcgtcatcatctaactcgtaagctttgtagttttatgtcaaatgagagtgtagattgttttctgggagagttacaccacaacaatgatggacatcttttcctactttctgatgtaggcataaaggagcagttgcaattcgccagccttatatccgagttgttggactggaagacacaaatgaggccagttcccgtggccctgccaacttcactcctgatgaagttagtatcgcatcatttggttttttttgttttctcatttgatagcctatgtcatccatggtttcacaatgaactattgaagttaacatggctgaattattgttactggaaaccaaatgccttaggtagctgttggctctatgaaattctttgtgtaactcccaaatgaatgtgatggtgttttctggaaatattctctgtgctactagtttactatgaaacatttaggcctgcttggaagcctagttgtacaattccatttatcagttttgtcttccataatattacttttaggannnnnnnnnnnnnnnnnnnnnnnnnnnnnnnnnnnnnnnnnnnnnnnnnnnnnncaagatcgctccttctatatttggccatgaggatgtgaagagagcagctgcgtgtcttctctttggaggatccaggaaggtaggaaactgtgatagcagtttttattttctgtgcactttgtatacgtttttgatatatttatatacatttctatctttgattcagagcctgcccgatggagtgaaactaagaggtgatattaatgttttgcttttgggagacccatcaactgcaaaatcacaggtttgtaatgtggtctcagtatcaatggtttataataagtgtgttattctttttatattttcttacgtctctcttatttgcttgatattcgtcttacatccttctgttcaagtgttagattacaatccttacaaaatgtctgtgttatttccaacacctgtagcttacatgtttaaagcttaattgcttattttttttctctctagtttcttaagtttgtggagaagacggctccaattgctgtttatacatctggaaagggttcatcggctgctgggctcacagcttcggtgattcgagatagcagcactgtatgtcctatcttcaagtgtttttctatgatatgtttaaaagtagttgctatgacagattctcagttatttatacatatgttcattgcagcgagagttctatcttgaaggtggtgctatggttttggctgatggaggtgttgtgtgtattgatgaatttgacaagatgagaccggaagataggtaattcaaatctgaatcatagtgttgacgaatctaatttttctctatgagtagaattgatggaatgttttttttttctttatagggttgctattcatgaggcaatggagcagcagacaatctccattgcaaaagctgggataacaactgtccttaattctagaacctcggtgcttgctgctgctaacccgccatctggtcgatatgatgaccttaaggtttgaaatctggtactctcctttggcaatatcatggttttcccgattcttgtttgcaatattcttaagagatgggtgtgtttttttttctttggatttgcagactgctcaggacaatatcgatctgcagacaacaattctttctagatttgatcttatcttcattgtcaaggacatcaggaagtattcccaagacaaggtaagcaagcaaaggaacaattctttcagaaattttatgtagttaaaagggaaaacagagattaatgatggagacatgattaatgtttataatcttttcacaggaaatagccagccatattataaggggtcatgcatctgcaaac

SEQ ID NO: 34871 - DNA, 2449 bp, Arabidopsis thaliana landsberg
  unsure (1)..(2449): unsure at all n locations
cactggtgtggaagttcagaagtggcaattttaccataacatctcaggatggcacgaagcttttctctatggatcgacctgctggtttgagttcatcgttaaggcccttgaagcctgcagcagctccacgtgcaaaccgttccaacatcttttccaattctaatgtcacaatggcagatgagactgagattaacttgagcgaggaagagaaacagaaattagaaaagttgcaaagcctccgtgtgaagtttttgcggcttttgcaaaggttgggtcattcggcagaagattcaattgcagcgcaggttctttaccgtcttgcactacttgctgggagacaaacagggcagttattcagtcttgatgctgcaaagaagaaggctgtggagtctgaggctgagggcaacgaagaattgatcttctccctaaacatactggtccttggaaaagccggggtgggaaaaagtgctactataaattccattttgggaaaccagattgcgtccattgatgnnnnnnnnnnnnnnnnnnnnnnnnnnnnnnnnnnttctggaacggtgaatggtgtcaagattacctttattgatactccgggtttgaagtctgctgcgatggatcaaagtacaaatgcaaaaatgttgtcctctgtaaagaaggtaatgaagaagtgtccccctgatattgtactatatgtagatcgtcttgacacccagaccagggacttgaacaatttgcccttgctaaggacgattactgcttctcttggtacatccatatggaaaaacgctatagtgacattgacccatgcggcttctgcccctcctgatggcccatctggcaccccattgagnnnnnnnnnnnnnnnnnnnnnnnnnnnnnnnnnnnnnnnncagtctataggacaggctgttggagatctacgcttgatgaatccaagtctgatgaatccagtttcacttgttgagaatcaccccttgtgtaggaagaaccgggagggagtgaaggttctcccgaatggccaaacttggagatctcagctgttgctattgtgttactccctgaaggttttgtcagaaacaaattctctattgaggcctcaagaaccattggaccatcgtaaagtatttggtttccgagttagatccccgcctctcccttacttgttgtcttggctgttgcagtcccgtgcacatcctaagctccctggagaccaaggtggtgatagtgttgactctgatatcgaaattgatgatgtgtctgattctgagcaggaagatggggaagatgatgagtatgaccagctgccaccatttaagcctcttcgaaaaacccaacttgcaaagctctcaaaggaacagagaaaggcatatttcgaggagtatgattaccgtgtaaagctcctgcagaagaagcaatggagagaggaattaaagaggatgaaagaaatgaagaaaaacgggaagaagctgggtgaaagtgagtttggttatccgggagaagaagatgatccagaaaacggggctccagctgcagtgccagttccattacccgatatggttttgccaccttcatttgatagtgataactcagcttaccgataccgatatctggaacccacttcacaactcctaaccaggccagtgttggatacccatggttgggaccatgactgtggatatgacggcgtcaatgcagaacacagtcttgctctagctagccggttccctgccacagctactgtccaagtcaccaaggacaagaaagagttcaacattcatctggactcctctgtgtctgctaagcacggggagaatggatccaccatggcagggttcgatattcagaatgtaggcaagcagctggcatatgtggtcagaggagaaaccaaattcaagaatttgaggaagaacaagacaactgttggagggtcagtgacattcttgggagagaacatcgccactggggtcaaactcgaggaccaaatagcactggggaaaaggttggtgcttgtgggcagcactgggacaatgcgatcacagggagattcggcctatggtgcgaacctcgaggtcaggcttagggaagctgatttcccaattggacaggaccaatcttcttttgggctgtctctggtaaagtggagaggcgatttagcccttggagccaatctccaatctcaagtctctgttggaaggaactcaaagattgcgcttcgtgcaggacttaacaacaagatgagcggacagatcacagtcagaaccagcagctcggatcagttgcaaatcgctctcacagccattcttccaattgccatgtccatctacaagagcattcgacccgaagcgacgaacgacaagtacagcatgtactaaatatgctgatgaatgctgcagaatgatcttttcttttattactggtttttagttcatgtttttcccccactttaata

SEQ ID NO: 34872 - DNA, 4586 bp, Arabidopsis thaliana landsberg
  unsure (1)..(4586): unsure at all n locations
cctgtggtatttggcatcccatctgcctcctcctcagctatcccatcagttgtagttcctgtggcacttgtcatctctcccctagaagatccagctcgaaagatggcagcaaagtctggatctatctccgcaaggtagtcgaagtacacatggaagctactaatcttctccgcttggtttgcaataagagcttcagcggcagccagcttttgagagagatcacccggatcttctcgaggaactgaaggaccaatgtgagctgatgcggcttctagctgcaatgaaccagccccatatatcctccctttcttcttttgagccacctaagagaaactcaaactaaaaacaaaaaccaagtcactatttcataatgcaaccaaaattgagacaaacaaatcaagacaataacgaatccaattacatatgaaaccaccaatcatatcgttgtagtattttaggttgccaatccaaatgggtgtgatgctaacaatcaagatgtgatcagaagtcactaagtcaagccaagcattaacaggttttggtgtgttctagcagtcctaagtgaacacgcagaaaacagaaattcaagctgaaacaagaaaacactcgaccaacacagctcattgtagagcactgggtgtggtcgagtgccaggtcgggtaacagacagtaaatgaaacaaagacactcgactgcacagtctcttgccagacaactggatggtcgagtatcagatcgagtaacaggagagaaatgcaaaaactaagcaacatgtaacaagatgtagtaaacgatagtagagtaaacaataaaatcaatcagataaagaatgccgaggatggggtaattgagtagttttgtttcctcaatttaaaggtgattgacatgctcaataaattatccctagacaagaagttcattaaccaaatttaagtgccaccgcaacagagaccctcaagttaaactagtcccagactcaatcaccattgacgagagctaacctaacaggcattacgaatcaacaagttaaagccaaaacgcttcctgcaatcaataccttggtacaaggccacaaatctctggaattagtggttcagacatttcaacaaacaccttttgggcgcggaaatgtcagggctcaaattccaattgatcagaaagcaataggcattaagaacaactaatccagaagggatctatcaatcaatactctaccacctagcacactgagaattctacactactctaatccattctcagaaacctattcactactctgacatcagtgcagagaacataaacgttgaacaggatgaaaacatgataacaacagtttaatagcagaatgataacaggatgaacaacagttaacgaaatgaagaacgaatgctgaatactgaatactgaatagataaagagaaatctggattacaaaggtctagaacacagtgtctgcggaataaaactagataaaaacttgtcctcgaaaatgtaaagtgcatgctacttataacgaaatatttccggaaccctaatactcaaaatgacgcagtattaggacggattaagaacagtactcgacccaggtggtcgagtgagtggtcgagtgataagctaaagtcttcttttcttccttgtgcttgagtgtctggttgagtgcggaatggagaagactctgaagctggcagtcgagtaaggacgtcgagtgaatgatgataagggactcgaccatgtggtagagtgattggtcgagtggatggtggtgttaatgaatcttggagaagtctttaatgaatcttctgtagaacccagcatgaccaaagaaacttctgatgtccttcaccgtttttggtggctgcaactgcatcatcacttcaacttttcctttgtcaacctctatacccttctctgatatcttgtgacccagcactatgccttccttcaccatgaaatgacacttttcccaattgagaacaagattcgtctcttcgcacctggtcaataccctgccaagattcaacaaacatgaggagaaaaagggaccatagaccgaaaaatcttccatgaaaacctccaccatctcctcgattaagtctgaaaatatagaggtcatacacttctgaaatgttgcaggagcattgcataaaccaaatggcattctcttataagcaaaagttccataaggacatgtgaaagtgtttttttcttgatcattaaggtgaattggtatttgaaagaaaccactgtatccatcaagaaagcaatagtatggatgattagctaaacgttcgagcatttggtcaatgaatggtaaaggaaaatgatctttcctagatgcaacattcaacttcctataattaatgcacattctatgaccagttatagttctagtagagatcagttcatccttttcatttttaacaacagtcattccaccctttttagggacgcaatgcactggagaaacccaagtactatcagagatagggtaaatgacaccagcatccagcagtttcaaaatttcttttttcactacttctttcaaattgggatttaacctcctctgtggttcaatgctagaataggattcgttttcaagatggatcctatggttgcataaactaggtgaaattcccttaatgtcggataatgaataaccaatagctctcctatactttctaagctcaaataatagcaggttcacttcatcactatttaactcagcattaatgatcacagggtaagtagagtttggaccaaggaatgcgtaccttagaccttttggaagtggtttgagatcaacctttggtgccttaagttcagactagtcatctgaagttggaatgatcggctccccagattcgtcggtagacaaggtcgagtggttgctcgagtacgtcctcgagagtgcaggttgaactcgagttgactcttcttcgctcattaccattacctctgttgctggtccattcaattcctcaaagggttttgattcttccatcgctttatgggagtctaacagcttctggtatccccatgtttccaaatgcagaaacccatcttcaccacttttggttaaagcactgttaagatgatcttcttctcccagctcttccagtaattcatcagctaactgatccatttcttcgatccaaaagagttgcctttctatggtaggcttcttcatcgcgtctttgacatcaaaggtcattttaaaggctttgccaaggtttagatcaatcttccctttcttgacatcaatcatagctcctgcagtggctaagaaaggtcaccctagaatcaaagggtccttgggctcttcatccatctccaggactacaaagtcagttggtatctccacagcaccgatcctgattggaaggttttcgagcaaaccatgagggattcttactgatatgtcagctaggatgagggatatattgcaggacttgtattgagtgaaccccaatcttttggcgacagagagcggcatgagactgactgatgcttctaaatcacataggcatatgttgaaagccaatggacctaaagagcatggtagagtgaatgaaccaggatcactaaccttcttaggaatgatcttcttctctatgataacactgcattcatgactcaataccaccatcccttgcacttctagagcgtcaacaagaggtatccgcaactcaacctccttgatgttcttggcaaacatagctccatacttatctgccaatactttcttatgatggccaggaaatgaaagctgtggtttgtaaggaggagggacaaagaccttttctttgttcttgacagcaacatgtnnnnnnnnnnnnnnnnnnnnnnnnnggaaggtcggtcgagtgacagctcgagtgacaggtcgagtggctgctcgagtgactggtcgagtggctgctcgagtgactggtcgagtggcagctcgagttgtttgtcagcttgatctttatcgagactgaaatcctccccatcttggtatgcactgtcctcagtgactgacttgggtctctctctagtggataactcacttccactccttatgttgatagcatgaacattagcatactccttgggattctgaattgactttcctggaagtcccgtaactttgggagcagaggtagatgcggattttccttctaagtatctgactttggaattcaacgcctccactttggcattcaggtcattctatctgcagtcgagcttgtggtgcaattcagataacttcttagcaatttccatggagctagatgtttgtccttgtagcagctgttgtaccatctatttcatttcagcatcaggagcagcaggaccttggttttactgagtgcaaacccaggtggtggttgctgctagtagttcccttgatatagcttcttgggaacaaaaccttgattgtagggaacaaaaggtttgttctgaccttgtttttgctgtggcggatacacttgatcctgaggattagcaacgttggtgctgtggtaggagaggttgggttgttagtcttgaagttgtgtatcctttgagccaccttgattgttgatgtagcttactttttctac

SEQ ID NO: 34873 - DNA, 8144 bp, Arabidopsis thaliana landsberg
agtctcgctcaaatgttgatcttaaggtaatacgatataatatgcttttggaggttgtgatcgcgtgtttcggactaatcttcatagttcaaggcataacaggacaaatggagaaatataagcgtgacagctttatggggttcaaggaagaaggctaaacttgcgcttaagaggactccaccaggtactaaacaggatgataacaacacagctcttaccattgtggctttgactaatgatgatgaacgtgcaaaaccaacttcccccggaggttctggtggtggatcaccacgcacttgtgcttctaagagatcaattacaaggtttggttccctgacttatgcaccacataacgattttcttgagttcataaagatttgatcttgcgctattgtctgtttttgtagtttggataagatcatctttgaggcaattaccaacttgagggaactacgcggttctgacagaacatcaatctttctgtatatagaggtatttctaccattgggattacatgtttggttggggtttgttgcatacttacttagtagctgttaaatttcaggagaatttcaagactccaccgaatatgaaaaggcatgtcgcagtacgattaaagcatttatcatcgaatggaacattagttaaggtaaacacacaacttttgattcaagattcatgattactaacacttcattactctcagaattttcaaaaatacttacttggtgatttctcactttcagataaagcacaagtacaggttttcttctaattttattcccgcaggtgcaagacagaaggctcctcaactctttctggaaggaaacaacaagaaagacccaacaaaacccgaggagaacggtgccaacagtctcactaaattccgagtagacggtgaattatatatgataaaaggaatgacagctcaagaagctgcagaggctgcagcaagagcagttgcagaggcagaatttgctatcacagaggctgaacaagcagcaaaagaggcagaaagagcagaagcagaagctgaagctgctcagatatttgcaaaggcagccatgaaagctttgaagttcaggatccgtaatcatccttggtgaaacagaaagaaatagccaccatggggaagttctgtaacaaagcaagccataaaatatatatacttagtgggtttactggtttcttaagagtgccgatcttgaatcaggcgatatctcatcacctgcagagttttttaagtttccaaacctatctgctctctttttttggttagtaacagtgtaaatccgcagtttgatcatatgtatgttctttctccgaatctgagattctgtataactgatcttttattgtatgtggatgatctgtttagtaaccttgaaactattttgaagtgagatgagtaagcaaaaaaattgagattttgttctactaaagattttgaggaaatttacaagcattttcattctttcttactactctcttcccattctttcagaatgtcataaactgaaagtgaatcagagtcgctagattcttcatcatcatcaatctcgagttcttctagacccaacgtttcgagttcagtctctgtaaattcccaagcttcaccattagcactattatcatcttccattgttgtatcttgcagaagcaaatcttcctccggtttttcgccctgactttgagttgttacatctacggctaacaatggttgtgctgaagaagaagaagacccacatcgagatttcaatgactttgagaggtttgagaccgttggttcacttacataatcacactcaatgagatgatccgagagcttatgaagattatcttgagtaagccagtcttgatgctcctcaaaaagatcagtccattcttcttcactaatctggaaagatgcgagagccacagtgttaatcagtgtgatagctctttggaaatcgcctttagctgtggcatgacacaacagttcagtgaagaacaatgggtgagggatttctccatcttcaagtactgcatcgaaggcatgctctagaagactccactgcattaacaaacaaaattagacaacagcttatgcttccataaacacttaaactagacaaagatttgttaccttcccggctcttgatgcttctatcagcattgatgcatgttttgtttgatccatttggtaaccagaaagaaccatcgtttgatacacatgttcaaagtattcccattgcagtgatctagctgaagcttcaagcatgaagctgtatgtatactcgtttggaactagatgagtctcttttctgctgacaatctcttcaaacaattctttagcttctgaaaacatatcattccttccgtaaactttaagcatcatgttcgcagttcctatattcggatcacatttatctttcatatattggaatatagccatgcaatcatcaacatgaccaccgttcaatgaagcggctatgagtcctgtgaaagtaatctcgagcggcctgcaattttcaaagtctttcatcctccccacctgcattaatgaattatgaagcaagttaattttgtgggtttctctgagaagcaaaaagggtaaagtaggagggaacttgcttcgagcattgcatcgcaccaacgcccgttgttgcacagacagcatgccaattcatagtaaactgaacccgttcctataactcccttttgttccatatctctgactgcttcaacagcttcttcgatcttgccttctctccagagagctcggacaagaactgagaatcaatcatacgctataagaatcatatcaccttatagataccaaaatgaagtaacctaaatatacagagagaatcaatatttacccttgtatgtgattgcttttggagcttcgccactgcttttcatcttcctaaaaaaatcgtgaacacgatcaaacttccctgactccagcataacctgtcaaaatgacatcttaagaccaccctacatatttgagggtacccacaaatactacaccacagcagttcgtttatgttggaaaaaagaacgctacctccatcgcaagcccatatgtagctccattaggcctcaaaccattttttcttaactctacaaatacccatgaaacagccttccattggagtgttggaacacaagcgttaagaatctgggaaccagtgaagccaagaattgatcacacagcaataagatacagtgattcgctgcatagtgcatatagatattaaacgaagtttaaaactcggaaatgctcacttacagcgttgtatacaaccaagtcaggttcaagcacaggatcccagttcttttgccgcaaactcttagttagtttagtcggtttctgcctcatacgctcgattactttaagcaactccttcaataaacccgcttgcccaagtgttacagcaatacagtggtacgccgccatatcaggatataactggcgatcaccctaaagtgactaaggaatgagagttaatccaaaaaacgcaagatgctatagtacaacgatcatctacatcaaccatatcacgaactgacttaaatcagaagccacttacaagcatctgattgaatatctgaagagcttcctgtggcctcctcgcaaacccaagaacggacaaaagcttggtgtaaacaaatctgtagaaaccagtcttgtatacaatcagaaatcaagttttacagattctatggccatgaaagttgaaatcttttcgccaggaatacattacctgctcctaagatgtttacgctttttatcagaatacacccaatgaacaacagctgaagcttgtttccagctctgtttacgtcccaatcgatcaacgatcttaagcatctgatcttcagtgaactgaagccctgattgattcatcattctcacaaacttccaatgcttctcattgatttctctaccactcaatctaaatcacacaattcaatcgaacaatttcttcatgaatcaaagttttgcagaaattgaaatacaaaaagagtgttcaaacctgtcaacgagaactctgactgcttctccttcgttacgccaccgtttcgcaggatcaaattctttgtccaaatcaaattcttccacatcaacgtcgtcgtctagaacccaacgaagatccttctcaagtatcttcttcaactcttttagattctctttcttcaattcaccagcactaacctcttctctccgaacgccactaacgagctccttcagcttcactctctcgattccttcccatggattcccaaccatcaaaccaacatcgccgccactttttccagaaattgacctcgtgaattgcttgtattcccgtctaagggtttgaaaacgagcttcttcctccattgattgtttctgcgcctccttatacacctccgcctcggactcggtttcgcgcttggttctacggttgtgtttttgaatttctttctttcggagattgttcaggattttgggggttggatcaacaccgtacttgagcagcctccgtttaatcttctccatatctggttcaaattccggtggcactcttgccggcgattgggaaaatctcaccaccgaagcatccattgttgcgaagaggaggatagtgcaagtgagagtaaaaggaaaaatcttttattttatcttgttgcttttttcgaaaatatccgtttttggcctcaagtttttcaaaattacgaaaaacgcaacatattttgttgttctttcaaaacatgcaatgaactcgtaaaattgaaaaagctgaccccgaaggaagtgatctcatcatggctttaagaagagggaacaccaatcaaatctaatatacagagaacacagccacatacgcagaagaaagacagataaagaatcagacagagaacatagacaaatcttgtttttcacaggataaaagaaaaaagctgtgtcttcttccacaatcaccatcatcatcatcaaatgaccaaaaacacaagaaagatcaacaactgcagagagttgacttctctccttttggggtaaagtttaattcgatgatttggagtgctttacaagccaatcaatgacttgatcgatgttggtagagttcttgcaagatatcatgaagcaacagacttctctatctgtcagtgacttgagacccctgtggcaaacaatggaaaataaaacattattagaatcaaagtaaaaaatgccaagtccattgtcgtgttttaggttttaggcttacatttcatcggttagggcttctttggacaaagctccaggcttgtcgattttgttcccaaggactaggagagggataccattaagcgacgtcttgctcaacaaatcatggagttcactcttcgagacactgaggttatcaggatcagcagcatcaactacatacctgaaagcagaatcagagtcagagagttttaatcatctgaaacctaaataaagatagtacgaaaactaatttcaagagagatttacacaatcgcggaaacagaacggcagtaacgttcccacatgctgcggaacctaggttgaccaccgagatcccaaagcttgatcgtgacacttccttttgtcactttcctcatgttgaaaccaacctaagaaagagtaaacatcctttttacgattagtccaagagcaagcaaatacttcgccacctaaaagtagtataacacaccgtagggatcatgtcttcactgtatccaccggtctggacaaggaaatgcaaaaggaagccatcaacgagtcatttagagaaaaaaagagggaacgatttttggggaagcatactacttactgcaacaacgttaacaagtgatgtctttcctgcattttgaagtcctatcaatgaaagctccatttcttgcttgaagaagaggctgcaataaggcattgtgagactatgcatatcgggcaaatgcgaagcaagcaacttttttttgggaaactaagttcttgctctcacaatcttcatctactgattaaccatctatatccaacatggaatctcacaattgtattgtctaaacttaaacttgataatcaaaactaaagggtagatttgatgatcaatcaatagctgaaaaagagagagagttgttgctttctttagccagagacttatgtgatcgtatatgcattaatacatcaggaatcaaaattagctaaaatccctaattttgttgtaaacaaaaccaaattcagcggaaatagttggatttccccaatcattgaactcaaaataccaagagaaacaatccaaatcaaaatcccacgaacccagacaagaaatttgaagtagaagacatagaaactgacctgcgaagccaattgagaagagcatcccacaaacccataatttacgatttccgacaaacacagagattcgtagaaacagagacaacagacagagatcggtctgctacaaattctcctccaaggatctatatcggcttattaaaagggaaaggttccttttctcaatccttgttccgctgctgatattattgttatctcattgaagatttttttttcgtttgtcaaaatcgaaaacacggcaagagagccggcgaattaaagttacaaaatggctcagtaaatctgaaccgtctatatttatgtaggtcgtgagattaacggtctagatctgattataattcgttttgtagggaaactgaagctgtgtctgacagagcgaaaataatggagctttgctatgtgttgtagttattattaaagaaaaaacaaaaaactagccactcagaaaaaagattcgatgggacagagagaagttcggaagaaagaatttagatttgataagaaaacaaaagaatgtgtttggaaggcgcgtgatgaccactgaccaatgattcgctgattggaaactgtactaatacgagctgtttgggtcaataatggagaatcattaggatgtgtttgattatgggcttcttaagcccagatctgaaccgtcaatgtttatgtaggtccgtaaatatattgcctttgtggattattagttggtttttcgattttttttatctctatagatacttaataatttttttagactgaatagttggcgggttgagccaagaccgtgcagtagtgcaacgcatggtcgactcgtgaaagcccagatagcaagctatcataatgggctttctcccttaaaaaatagagttaatatcgtgtgggccgatggcccacatatcagatattaaactgataagaacagatactacacttgatcttagccaaaaggccgagaaaggtatgaattgaaagataggcccagctttctttatatattacaaagcttatgaccaacgctctctaacttgtcgatgtgggacgttaagaaaataggctttagtcttctattactcataatttcttctttaatcaacaaaacaataagagaaattatctctgtgcgttatttggcattgatcacagaactatgtaaacccagaagaagagagacggaaacttaagaaaaaatcctcaaagcaaagacggagggactttttctgctctgattccattgagttcactatgcttgaattcgggcactttcctagaacagtctgagctgttcttatgttttattttgaaacctggtgggaaattttctgttttcagtgcagttccaagatttaggttgtgttctttcttcctccaatgagattcaccatctcttttgcagagtactgagtgtttccatcgatttgtgctcagattctgtttattatatatccctttattggtctcaatttgacattatagattcaaatcccaacataacaacatgtcagaagaagaaagttagtatgttgaggacaaaaacaactaagaaacacatgaaaatttccaggagaaaggtatcttgttgttaatagacttagtttgtttcatttgatggttccctaaacatttggcttccaatgagtcacatagtctacacttccctaagaagctcatatcttgcatttgttaccactgcacttatttgctcagcttcctgcttcacattcctgccatgtgcagaaattggtggcagggatatgtgttcaactttctctgctacactaattgagtgatgatggaggattgtatgaaacagaagaag

SEQ ID NO: 34874 - DNA, 4893 bp, Arabidopsis thaliana landsberg
tgcaataataatgcaatataatggatgcacgggtaaatgataacaatgcaatcatatggccatgtgaacgatccttcccatcaaaccaagtgaacaatccgctattagccaccaagtctacaagcgatgtaccacatgggactaccacaacatgtatcctcgttgcatcgtcatgcaacactcggccccttgggagcgacctagtctcgctgagtcgaacaaaacagggaagcgcactcgaacaccacaaactctatatgcatttaactaagctacgacaaaagtgtacttgaagcatcaagcatacatgacgtaaatgataattcttattaattctatgatcaatcaacaacaacatcaacaagcacataatcatcaaagcaagcacataaggtaactcatgtgccaccacacatgcttcggaactcactatgattaagcggatcggatgagagtgatgacttagcggaatgacaacgtcgatcgggaacttctggttgatcgcgaagacttcatctaccttcggaagttgatcgtcggatggttcatggaaactgctacaccgtttggaattcagtcgtccacctctaccgtcggcttcaggagcggtcgtcacttcacgaagattttgaatctatctctctctctctcacgatttctctttagctccaaagcctttgttctacttatagaggaggagattcgacccatgatggacacatgtcgcgtcttgggtgacttaaaacccacaacgacacctttcctccgattggcttggagtttgcgtcgtccaaccctatgggacacgccaccttgtgattgggtcgaagtttgtgtcgcccaacgtatggcaacactccttctccatgattgactcgatgtttgtgcggccaaactcatcattacctcgttttgtccaaaataggtaacttgcccatggattagctcataactgaaatcattgcctcgatatcgcccaaggaaggtaacttataccatgggcaatatctttcttttgattggggcagagatataatcattgcgtcgatcctgtaaataaggtggagtttctctctccgacatatgattacttttcttacgcttttgcctcgattttcggaatttatgcttcaaatatttctctaaattcgaccattccaagaatcatctaggccacaagttaggccgtcctcaaccattgtacgcccgcatggcagggtcacagcgttacccaattccatgaccaaaactgacttagtcaagtaagagaattttacttagtatttccaattataagtcttttcccaagaccttataaccccttggcatattccctttatgccaaaattggaaataactccgacgcaaaatttcttaccacggttgtccctatagtcaatgaccgggtaactacaatgacacttgtttccaacgatgtcctttaattgtgagaataattttgttattcgaacaatactaaagaaaaaagaaggcatatacgacgattgtgtaaagtgttaaccaagaaaaatgattatatggacaaattcagtgaaagattaccttcaagtggagagtaagatttttgtgccgagtcaaaatttttggtagcttcggtcaaagatgtatgctttgttaacattctcggcttgaaacataattactacaagaaaacaggcgattaccgactacagaggtagtcgctaagtagtcgtaatggtaaattttacgactaatcagctactaatgattctagtagttaatacatagccgttaagttgtggtcgtaaacttgtcgttgatttacgactattgtacgacaacaatacagaaagtatatattagtcattctgtagtcgtattattgggcgactatttgacgacaacttgacgattaatagtattgtacagagcatgtgaatcttgtagtcgttccatagtcgttaaagatttacgacaatatgacgactagtttgcgattaaaaatactgaaccctgggtatgtatctatttgtcgtaaaatagtcgtaaattagtgtacgacaattttacgactattggacaattataatactgtacaaagggtatgattctcttagtcatatcatagtcgtataattatataagactattcctagtcatatgaatttattggataattatatgtatgtcttttcatagtttatagcatttcatacaacaaacaagaaaaaaccctaaattcaaacaataaacaagaaacccaacaatcgatgaccaaattcttatttggacaaaacaagtagtcgcaacatagtagttaaccagtcggaaaatagacgtaaagtagttgtaaaatagtcacgaaaacactatattcaatcacgaaatcaataatatccaaatcatatattacgattcttcactaatcattagaaatttatatttataagtttaagatatcaaatttattcaaatatttagtataagaaccaaataaaccgcaggttaaatcctagttatgatgaaatagatagtcaaattgtattgacaaaaggaatgtaaaatattgaaattaggttttaaaataattaataaatgaaatttagaaaaatatgtgtgctattatttagaattcagatatcattaataagatgaaatgtataaaaatttattttatttattatgataaaattaatagttatggaatgtataagattgaaattatgaaataaaatattttactttgtgaattactattttgaattcaaatatcattgacataacttatatgtactttttatactcgcctaattaggcaggccttatcaaatatatacctaaatttatgatattattaaaaaaataaactagtgttggaattttttgaaaaataaacttaatagtatggtatttttaaaaatatacttcttttatattatattgagatatatttgcacccattcctttaaaacctatgtaatctaaaattccaaatcttgatttgctagaatttataaattagcctatgatttgaatttgttttgatatttatgcttaattaaccagaaaaaaactaagtctgaagttaattaactaatgctttcgtttttatcttcaatgaagtagaggtagatagaaaccgtgtaaccactcgtttcttataattacttaccattttaaaacccttattaacgccttacaaacatcacatttctcaatttatgaagaaattgtgacactctcctcccgccaaaaggcatgctattgtataccttgtattaaatacccaccaatactagctattttgatataaaacttctctgaaaacgtatatacatccaattttatgatacatgaatagaatgattttatatgccctcatgatcctaaacatccgtctagtcatagtgtctcttctaataacatcgtattttcgcccattttggctattgtttcttatatattaggaagtgtttggtgtgatatcaaagctaagagaagatattcaagtatttttagagtcagaaatggtttgtaagttaaggtaaaatagaccataagacaagtaaaccacattttagtacatattcgaagtttcatgggtttggtttcttttccaaggtctttctttgcaccaaattattgttggatcgggttttcgcccattgtctaaaaatctcctatgctgcctcgtgtgggagtatgggcgactgatctatgactgctgtttctaactagctactcttgctaaggagaaatcttggactttatagaaagctagaagagtcaatataacgctagaagaaatatcaacttaatccgatctgccaaacagtttttttcacccttttgaaggaatactatcggataccgatcacaaggcatgccaccgacctcgcaaagccacacgaccggtctatgataccaaattgtgagacaaagctggtcaacgcgttaatttcgtggcttggcccaaagtattctttaattacaaaactgccaaaaaagattgaaaacaaactcttaacttaaccaacctgcaaaagagaaagatagcaatcgaagatcactcaatgagggcaagcctcatggctcacgaagtcctcatacaaaaacacgcatagacaatcacaaagtttcaatctaagactagcagaaaataattgtgtcctaaagactatgacacaaacatacacacacataaagaaaatgagactgctccatcaccgtcctaaagacggttctgatacaacacgtgtcaccaaacgcttatcctcgtcgttacgaatgcctcatgtctcttgcacttgttcatggcaccattcacgctattaatccctcgtgcctttttcacttgttcctagcatttcacactcgtcggctcattagccatcctgatctatccgcactctacatccatatattacaacaaaaataaaaggatatctctttgcaggactgtttgcggctcacccgcatctctttactcttggcatgcatttcacatatcactcaacacacatacaaatatccatcttagtttagtttccatctttaagatcgtatttttatttctttatactttaaatgaaatatatttatacttatagatattaatatactcaacaaacaaatacgattactcgtaatatatgtaattcgtaggtatacttggcttaaccgtaaactaagtaactatctaaaaatatttgaatacgtacaagacaaaacattgtcctctccttatccttaacttgttgaagaggcgacggtctaacctcagaactctagcttggttctccaaaaaccaaagcatagacccaaacaccacgagtactcatgcagagcttaagctcaacccacccatgtttggcaacccaaacaatattcttcagctcagaagtttgcttt

SEQ ID NO: 34875 - DNA, 2451 bp, Arabidopsis thaliana landsberg
ttagtcgctaatcgagagtcggtaaataaggtagtcgtattttagtcgccaaagagcgacgaaattgcgactaagtttaaggaatcgcttttttagtgacattttagtcgttaaattcagcgactattagacgacaaattaacgattaacttgagggttatgtagtcgttgtaggtaattagtcgttaaaatttacgactatgttgttactatatttaagactgatttgcgactgaaatatcatttagtcggaaattttagtgattgaactgttatcaaaaaccgactgcttggttacatttttgatgattaaatttgcgactattattgttattagaacatctatatgattgttataaagatggaaaccttcctgagaaaacaaaacattacaagaagcataaacacaatacaagaagcatgaaaacaaatttattgtcatttcagaaaagtacaaaacccaaattacaaaaacatgttcgattcactacaacttagaactttgttcagcataagtacaagcaacacaagtacacatataaaacctttgagccgtgatattgagtcttgaggaaggagttaagattcagacctatgaagcagatgaagagggagaggcagctggagagggtgagataggatctgtggttgtctccttagctgaatgagattcgaggaaattgaggaaccgaggatcattttcgcgcaaaaacttctccactaaggacaagtgctcaagcttcttcttctgctcatctgcagctcgggaattctcagcttcaggcaaagcaatctcagattcacgcctctgattgtaagagacctgctcttctatcttgcgttgagcttcaagtaattgttcttgcaaagccacaaaagaagttgagtcacctgcttgcttccgcttgccattgacaagagaatctttgaggcttcctactccataaggaacgcctatcgaatccttctcagtggactgcatagtatgataaaagctgagattagagaatgaaaaagacaactcaaaaacactaaattgggaaacataaaacgttacctgaagaaatatggttgtacattcctcagctgtaagctctcgtgcccgcgaagtgccatctgaaacagcagaagcttcagcctcgagctcagactgcctcaactgcaaattcttctgatataactctgcaaatcttctctgtctttcgatcaacatacgtcccatcaggttttgtatgtgttttgatgaaaacgtcaccaatactgacaattttgcccaattgctcttccccatgcatataccaaacataataatctggcataaatccttgactaaacaaatgactactaacttttttacccgagacgatatgttttttattctttcacacagcacaaggacagtggaatttacctcgacaactttgtattataggctggctattagcaaatgtcaagaactcctccactcctgcgacgtattcttctgacaaattcaccgtcatttcatcgaacctcttgtacatccaatctcgattaaaacaaccgctactcggataattatagtttcccgccattataaaaccaataataaaactaaatatattttttgacgttttttttctttaaaaacgtttttttttcttaaaagtattatttgtattgtgtttgtgttgtgaatgaattttgtgtacgtgaaattttcattatataggaaattttagagtgagtaaaacacgactaaatagtgtagtcgtttaaaacaggtacaacaacttacaaaacgaaatacatgtgcttttttaatcgataattacgtctattttgcgactatatttaatgacacgccggagtaatcatacaatagtcgcgagttaacgactattacggcgtgtcatatattagtcgcaaaattttgactaatttacgactaattttggcgactaattacagcgtgtcatataatagtcgccctttagcgactactaaggcgtcacacctctatagtggtaatttggcgactaactaacgactatagtgttgttagttgtaaattagtcgtataaatgtagccaaatagtcaccaaatatagcgactatttatgtagtcgccggttgtagtgggtagttagctgttttcttgttgacccctaaaccctaaactcttaaccctaaacccttaaacctaaacactaaacctcaaaaccatagaccccaaacttgaaaacctaaatcctactttagcttcaggaatccggttgcggttctaattccactatctagttttttgatccggttgcggttctaatttttgatactcaatgaatccggttgactacaaatccgctaaccaagctttttgattcttaaatctttgatggtgaagccgaagttctcatgatttttttggtttgaatcctatatagggaaacaatactttaccttttgtgatct

SEQ ID NO: 34876 - DNA, 4207 bp, Arabidopsis thaliana landsberg
atagcatctaaggacaaggagcaggtatgtgagctaaagactttactgaattctgagtttgaaatgaaggatttaggtgatgctaagaaaatcctaggaatggaaatcacaagagacagacaagctggtactttgactatctcacaagaaggctatctactaaaggtactcaaggactttggaatggaccaagccaagtctgtcaacacacccatgggaattcatttcaaactaaagccagcaactgatgaagaagtgcagaagcagtctgaagtgatgagggctattccatatcaaagcgcagtaggaagtctgatgtactcgatgattagtacaagaccagacctagcccattcagtaggtctagtttgcaggtttatgagtaagcctctgaaggaacactggcaagctgtaaaatggatactcaggtacattagtggtacattagaccgaaagttgtgttacaagaatgaaggagaatgcattctagaagggtactgcgattctgattatgctgcagacaaaggaagcagaagatctacttaaggagtagtgtttacttttggaggaaatacaataagctggaagtctaacctgcagaaagttgtagctctgtcgagtacagaagctgaatatatggctttaacagatgcagcaaaggaggcaatttggctaaaagggctagtgaacgagttaggtttcacacaaaagacagtgaacattcactgtgattcacaaagtgcaatagcactggctaagaatgcggtatatcatgaaagaactaaacatatagatgttaagtatcacttcatcagagatttggtgaataatggagaagcgcaggttctgaagattgatacagaagacaaccccgcagacatattcactaaggttttaccagtgagcaagttttaagacgcccttgaattgctcagagtgtctcaaaattaaggtggagcactgctccaagaaaccagctgagtgggtttactcagggagaagaagctgagtgggtttactcagggatttgaagctgaacgagtttgttcaggaaccggagaggaattcaaactaaagcaaagtggcataaagatcaaggtggagatttgaagattgttgatctatatgctaagtctcagaaacactctaagagaatcagaaggtttcagaaatctgttttaggcgagctaaggagattgcgacacgtggagcaatctggcccgcccatctctaacggaattatcttatccgagaactcgtcttcttctgtttcattaagtactcatctgtaatctcagttttcattatcgattcagaagtgtattgaatcgagagagagtaagagagagaacagaacaattgtagagagaaagagctcgagtttgagctaagtgttttagtgaattccggagacatctccggcgagacgtaggattccacatcggagcctgaactcgataaattcccgtgtgtctcttttacgttttttctttgaattcgatcttaaatcaaattagaacctgaaattgatccaatttctgaaggttcaaggttcacaaattggtatcagagccaggtttagctcaagaaggtaagatcgaatcaaagatgtcgagtacgaagttaaagatttctcagtttgatggatccggtgacttctcactatggaagactcggatgttctctcatttaagagtgatggggttaaaagacgctctagtggaacaagagcagttacctcctctgaaagtgaagaagaatcagatcctgcaaagaaaaaacaaaggatcgatgaagagaaggcaagaatagatcgagacgagaaagcgatggatatgatcttcataaacgtcggtgataaggttctcaggaacatcgagaactcaaagactgcagctgaggcatgggcaacactcgatagattgtatttggtaaagtctctcccaaatcgagtctacctgcaacttaaagtctataattacagaatgcaggattcaaagactctcgaagaaaatgttgatgagtttctaaagatgatctcagacttgagtaaccttcagattcaggttcctgatgaagttcaagcgatcttgatacttagtgccctacctgacagttatgacatgctcaaggaaactctgaagtatgggagagaaggcatcaaattggatgatgtcataagcgctgcgaagtctaaagaactggaactaagggatagttcaggaggatcaagaccagtaggtgaaggtctatacgtccgaggtaaatctcaagctggaggagtgggaaataagtcaacagagggcaagaaagtctgttggatatgtggaaaggaaggacacttcaaaagacaatgttacaagtggcttgagaagaataaaggaaatagtgcaggagaaacaacgctggtaaaggatgatgctcaagacttggtcggtttagttgcctcagaagtaaacataagtgaggataaaaacgatcagaaagaatggattatggatactgggtgttcattccacatgacaccaagaaaggagtatctatgaactttgatacggctaagttagggaaggttagaatggctaataactcttactctcaggtcaaaggaataggcagcgtgaggtttgtcaaggccgatggatcaagcattgttcttcagggagttagatacattctagaaatttcaaggagtctgacatccatgggggccttagaaccggaaggctatgaattctaaggtcaccttggtattgttagagtcatgcaggactcaagtgcattcataagaggaagaaggagagcttctttgtatatactggaagcacaagctgaaatggctagttcagaatctttggttacaactgcaggagaaacagatcagacacagttatggcacagtagaatgggtcacatagggcaacaggccatggatattctaagtaagaaagggtgttttggaaatgacaagatctcagaaataaaattttgcgaagattgtgtaataaggaaaacagacagagtcagcttcggaacagctcaacacacaactaaagagaaacttgattacgttcactcagatttatgggggtcacccaatgtaccccacaaccttggaagatgccaatacttcatctcctttacagacgattggtcaagaaagttttggatctattttctcaagactaaagatgaagcatttctgtcgtttacagaatggaaaacgatggtagagactcaaagtgaaagaaaactgaaacacttgagaactgataatggtcttgaattctgcaaccataaatttgatggaatctgcaagaaagaaggaatagtgaggcacaagacctgtacttacactccacaacagaatggagttgctgaaagactaaaagaactcttatggaaaaagttagaagtatgttgagtgaaagtggtcttgaagaaatattctgggctgaagctgcttcaaccgttgcatatctggtgaacaggtcacctgcttttgcagtggatcacaatgtacatgaagagttgtggttaaacaggaaacctgggtacaagcatttaaggaggtttgggtcagttgcttatgaacaccaagatcaaggaaagcttaaaccaagagctttaaaaggtgtgttcctcggttatccgcaaggcactaagggatacaagatctggctcttagaagaaatgaaatgtgttttcaatcgaaatgtgatatttcatgaggacttggtgtataaggatttgcagttaaaagagaagtctgaacaagaaggaaatagtaagtaaccaacagcaggttggtgagagttcagctgcaggtggaacagttgaagtttcttctagtgatgatgagtcagagtattttgaacccgaagaagaagctccagcaagcagtgaaagactgagcaattatcagttagctagagattgggttagaaggcaaatcagagcacctataagattctctgattactctcaatttgcatatgctcttatggcagctgaagatatggacagcagtgaagaacctagctgttatcatgaatctaaagaaaccaaagagtgggaaaaatggaatgcaggaatgggagatgaaatgcaatcactattgaaaaactatacatgggatatagtagaccgtcccaagaatcagaaaatcatcagttgttgatggttgtacaagaagaaaccatgaatt

SEQ ID NO: 34877 - DNA, 1933 bp, Arabidopsis thaliana landsberg
gagactccaaattgtggagatggctcacaaagggaaaacttgagataaggaagaaaaccatggtactcaaggttgatctttggatcacttgagagggattgagtgcaatcgttgaccgaaggaggtcaccacaacatggagtaggcattggccgaaccatgagataaaatcattgtgtcacttgcgcatctttctactatgattgttttcttctataagagttctcttctcactattcataccaccttggttttaatcctgttaacatttattataaaccaaggttgtgttgtttagacttggtttttacaagatcacctattcaccccccccctctaggtgctctcaattggtatcggagccgttctcttcacaaagggactaaccgcccgaagagatggatcctaaagggaagggaatcgtgatcaacgacaaggagaaggagtccttcgtcaacgagccaagggatgacaagtccaacgactcgggctcgggccacagacgaaaagatgggaagaagaagaagacaagacgcatcaaggagatcgtctactatgacagcgatgagtctacttcctcccaaaaggacgacgaccacaacgaatacgagagaaagaaaccggtcaattcaaacttttcttttgattactctcgtattcctcaaagtactaatgctcatttattatctattccacttggtaaacctcctcattttgatggagaggactacggattttggagtcacaaaatgcgtagtcacttgttctctctccatcctagcatatgggagattgtagaaagtggaatgcactttgatagtacggatagtcccatgtttattaatgaacaaattcataaaaatgcacaagctactactgtgttgctagcctctttgtgcagggacgagtacaataaggtgagcggcttggacaatgccaagcagatatggacaccctcaagatctctcacgaggggacgacatcaccatgctcaccaagatggagttggtggagggcgagcttggacgattcgccatgataaggggagaagagccaactcaaacttacaaccggctcaagacccttatcaacaagataaggagctacggaagcacgcgttggacggatcacgacgtcgtccgcctaatgctcaggtcatttaccgttcttgatcctcatctcgtgaacaatattcgtgagaatcccaggtacacgatgatgacgcccgaagaagtacttggaaaattcgtgagcgggcggatgatgatcaaggaggcaagatacgtcgacgacgcgttgaacggtccactccacgagtctcaacccattgctctaaaggcaacaaggagcaaggagtcgctacctagcaaggtggcgcaaattgaggcggccggtcttaatgaagaagaaatggccctcattatcaagagattcaagacggtgctaaagggtcgcaatggacagccgagcaagactaagaccaaggggaagcgatcatgcttcaaatgcggtaagcatggtcattttattgctaactgtcctgataatgaaagtgaccaggaaaagggaaacaagagggaaaagaagaagcattataagaaggcaaagggcgaggcgcatctaggcaaggagtgggactcggattgctcctcgtccgactccgacaatgaaggactcgccgccaccgccttcaacaaatcaaccctcttccccaacgagcatcacacatgccttatggcaagggagaagaaggtatgtactcgcaactctacctatgcttcttcaagtgaggacgaatctagtgatgaggatgaagtagattattcatgtttgttcaagggcttagatagatctaagatagacaaaattaatgaattaattgatgccttgaatgaaaagaatatacttttagaaaagcaagaggatttgttgta

SEQ ID NO: 34878 - DNA, 4762 bp, Arabidopsis thaliana landsberg
  unsure (1)..(4762): unsure at all n locations
gggaggctgacagatctcacaacattgacaatggccgcgccatcaagtactaccaggctggctcttcggagatgttcgggtcaactcctcctccgcagtcagagaccacgcccttccatccgagatctccctacgctgcgtccaaatgcgctgctcattggtacactgtcaattaccgagaggcctacggtctgtacgcctgcaacggaatcctcttcaaccacgagtcacctcgcagaggcgagaacttcgtgactcggaaaatcactcgggccttgggaaggatcaaggtcggattgcagaccaagctcttcctgggaaatatacaggcttcaagagactggggtttcgcaggagactacgtggaagcaatgtggctgatgctgcagcaggagaaaccagatgactatgtggttgcaactgaggaatcacacaccgtcaaggagtttctggacgtgtctttcgggtacgtggggctcaactggaaagaccatgtcgagatcgacaaaaggtacttccggcccacggaggtcgacaatctgaaaggagacgcaagcaaggcaaaggaaatgttggggtggaagccaaaagtagggttcgagaagctggtgaagatgatggtggacgaagaccttgagctggccaagagggagaaagtgctcgccgacgctggttacatggacgctcagcagcaaccttgatatggggaggtggcaaagaagagtaatcattatctgctttttcattgaaatgtaattttgtttcatttgttgttgttctctttcgttgtttcaagttgttcaactccatacactgccaatcgtccattgtggattttgtatcaaaaggcaaacaaagcatatttattacatatgaattttccccttatcagaacaatggtttcttactggtcacaagcgattgtacaaatcgaaaagcctaaagatgaaatgacaaaagaaaacaatgatttgtaacaaaaagatcaatcaatagcatcatcatgcatctatgcaaaatcagaggagatcagaaagtatgctgtagaactacacgtattcgattcaccaatctaactaccattaagagtatttactcttatgcctcgggtttagaagacagagttgtagtagtatttatactgaccgaatcgggagatgcaagagaaaaaggcgccactgtggacctcagagattcaggtccctcagaattaattctcttacataatgtatcgcagttgctgatcacctctgtcaatcttcctttaagctccccgagctccacctgcaaaccatgaactagaaatatgttccacatatataagannnnnnnnnnnnnnnnnnnnnnnnnnnnnncatctctatcttaatctacgctacaataattaccttgagataaatgctgggaagttgtcctcattgcagaaacagagtggttaaacctctgtaaaagtttagtcgccaaagcatctgcgacttctatcgtgttttctatatcttcctaaagacatgatgcaacatattaatattcatttccctttaattgctacacctaaagacatcatagtgatgcaaaccaagattttagaccaatgaacacttgtaattttcagtttcaattcactaaaccataagagcaaaagaaagtagaacatctatacttgattttttttcttttttttccaaaaagaaaacattcctttggcaccacacttgcaaaccaaaagctcaaaaaacttacactatcttagtgtctgtttcaatttaagagaacccttaggagtagcctgaagtctagtttaagttctcggctaatagcaaaaatttcttaaagactgcactcatatacatacaaaaaaaggcagaaagagagacctgtctcttggtaatttcttgagctttgttctcttgccattctcggtaaatggagaagagctctacaagtatttgaggatcaaccgtatctgggaaacagttgacaacaaaggcaaaaaattagagttgaaaaaaggagacttgtagatgaatgaaaatatcttttcattatgaagctttaacagtaaacgaatacattagcaaaaacaaaaaaagtccaaagatatgtcttcttctatgaataaattgtcttccacacaacaaacgatcaatcatttagaacatgttacataaaaacagcaagtcctctttctaaacacagtaacgggtttagcaaactaataagataggtataaaactcactggaagaggaactgcatagagcttttctcactaagatatctgttaagctactttccgtgggaggagacttcaatattggcctactctgcaattatcacattttaaagcacgagaaaacattttcaatcgaaaaaaattgaaaaggaaagacaaaagaggagtagtagtaactcactactgtgagagctttaagattctcgagaatgggatcgactatttctgatcgatgagatatagtcgtaatcacatcacctcgattttcctgagaatccatcaaaaattgaataaatcaatctctcatatataatagacccaggaagattgcctggagaatcaaatcgcgatatatcagttacctgagagcctagcagagttgaatctgatgctcccatttgcttcacagactccgattagggaattttattcaaggaatcagcagttccgttttgggagaaatctggaaacgctcgtagcaaggttttctcaactccgccaaggagaaggagaaggagaccgcaatatgacgtttcgcgcatttgcaagccaacagcgtgccgtttttaaacccccagtgacgacaatgtgttaaaacaaaaaacgccagctcgttggatattcaatgggtaggactaggagacaaagcatgagtaacacaaagccatgcttcaccacgcatggtagacaaaagcccattttattgggcccaccttgagcccacttctttattaaatatataaaaatataaatctccgtaatttgaacgtatattttcgagtcactaatacattatacgaaacaaactgagtaagtgtaaagccctatatatatcttcttattcgattctcaccttctatttatccatcgaaatcaattccttcggtgaattattacgaccatatatgtaaatccaaaatgcgacgacgtttctagtgcatgcatgcataggaaagccttttttagtcttctccactcatcaaaaattgagacgccacgaacttatctagatatctccagtcagtgatcctcttctcggagctcatgtcatctttccggctactgttctcagaaaaagtagtactatggggagttatttccgacggaattagagaggggctctcgagctgaggaagctgggagaattgatcatcatcgatgcattgaaggtacatagatccgaaatctccatcctggacgtgactggcctcggagagtagttcttgcttgaacggtgtggcggtaaaatcaggattatgtctggctcgcttgtcgagaggttccaagagagtggcgtcgtcgtagaataagcagttcggatcccaaagttgcctcctttttgttgggatggtcgttcgtttcttaaatgctctacacactacccatccttcttcctgcttcaccatttaatctagctagatcaatcagaatgtgtggcgctataagtgaataagattccgaattacctgtggaggagagttctggtgtgactcgaggctgtagtattcgtgaatgatccaatcggacttttggccattaggcgctcgacctcggtaaaagacaagcgtttttctcataccgataagtttggagttgaggtaaaccgccttgtcccggcccgttgctttccagaaaccggccacggtggctcggtttgtcctagtcccagtcggatacttcttgtctctatggctgaagaaataccactccgtttgctcctcgtaccctatcctacatctctctacacctatcacatttaggttacatattactctttcgagctacacagtatagttgcttacatgtgtaggtggtatcgtttaaatcataattcataaattaaccctaacttctaaaacttgacctctctagatgtagccttatatgtagggtcactcgggcacataattcataaattgcacatataaaagacggaaccaattatattatatgaacgattgatcacatgaataaacattggtatcgagaagatataagagagacagatagagagagatagatatataatataccttgtagatcccatggttcgatcttgtaaagatcaatttctctgataacgtcgagatcaatcctctgggaggcgattttcttcttgagataatatccgacaagttcttcatctgtcggatgaaacctaaatccaggcggtatactacacgaataatcttgatcaaccttcatcatattgatagttatcttctagggtttatttcgctgcggtttcttcttgatcttagaaagatcgatcatagaagaaacccgatcaaccgactctatcaaaggaaaaacaatagaacgagagtcttattgaagatgttggttaggtataggaaaagagagatatggaccgtccacttgaacgatgacatgtgtgtttagacttcagagtgtaatcatatgttcatttcgcgttggcgtaattcaccatcactctttctgtacatatatgcacatttatatacaagatacacaaggggatcctctagagtcgacctgcaggcatgcaa

SEQ ID NO: 34879 - DNA, 1367 bp, Arabidopsis thaliana landsberg
tcgggactcttggttaccatgcccctgagtaagttggtttcttttgaagacattgaatagtttgatgagctctcaagtcttaaatgctcttcctttgttttcttaacagatatgcaatgaccgggcagttaaatgccaagagtgatgtctacagctttggagttgtcttactcgaacttcttacaggtcgaaagcctgttgatcatagactacccagaggccagcaaagtttagtcacatgggtactaattaatttctctctatccgatcacatcttttatcttcatatatatagcatgatcatcaaccatgtaaactgttacttatgatacatcaggctacacctaaactgagtgaagacaaggttaaacaatgcgttgatgcaagactcggtggcgattaccctccaaaagctgttgctaaggtaagaaaccaaacttttcataacctcagattgtgtttacgttttagactgcattcattgttcttaacctcaagttatggtgatgatgattcgcagttagccgcggttgctgcgttgtgtgtgcaatatgaagcagattttaggccgaatatgagtatcgttgtcaaagctcttcaacaactcttatagcgacaggctcaataccgcaattctaaattcgtgcgctttaaaatactatcttatattgtttttggacaacagagttagaatcttcattcatacaaaagagacattttactttgatttggaaaaaatatatatatatatatatattaaaactactaagtcttgtgcatgattaggtatataatcattgatggataaataagagatgaggttacatattcaggcttcaaattttttatatttggtgatcaaaattaaaaaaaaaaattaggtgagtttggtctttttaaagctaaaaaatattgaaacacaacaaagcaaaaaaatgagtgattgatttcaattataaggtgaaaatagaaagaaaataatacaaaaatattacttttaaaaacattattaatttaaatagaaaaacttagaaaaaaaaacaaaaaaaatgagagcgaggcgattttctcaacgatcgcatcccttcgtccttcctccgtgtctctggccgttgagcgtttgtcgccggataccggcggttgcatcagagtggattaacgacatttcggttatcgattctataactgtcattctcggaaatctatttaaactctgcgtttgtctctgcaatctcttggttgagcagagtgaaaatccatttcctttgttcttattgattatggcggatagaatccggaggcaaatgcaagagattgcattaggaattgaagatgaaacaattaatctccctttcgacctgtgtgaa

SEQ ID NO: 34880 - DNA, 8880 bp, Arabidopsis thaliana landsberg
ttgctcgattttatatatccatctgattgcaaatgatgagttaaatcaccattgataaaagaagctcaattgagttgtgttggaaatcaaaaatttccatgactctgatgcaaatcaagaaaaatcaaatccttgatcttcttttgtttttctgttctttctcagattttgttaatcattgaattttggttttcaaatgtatttttctgtttaatcttaataattctctgcgtatttctcattagctttttttaatccattataatctttacaaattgtactgaacaattgaatttgatcaagtacaaattgtactgtacaatatataacgaattgaatttgatcaaaattgaacttccgtacaaccaaactgaaatatataaaacacaaagacgaaactgtaacaatgatgagagagtgaacaaaagcttcattcatatacacaaagactaaaagatgaagaagatggaatcaatcataagtggttttggtgccacaatccagagattcgtctccagttcgccaactgcatcaaactgaatcaagaagcaagagacctcatcatgcacacatcgacttctagatacgcgatgttacctggttcaaaaattcctgcatgcttcaatcaccgagctactactgaaggtttattgccaatcaggttgaatgagtcacctcttcctacatccttgagatttaaggcttgtatcaggctggttatgcgtacaaataaaactcgtgagtcttcgactttggtatggattaacatcgtggacaaacaaaatgatctcaaggttgagtgtacaccaagcgtccatgtagtagatatatatttaacagagcatatatacacatttgaagttgaagtagaggaggtgacttccatggagcttgtctttgacttcgatggagcttgtctttgagtttcgatggagcttgtctttgaatcttggaggtcccttcatattcatgagcatgatgaaagcttctagatggcatcgatggaggaggtattgaaattctctgccattttcatcttgtgttgaacttgtgtatgattatcaatgtgtaattaatgttggcttatgattaattgaaattagttgcagataaggagaacaaatacaaacaaagatagagacgaggagaagtcatgagtagaatctgaaaatccatggttatgtttttgaaaagagaacatagagagtcagcttcatgtctgaaaccagagtaggaagcatgttgtcctaactaaaaccagagtacgtttctttctctgattttgtttttttaaaatattaatatttgagcagattcaaattgactaatatgctgtgataattgattgcactaaaaaaatgtaagtcttgttgttgcagtcacataacaagcagcagaatcgtatctgaactaaaaccatgcaaccaaagtacataaaagcatacttagcacccaagagaagcatctggatgcacaagcaggcgttcttggtgacctcagcgttctcgtgtgggatttgcgtaacctaacaaaggcatgcatggagagattaattagaattgttattgctgatttcctcaaaaacaaaaaaaatgttaactgcttcagtcccactatctacatgctataccactgaacatagacttgaagtcatttggtggattttagatttggtgggacttatgatgaattttaaggaggttcgggtgactaatttgggttttcattgaaaaagaggtcaattctattggtgatttggtaaaattcaatcacaaattctatagtgctttctggagtgttgagtctgataacctgcaaaatttcgtacataaatctagaaattcaataaaattgtgaattagccactcgagtctttttcaaaataaaattttgcctaacttgttctcaaatttgatattttctagatttgtttggatttagaagcaagaagctagggtttgggaaatatatgccagctgtggaaattgcagatccacatggagagcgacttgtttttcactgggaagagttttgtggcatcgtgaaaaggttgttcccaattgttctacagatcccaaagtctaattgatttggctgaaaccagatttcgtggaagcttaagaatgagtttgataatggtggagacgttggagaaaaagaagatttcgaatgggaaaagatttatgcattttttgtatgagtcacatcgtattcatttgtttggacaaaatctccacaaattccatgtcaggagatgataatttcttacccatattttttaactaaaattgtatcaaaagtctcctcaaatccttatcaaaaggtactctaaaaataatactaaacttttgactaacaccagattttgtaagagttttataaatcacagattgaataacaagtgcttgtagctcacttcaaatctttttaaattgaattccatgttcaaaaacatgagatttgtgaatgtatttcaaaatcactaattcaatacgagatgatttcaaaaaaatagtaaactctttcaaaatacatagttcaatacacccccttaaataaaacaaagaggaaggagagtaagagaaaagaagaagaaacctgaggtcatttccattggtgagatactttaaaagtttctaaaaaaaaagtataataatattttattataatttagtttctgtccaattataaacacacatctatacacataatctctcaatcattactttaaagtttatctgcagagaaactattttcaatctctctcctatctcttttctattttattattattttatacttttcagttaataaaaaaccatgtgagagactactgatggagacgctctaagctactccaccaaatttttgggaatgttcatcaattgtagtaatatgtttctttgaagagtgtgcatagaagtttatcaccccttcatgctgaagttgattccttgttttggcaatggaatgtatgatctcgatatgtgttacgagttgctcctttgcaaccgattgtgcagatcttatctctatccttgagaaactttcggagtggccgacgttagtagctgagatagcgacttttggttcccttgtctgattttttccttcatttagtattaatttcctttctcgttgatttaatgtgagggggcgattgcctcggaacaaagcacgtgctcgtaatagtttgttttctcatgtaagcaaatcggttcatgaatggctctctatagaagagagttttttccagattacttaatacataaataatgttcgacggaaaaaaaaaaaaaaggactgaagcttcttcatcaacaaataacaccattaccagatttagcctagcactatatgtaaatgaggctgtatgttacataaatgttatacaaccaaggcaccaaaatcaaatactactctgagattaaaccacataataacaaattttgttatataaagagtactacccaaattaggttataacaaatttgaccatttttaatatcataacaaatacgatctcatctacaaacatccgggaactgtaaatatattaaaaatagttagatcaagtagcaaacgcaattccaatatcttttaaaaatgattaaaatcagcatgataaaaaaaaaaaataagatcggacacagaaaagtgaaataaagttttttaatcagcatgatctccaccacctcatcggacacagcatgatgaaatcaaaagagaatttcgcacctgttgaagataaaaaggtaccgttagtgtttgttgtttagaaagttgctccccaagcatcattttagagcttatttagttgtaagtcaataagttactatagctaggtagctccttaaaagaaggtcgttttggcagttagctcggtcgatagatgcgtggcttagtttgctcttctcttaatgagtctttctattgaaatgcttttattcctggttgatgcagaacaatgatatgtcatatgtggttgtacttcgaagacaagggtttccagattcgaaaaattctcgagtaaattcgacgaaagctttctatccttctttccgataagtcttaatagttaaatgaatcaggttgtcgacgatcggtattgatttacaacaaaaaagtaagtatacctgaaacaaaaacaaaaatcatcacttaaatttcaatcactaacttaaaaatttctgtaagcaatgttacactaacaacatatctcaagagtctcagcagatacgcaaatgaccttaactttggtgagtggtgaatgtcccaatttcatttcttaactggtgacgttggaaagtctcaccagtcagctctgttatatataccgaaaaccaaatttttctccaaattagtcaaatcttttcttaatgggctatgacttgttgctaatctgggcctgagtttcctctttggtttgactgatcaaattacttcgacgaacacaagccctgctttctttgcttattacgagagcagaagaaactcgtatatcccaaatctccaacttttcaggggaatgaatgatgatgacgtcattacactatttactgtcccaagctcacggcttctccaacaatcccttcctattcaacattgattaccacgaagtatactaataatcattctgttccgatcctttctgcgtttcaaaatcaaaccctaaacaaattatctatttttagggtttatgagagttgctttgactcatggttgatttgaacaattggtcaatcatggttatacaagtagaaaggtttggttttggttttagggttttttggtagaactaagagtaatttattcaacgttatagaagaatactatccatattatggtggagctctaaggttttgagaaagtaatttccattaagagaaatgagatctgaatgcggatattaaatttggtttaccattagaggttgtctatcaaaatggtgatttagtctataggactttagaatggcataaccattgccactcccaagtaacctacaagtcccgaattttactgtagagaacccatcactacacgtcaacgattcacataattaatcactacacgtcaagtttcagttaaaggaatcaattacacgtagaatctcatgatttaggctggttcaatccatcggtataataatcaatcacctcatagaacatcggcttaataatccatcggtttaataatccatctgatatcaacgacacgagataaggttcagccgataccttctcgacaacactggatctcggcgggactgtttacacggcggctggaacggtgaagtggacggctaagcaatctgatatgtggcggttcaagccatggtggtgagccctcagggtcgatcgttaaacaacaacatatcaacatatcataaagcaagccagaaacttccagcacaagttacagattaaatctagggctttcttacccttaacggcctcgacaatgtctacgactgctccggtgacagtggctaacgtcatgtgactcgtgttggaaacctctggcaacacacggcggtggctggtggtgatgaacgacaaaggtctctcctttctgacaagttcctcgatccattcaaacacaacagcacgatgacaacaataccggtggctcaatcgtctctctcataatcacggtggttgtggctttaaagaaggtggctggataaccaacggtgaggcatagtctcgatcacgctaacggtggcttagggtttaactcaaaatagttctttttatttcgtccaaaaacagagacggcgatatacacaagcacacaaatgtaacaaaaaaaaacttgtcatatttagtcattgggctaaatgggctgcaacttattaacaacaaactggcccgactactaattatagaattggggatgttaaagattttgtcgtttgtaacattttctaggaaacatccatggagtttctgtgccaatagtcaacggtcacacggatccttttcttccttgttaaaatccttcttccatccatctaggatcttgctccatccttcaccattctaatggattcttcttttttccttgtcgtagtcgcagctgctataggcttcttcatactttttcgaaaattcagattccaagaaagtaattcttcttctttatctcttccatctcctgcaacttctgtgtctcgaaactggaaacacgatgtcttcccgagcttccacggagcagatgtccgaagaacctttcttagtcacatcctcgaatcgttcaaaagaaagggaattgacacattcattgataataatatagagaggagtaagtcgatcggtcctgagctcaaagaagctatcaaaggatcaaagatcgcaatcgttttgctctcaagaaaatatgcttcttcgtcatggtgtcttgatgagttggccgagatcatgaaatgcaggcaaatggtgggtcagattgtcatgaccattttctatgaagtggatccaactgacataaagaaacagaccggtgaatttggaaaagccttcacaaaaacatgtaaaggtaaactaaaagagcaagttgagagatggagaaaagctttggaggatgtggccacaatcgccggagaacattctcgcaactggtttgtcctcttgatttctactctccttaattaatatttccttgtcaaagtgtattctttcagatcttcgtgaccattttatcgcaacgattgtatattgatttgatatctatcctctaatgtcaggaggaatgaagcagacatgattgagaaaatagccacttatgtttcaaacatgttaaatagtttcacaccatcaagagatttcgacgggttagtagggatgagagctcatatggatatgctggaacaattgttgcgccatgatttggatgaagtaaggatgatcgggatttggggaccgcctgggattggtaagacaactatcgccagatttctgcttaaccaagtctccgacagattccaacttagtgcaatcatggtcaatatcaaaggatgctatccaagactttgtttggatgagcgcagtgcacaattgcaactacaaaaccaaatgttgtcccagatgatcaatcataaagatatcatgatttctcatttaggagtggctcaagaacggttgagagacaagaaagtgtttcttgttctcgatgaagtggatcaattaggacaactagatgccttggcgaaagaaactcgatggtttggtcctggaagtcggattattatcacaacagaagatctaggagttttgaaggctcatgggatcaatcatgtttacaaggtcgaatatccatcaaatgacgaggcttttcaaatcttctgtatgaatgcctttggacaaaagcacccaaatgatggtttcgatgagattgctagggaagttacctaccttgctggtgaactccctttgggattgaaggttctaggctccgctttgcgggggatgtccaagccagagtgggaaagaacactaccaaggttaagaactagcctcgacggaaaaatcgggaacattatacagttcagttatgatgctttatgtgacgaagataaatatctatttctttatatagcctgcctttttaacaaggaatcaacaaccaaagtggaagggcttcttgcaaacaagttcttggatgtgagacaaggtcttcacatattagctcagaaatctctcatatccattgatgagaattccttttatggagaaacaatacgtatgcatactttgctcagaacaattcggaagagaaacttcctgtaagcaattcgtttatcatggctataggaaacatcaacttttggttggtgaaagggatatatgtgaagtacttagtgacgatacaacagtaagttttgccattgcatctccccctgttaattgagtttatttgataacacgtcatcattactaatatttgttttggctcatgtttcaggataatagacgttttatagggataaatttggatttatataagagtgaggaagaattgaaaataaatgagaaaacacttgaaagaatcaatgattttcaattcgttaaaatcaacctgagacagaaactgcttcacttcaagattatacgtcaacctgagagagtgcagttagcactagaagatctgatttatcactctccacgaattagatcactgaaatggtttggttaccagaatatatgtttgccttctacttttaatccggagtttctcgtcgaactagatatgcgttacagcaagcttcagaagctatgggaaggaactaaagtaagtagttttgatgaaaactttcactttttataaaaaatctataatttgtttccgtaaatgtttattagcctattatatcaatatgatcttctttgttaaatgtagcaacttagaaatctcaagtggatggatttgagttattctatagatttgcaagagcttcccaatctttcaactgcaactaatctcgaagaattaaagcttagaaattgctcaagtttagtggagctcccctcctctattgaaaaactcaccagtctccagagattagatctccaaggttgctcaagtcttgtggagcttccctcttttgggaatgcaactaaacttaagaaactagatcttggaaattgttcgagtcttgtgaagctcccaccatctatcaatgccaataatcttcaggaattgtctctaataaattgttcacgtgttgtgaagctccccgctatcgagaatgcgactaagctccgtgaattgaagctccaaaattgctcaagtctaatagagctccctctttctattggaactgccaacaatctttggaaattggatatcagtggatgctcaagtctcgtgaaactccca

SEQ ID NO: 34881 - DNA, 3770 bp, Arabidopsis thaliana landsberg
  unsure (1)..(3770): unsure at all n locations
tggctatgacattttctgttggaatatcagacaatatctgtagaagcaaatcttcaggcaactcactgattcggtcctccttcacggcatctcgaatactcaaatttaaaccatcagtttttctgtcaaaaatcaaaggaaaaaatatatataagaaatttagggttgaaaaaattagggttggatctttcagctaaagaaaacattaacgaaacaaaagatatatacaattgctgttccattgttgttaatagagatttaaaaaaaaactctctagtctctaataatccttcagatttaatgccttcccagtgctatcggctatcgcagtacgacttcagcttcaaaagtaatgacttgtgttataaaccaaagtggaaaccctaacagagtatcaaaactaatgcattagcaacaacacttagacatcacactccagcacgtgatctggtgaaaaagaaggacgacgatcgacgagtgactttacgtatgagagaccgatggctttttagggttgatttaaaaccaaatccaatccagcatattcagaagcagagtagtcttttctcatgggctgactactctcatgggcttactacttggaatctatatatacattnttgcagccatttttggcttttaattattgatttttttcgagcaataaattgattaacaaactaaaaatattccaatctcatatgtcacgcacacagtattcagcaactatttaaaacaaaaaatgtttgacaaaccaaaatacaattgcaatccattaaaataagcaaaacgcacctaaatacattcttaatctattcactaaatcttatttctccaaaatttgaactagatttcggcaactatttaaaacaaaaatttgtttgacaaaccaaaatacaattgcaatatcgtaaaatatttattttaattatatatttaaattagcggtataccgcgggtttgtttttatgggacgggtttggcgggacgggtttggcaggacgttacttaataacaattgtaaactataaaatagatacaatttgtaaacttttatatatactaactttaagaaaataaattgtccccgcggtataccgcgggataaaatctagtacgacattaagtatggattctttttgaataaaacttagttttgcttagtgtttaatgattcagttttggagtagaatccaatgatagttttgtttaatcctgtcatgtctttttttttttgttacttaacaaaatgttaacatgacattttagagaaaattggtctccgttacatatgttttataattattaaaaagttgatttgaatgcaaaatacgtatcatcatcctttcagagaagatactgtactcaatttggggcttatatagtccactgtaatttttatgtaattagcttaatataggcccaagaagagtaattagttttccgtagttgttcccccacataaagatagggcaacaaaacctatcgaagactaaaatgcaaagagacagatggagcagtaaaacctaaaaacatcaatttggtgagataaggagagagcgaagttgactgtgtagtaaccggtgtggacttttgttagctattcactaccatattgttcgtcttcttctctataaaccctaatttccttaattcctcaatttgcggttgttacgtatggattactcttttattcttgttttcaggttatttgctctgataattaagagaagaaagcgctttttgaagctgtcagctctttttgtcctctgttcacatatgcatttgaatttggattcttctgttaatttaacgttaaggggttctgaagagagagatgtatcattttcaaatttgttaagttttcatagaaatctcttagattttcattttcagatgccagaagcatcaagggtttaaatgtggtagtcgtgtctgtttgtttttttggttgatgcattagaataatctctctgtttatccacttgtcgtttctttatctttaggtgacatcaactctctgatggagagaacactaacctgaaattccataatctgttgaaactggctttgtatatctggtcacagcccctccagaagtgaatcttctttattattggataaataaggttagagacagtttatggaatatctgatgtaacttagaatgtcatcttcctacttaattcttgattgctttgttggcatgtctactatatatgtcttcagggtttaagctttatgaatacatgaatggccggttctgacaggttctctgcatcattccatcgtcaggtcttgagcattttcatgagattattggtcaagaagtgctctgtgctcttttgcttttgttctggtttgtttcacttcaatcctcaatatcttcataactttatatctcaattatatgcagctacttgggatctctgtagataattctatgcaatttaattgttaaaaatgtttgtttgtgactttgtgttacttcccttaccaacaaatccacgttgtaatgaaagcaaaacttggtatatgattatggtttaatgatagtatatgaaagaaggggtttacaaattacacttaaaatctaggaaagggttaattagttaatttaatattgcaccccactttgtagagtagtagttaattgaatattgatttaggagtagtgtgcaggtaatggcaagcccttgacgatgccacagaggtttgtgttgagggggatgttgtactcgtcccttagcgatttctccggtgatagaacactgacatacaattgctcgcctaggtatttcctctccaagttctcagacctgatgttccacataccggcgttgtcgaatgtcaaaaggatagctgaccaagacttggggtagacttgcacggtgtgtctgctaaccgcatcgagcaagttgtagttctctctcttttcaggcgtccacctccctggctcagaactggcaaagtccatggaacattaacacaaaagttagaagatagaatgctaaaggaaagaaagaaagagacaggaccaaggagcttacgcgacagcgaagaaggagtagccatccaaatggaatgactgcatggtcttctcgtggttctcgaaaatgatctctacaaaggtacggaaagtgatgttgagaacattaggttgtacagtcaatgctgtgattttggctgcaggctcgtccttgatcacattgtacttgaaaaccttctctgacatttggaagtactcagcaagcttcaaaggagtctcggtgtcaacgtgtgatacaccattgaaaccaaaccggactttaccgtcaaccacacttttagagttgacaagcttgatgctacgggtaatattgatctttccgtaatggtatgagccttgggggttaggccttgcagcgttagaggtaaggttccacctgaaagacctgaactggttcaaagaccaagcccatccaacaggagccttgggtagctcagttgaagcctgaacgttgcttccctcataccggatcacacccacggtgctcaactccttcttgaggaacctagtcgatgcaaccatgtagtaatccttagctgcttggttagcagtcacaagaactgaaaagcactggccaacatggacatcgagagagtcatagtcgttctgaataacatgggatccttccatctccacgagcttcatcttgtggttctggatcctaagttaagtgtagacttgaacaaacaaaacagagcctgactgtaagtctttcaggctt

SEQ ID NO: 34882 - DNA, 5754 bp, Arabidopsis thaliana landsberg
cttcatcaatcacccacacataactcactctatgagcatttgcttgtatcatcaccgccattaaagaactcttccgattacacactatcgccaccgatttcctagccatcctcgccgcgctactcaccgacctcccatacgaagaagtcattctcgtcttccccgccggagattcttcatccgaggaagaccccgacgacaacgacaaagaatcaatgagtgagattaatccaaccatccctttatcttccaaacgattcctaactactccaactagactctccggcggaccactaccgtcgatataggacattaaatctccggcagagagtgtagcaaccgctgctacggcagtttcatcgcagcaagcgagtgtcatcggtgaaatctcgcctatcaaaaccatacatggatcttcttgatcacatcctttaccaaccaccgcgacagagacattgtccaagatggcacgagagatggcagagacggcggaagcagctgaggagtagtaatcaacggcgaggatagtgtgtgtactattgataactccaagatcggagatagaaagcgacggtaatggagagaaaacgctaatggaatcgagaaggaatcgaataatgtcttcttgtgtgatccagcagaattctcggctgtttttgtgggttgttgaagttgcgttggtgagtgaaacgacgacgtttcggttcagaagtttttgttgttgtcttctctttgtgattgatttcgtatgaatcggaacaatcagattctgtgctcctttgattatcagatcaatagcttcaatcaaactgcaaaaacaggactttaggaaacagaacaaaaaaacagagcattaagaaacagaaccaatgtctggatttgtaacatacctgcaagaagattgaacatggacgacgagggcacgagatttgggaagaagaacagagacagatgcgtcgaaagcagaggaaagagacaaaacattgttgtcgaatttggataggtaacagattacatcagccatacagatcttacccaaacactcacacttatcattatcatctgttttctcatcgtgattacagctccatacggtgaggaacggttcgtcagaggatttgagagcggcgatggcgtcagctacggtggctgtggcgacggagagacaccgtaaaggtggcttaccgatacagaggtcagataattcgtgagacaaaagggttaatgccataaaagaagaattttttttattttttttgcagagaatgtgaaggagaagatggagagagaagacagaggaagaagtggttataaaggagaagagagatgggtacggtgttaaagtacataaacacaaaactacttggtctagggttgtgtacagatagattttttttacctttttgtttttttgtgtttattacaggtagattttttgtttttactataatgtttaggaatttaattaatatgctgactaagaaaacttttgtgatttatttgttaaactatgataggctagaaaaaatctttatattttagaattgagtattcaaataattttcagtaaaatgatttaatttttatttttattttgtatattcaagattaatgtaatctcttattcatcaatgaaatcatagattactccactactgatttactatacttttatttctctttttacaaaaaaaaaaacgaaaattaaatacaatttcttcagtctaatcttttattttgatcatgtccttctcttatgactcatatctaaactggtaagtggtaagtatgaattgaatgaataaagagatagagatttcttttgttttccaaagataaagagataaagatgaatataaattatagaagaatattacatttccattcattcttctatattatagctgaggaatatctcttgatcttaatccttagaacaaatttcattgtacttacagtgtcaaatttcagaaaaaaaaaaaaaactctattaacgaatcttcacatcaacatttaaacatggataataagacaaaactctcataagtttaccaaactagctcatatatattgagagaatcagggaaacaaattttgattctcaactaaaactatatccgataaggggcaaaagctaaatgaataagaggacatatgaccccaatgtttatacatagttaaaatataatgacctattgtttgcggataggtgtgatctaacaacttgtaagaacatacatataaaaaggtccatactcgatagttatgtttttataaaaaaagtaatgaataatattcactttttgataggtacgataacgaaagatttctattggtcgagagtcgagacccatgaaatgtatacataacacacttatgtgattatgatatttggttagaaaactactaaagtgataaacttttgtcgcttttaatgatagaattataaacaccacttttgaattttaatattacgtttactccaacaagctgtcaccgggttagacttaattaattgtcttatgttcttaacgtttctcatgctcttttgccaaatattctgagccactacgaaacattttattagtatctgaagatcctggtaaaactaccaaattgtaagcaaaacctagtctcaaattaaactctcaattagatcttattatgttaagccaaaagatgtcaagacaaaaaagcctaactaatttggctaagtaatttttagaatatatttcgtaactggtaccaaccttttgtctcttcatatcgttttggaaaaacacgttttattgttcaaaaccttaaaacgtcgtacgtcatggaacaagttggccaagttttgtaacatttctttttgtgttgtgtttgctacttgcaagttattttcattttctaggtaagtaacatcatccctatatgtttagagcatgcatgattattctaacgctttatttatgacataaaaatttgcaaattgcacatagagccaaatttatgtgtatcgtacgtatatgcatttaattactaacgagtggccatgtagtcactgagagacgtcgaatctgtaattgttctaggtttcatcaaaggtaatccaagaaaggaagaaaagtttcaaatcactaaaagaacaattattgggacatgaatgatactgctttgcttgttccaacaggttatgttttcacatcttctggttctgcgtataaggctgttaagatagctttgttacccgcacataattatactcagaaacaagactgagaacctattttatcacacatcaattgctatacttcctaaattatatgatgggctttttttatatagattatataattaagtgggccttccccactacccatgcatacttttctaatttgatatttaatttgtcccacatcgctaatttgaaaaacaatgttgctgtatatataagattgagagagcaacattggtcacgaccttacttgaacaggatctgttctataggctcgtacctctgttttcttgatttctcaagagacaggcccttaaccctggttgatgaaccatgaccgtgcggctagagcgtgattgacggctacgatcgtcttcggacgcatccggttctgtagaggatcgttactcggctcggctcgtccttgccggggtggtcgcacggcggtctgacaggtcctttttcttttttaattttctttttatttgctcttgtcacttctatttcttatttgaactcgacgaaaggcctatgagaaggatagcgtttatttatttatcatatattcaaattctctttcagttttgatttgagttactcaaactattagctttttaagaataaatggtttcaaaaagatgatagttgtaagcttataccagaaacttgtaactaaattattactttagacgataaaaaactagaacaagcaaaccaaacacgtgactgattgaaatattggaactaaaaggctatagtaggcctagtttaaagcattttgactaatggttttatagttactttcatttgtgtgtaggagtggctgcgttgataggagaacattccttcttgagaagaggagggaagaacggatttagcggaaacatttttggccaacattttacatccacagctgaaaacgccttgcagcacatatatccaacattaccaaactttcctgtgaaaactgatttgtagatttcagttacacaaccctcaacgttgacaagtgatgacaaacattttgtgagatcgatcggagaaccagggatgacagggaattgcggtgtcttgtgtgctggtgcacctgagatgatgcgagagcaaccatccttgagaagaggagggaataatggattcaacggaaacatttttggccaacactttgcatccacttctgtaaaagccttgcagcacgtggatccaacgttttcaaacttaccggttaaaacagatttaaagatttcgatattgcaaccgtgaatgttgaggagcgatgaccaacattttgcgagatcaacttgggagccgggtagagaaaacccagcactggtagggagttgagctagcccgggcttcactaaagtagtggcacacaaagtcacaactagaatcgtcgagagaagagcttggatcttaccttccatagtgactctagtgatcttttcttttgttttctatgaagattagtcgactgtttaattgtgatgcttttggtatcaaaataaacaaacaatttataggggtaatatgtaaagaaacgttatattaattacgagagttaccactttgacaatcgttcgtaaacaacctttgaattaagacataaaacgttgactgtgggattattaagcgtaacgaacaaataacgacttttaaattgagtctattaatttgcttaaaaagggggccgaatatttcaggcccatcaattaccacgtgaagtctggttttgcttttgttgatgttacgataccatcacgtgtttgcacttaccaggaggttacacttgcccggtcatttggttacccaataaccacacaccattcatcaggacactcaccaatctgatccgttaaaggtttatgtatttatacacatccaacacacaacttagaaaataacaaaagagaacaaaaaaagtctaataaggatcttccggtagttaaagtgaaatacaagagagtccaagaaaatgggtgtttttggatcgaatgaatcgtcaagcatgagtattgtgatgtatccgtggttagcctttggccacatgactccttttcttcacctctccaacaagctcgcagagaaaggtcacaagattgttttcttgcttcccaagaaagcactaaaccagctcgaacctcttaatctctacccaaatctcatcactttccaaaccatctctatccctcaggtcaaagggcttcctcccggtgcggagaccaactccgacgtccccttcttcttgacacatttgcttgcagttgcaatggaccaaacccggccagaggtcgagaccattttccgtacaatcaaaccggacttggttttctatgactctgcccattggataccagagattgctaaaccggtcggggctaaaaccgtttgcttcaacatcgttagcgctgcgtcaatcgcactgtctcttgtccctgctgcggagacagaattcattgatggcccggaaatgtcaggggaggaaatagctaaaaagcctctaggttaaccgtcttcgaaagtcgtcttgcgtg

SEQ ID NO: 34883 - DNA, 2755 bp, Arabidopsis thaliana landsberg
gatttgattaagatcattgaagttaactgaagttggtataatacatccgtaaaaaaatgaagttacaagatttcctgaaatgattcaagtccatggtttgatatttgaagtaagagaccgatcttttaagtcaaatttatgaaagatttagcctttaggatagaaatgattgtatttactaaaattatacacatcattattaggcatggagctaggattggcttgtgatcattggtttattcaggattcggtacaatcgtattcctgagaaactcgagactatatactctatagttataacggaaagattaaagatttgtgatgctaactttcttccgtctgcacgcccagtaacacacatagagccctactctttctttttccattctctgtaatatacaaactttatccactaatgttgatgatgcaagcagggaatcaaaattgcgtgcagaaccaaatgccacacatattcttgtccttataacacatcatggtgtcaaacaacaatcaacttctctataaacttactctacttacaacttcctcattcattcttttcccccacccatgcagagctttgtgggtgttcatattatgggcgtgtataacatatttgatccctgctcataaactttggggagccatggactgctttggggagctcggtcttctttaatagatgctgctgcaaagtggcgttgtgcgagggatagttcttctcctcagggattgtagcgtaggaatatagtcatagctaaaatggaactacataaggaagagctgtgatatccgcagactctattctgaaagcttggttccagacctgcaaggattcgccagaatctggaggatctgttctcgccttttttaatttgatacccgactgaccaagtagccattcttggtcatcatcaatctctggcaacagctcccttgtacgtacattgagtatcatattgagatactttaggtcaggatgaggcggctttgcggatgcttcaccattttccttgactttcactttcattgttgcagccaaagggcttggtggacagactttacgtttttctccagagacagcaaacccattaattctaacttctttgacttgtggcttgcaagttgttccttgcacctcagaagcaggcattggaggagttcggggtgcacctaatgttcttccattttccacagatggtacagaagaactcagcttctgtaacttgtgtggcgttgttccattttctgcgaaagaattaaagactaatgttacaacaaactgttaataaactacattgttaacatttcagaccaaaaccaagaaatagggatcttgcatcattactccaaactaagaaactaccaaaccactaagatacccataaatttaaaaaatcttttaaggtaagaaaacataccatgattggataaaactattagatgcttctaagtaccaaaccatatatcatacgatggttaatatggcaactacactcctcattcaccagacagagaattggatcagagaataactcaccatacaggaatccatttgtcatatgatccttccgtttgccaagatttccctcggtgtgaaggttcttgatgcttgtccgtgaaacgtcaggcagcttgcaatttcttaaatccggagagtccttttctctttcctctaacttgggccctcgtatcaattttggtttctcctgacgagttttatttattgactctgttttttcctctttcttctctttatttctgtctttatcctttgcttcagtcttctttaccccttcttgatcccttggtttctcactcttggtcacattttccttgcggtgactcttctcagctgattctgtttgcctcacctggtctctgttctccattggtttacacatcacctcagctcttttatgatctgcaccaaatgatactcgagaaactgcattttcagaactttttgccgctataaagttcttctggtttttgattctcttattgtcatctaccctatggcttgtttcttcaattgggctgttctcaaatgctttttctgttattcctacatttttttggttaggatgatcaatcctttgtgcactctgacttcctgttgcttcttcgtcatatctgatccttcttgccaggtcctgtacatactttgactctccattactattattctgcaccatatctgatacacgattctctctgtgcccggtgtttgtcaaaggctcggctttcttctcctccaaaggtttgcttttttctttatctttctccttgtctttctgatctttatgtttgtcttttttctcctttctttccttctgtttgtctttgcttctatctttactctttttctctttaccctctctcttttctttatccttcttatgcttcttttccttgtacttgtcctgaaattcaaatcccatgaagaaaatcatatacacataaaaggcagctgcatatagttcaacctaaaacagactaatatatacatggcagaagcatcaagatagcatacaaaagcagttcagcacaaaaatttcattgtccacaagtcaattacacttgaagcaagaacgaaagtctctaaatccctcaattattaacagacaagattgaccatgcttggtagataggactttgaaaaccaatatgagcttatataaggttgctgggcaaaaacagtgaaaaaaatggatatgcattgtttgcgggttttctccaattcaaggaagtg

SEQ ID NO: 34884 - DNA, 1568 bp, Arabidopsis thaliana landsberg
tatgataatctgttatttttatatccagattataaaatttgttcattatcatgaacaaacaacaagaatataagatattttgatttcaagagttttcgtatgaaaaaaaaaagaagcaaaaattaaagagttattttagtaacactttttagattttatgctattgcatatagccatataagacaaattgatttgtttttaatttcgtagtatgtctaacgtctcaaaagtctattacttgaaaatgttgaatgtcaatgttacgaacttacctaaagatacaaaaatgaaaagacagaatttcatatgataagatatgaacgagaatgtaataataataaaaaatcaaggtaaaataacacaaataaatatttagtcattatagagtgatgaccattgaccattaaatttttacaaaatagaaaataataaaagtaaaataaaagtagtaattgatatatttaaataaataatttataattttattttttattttgaaaaaaatcatttaagaaatgaattaatggaggatttaacacaatatgagactttgattttctctcaattaattttgctaattttaatttaatcaatattaaatgacacatgttattttcttgtgtgatgatgtgtcactcatatgcagagagttggccaactttcatatatatgatttattggttccaaaattaaaatcgaaactacatttagttttgttttgtttacgtgagactaaattccagtttttcaatagctttggtatatttgtctatattacgacatatttcaaacagtttcggaaattttgtaaaatttgatacggttcagaactttggtttgtattaaaacttggaaacattggagaaaatacgaaaattaaaaacaaaaagataggtaaaccggttggttcacctcaacaaacagaaccaaactggttactaattaaaaaatatgtttcccagtgggtataagcataaaagaaaggcgaacaaaataatcaaaattccggtatgattattattttttagtttttcttctataaaatactgaatccgattggtaaaataaaactgtacaaatattttagctgtaagcttttctgaaatagtgcaaagctgtaaaaaagaattgtacgagaaaattatacaataaagctgttacaatccgatgactctaaactcgattcaacgcaactcaaacaagcttcaattcgcagaaactcaagagatcaatcaaagaacgaaagcaagcaaagaacaaaacaaacacacgattgtttacccagttcggatcaccgatgtgatgaacctacgtcttgggtcagaatcaatccagcaatccactacgaatcaatgtttactcaagctcaaaacccagagctcaagatcgtttacaagagagaagaattgagataagaattttccgttacaacgaacaattgaagaagacgaagactatttataacagagtaaggaaagtcaacccatctcattccagaagagtcttttgatccttaagttaaaaggaaactaatttcttcttcttcttaaaccaataccaaaccggcg

SEQ ID NO: 34885 - DNA, 4421 bp, Arabidopsis thaliana landsberg
aggaagttcaaggtttttctaaacagaaattcatttcacaagtaatttaatttataaggaaatgaatagagaaatcaaatcattgaagaactacaaaatatagattcaaggtcaggtctaagaaaatattcctgaagctcaaaaaagagttttcctctcacattatagaattggcctttacttcaacattttcccacctattccacatttggtcagaacatttttaattacttgtggatcaatttccggttgaaatgggtttggtgaatatccggttcagttatatggtggccgttggaattggcttattaattgtggccgttgttgaagccgttggtattggtaagggagaagcagacttgtggctatgagtctatgaccatgactcgtgattatggagctgtcttatgaccctgaccatcaccttgatctggtggattccaatgttttcttcttcttctaataaaatattatggtcaatacaggtgctaattaagatggtaataatttcttatgtttctgtggtaaagtttgattcaattccgtagttttagataatcttatttccatacataaattttatagttttatctactttgttcttatgttttatctctagccaagagttattattattatcagaagaagaaaaaaaaaaaagcatatatacaaaaggtttaataaaatgtattatacaaggcaattatccaaaaaaaatttgttttggtttacattgatgctctcaggatttcataaggatagagagatctattcgtatacgtgtcacgtcatgagtgggtgtttcgccaatccatgaaacgcacctagatatctaaaacacatatcaattgcgaatctgcgaagtgcgagccattaaccacgtaagcaaacaaacaatctaaaccccaaaaaaaatctgtgactagccaatagcaacctcagagattgatatttcaagataagacagtatttagatttctgtattatatatagcgaaaatcgcatcaataccaaaccacccatttcttggcttacaacaacaaatcttaaacgttttactttgtgctgcactactcaacctcaatggccgcctcaacaatggctctctcctcccctgccttcgccggtaaggccgtcaagctttcccccgcggcatctgaagtccttggaagcggccgtgtgacaatgaggaagactgtcgccaagccaaagggtccatcaggcagcccatggtacggatctgaccgagtcaagtacttgggtccattctccggcgagcccccgagctaccttaccggtgagttccccggtgactacggatgggacaccgctggtctatccgccgacccagagacattcgcaaggaaccgtgagctagaagttatccacagcagatgggccatgctcggagccctaggctgcgtcttccctgagcttttggctaggaacggagtgaagttcggagaagcggtttggttcaaggctggttcacagatcttcagcgatggaggattggactacttgggaaacccgagcttggtccacgctcagagcattttggccatttgggccacacaagttattttgatgggagccgttgaaggctacagagtcgcaggaaatgggccattgggagaatcagaggacttgctttaccccggtggcagcttcgacccattgggtttggctaccgacccagaggcattcgctgagttgaaggtgaaggagctcaagaacggaagattggctatgttctctatgtttggattcttcgttcaagccatcgtcactggtaagggaccgatagagaaccttgctgaccatttggccgatccagttaacaacaacgcatgggccttcgccaccaactttgttcccggaaagtgagcggctgcttattatgtgaatgagagcagagaaagagagtctgcttgtggtctattctatgtaaatttgtgactttcctttgtggtatctttgtatagaagtcgaacctctttttctctaactgtgttggcgttttatctgaagactcaattgaattgaaatatccactcttgtaaaattcatatgttctgtatttggacaaactaccaaatacggacgaacaaaagacaaaatgaaactatatatgagaaacttatagcaaaattacaacagagacgagaaagaaaacgaacaagataagtcgtcctaagatgatgccgtcgaaatgccacaagatgctttactctaagccattttttgaagcttctctggttctaattacccaaaagatgcttcacttggcaagcttcaaaaaatactgatctttgaaaacaaatttttattgtcgatatgagatgtgtgttgtatctattttagcaagtttcacatagaaacctctgtgcagctttagattcatgtttttcaacatgtttctagtccctcctgtcaaaataaaatggttatagcgtgttaatcgagaattgtatctcttcctaagcgagtacacaccaagatcaacaatggctgcaatggaccatgcaaagtaaaaggccttacatggttagtgtgggatctggagaagaatgagagatgttaaatataaacagaacgagatggcagctccagcgagaacattgtggagcagcctcttgtcgtcttttgttggtatgaaaacagactttaacgtgtttgtaagctcgaaaagtcggtgggacacctgaagaaaataaatcaaaagaacatattacaataatagaacgtatcgtgaatacaggatttcttcatggattctacaattgctttaccaagacatagatggccgtgacgagcatgaagttgagcattgggtattctggaataatgcataatagccacttaggctgtccatttggcacattcgatctgcagaacacataatttgcagttaaaatttcattcctagatccttcagacaaatggtctcttgcctacataattgggagaaaggaaacagtttctcgctgaccttaaccagatgtgaaactgagaaatataggtttccagagtaatcttgccgagccacctacgaagatatgacagtcatgtcatattagagttgtgtacagaataaaacactaagcttggttagaatgagactaagattgagaaacatacgcaaatagtgtcatggagaaattacgcagctgttgtgtggaatttcgcagacagatgtagacgctaagacaaaataatcaaagctaaagtcagaatttagagagtaagacatctcaaagtttaatgtttggggtgaaagaaaacgggatttgatactaacgttattggaatccacgatgtgtagggatgatatttgttgtatgtaaccttgtcaagcttgtatatgtattcataccataggtaaccaacctgaacaatatagggaacaacttgggcatcagaataatatcaaatacataagatccataagccagagagaacccaaactcacaaatgaggaaattgcaattatgcttgtctttattgacatctttctcttggcatcacactcctccaatttctccatccatctctctacctgaaatgaaaatgtcaaaaaatattttaatggtagggttcatgagaagatatgaaaaaacgagaaggctgtaggttcaagagttacagtgggatggaaataggcatatatcattccaatgatccatatgtagcggtcaagtcctgatctgaagtgccattcatgtaaaagtggtagttctggtttagctggatcagtgtatcctgtacttgtgtaaggaaaaaaactaaatgttagtcaacatacaaaaacactaattccagtgaccaagtgacaacaaacattggcaggatttttttagcacaagacggatacgcagtcgaccatgccgaacacagtaaaagatatgagaagagtctgatactgacccagtaagaatgttaaaggactccagaaaatctcaaaaacgccaggaatctcccacatcacgataaccacgagaaagcatgaagcaatcttcaaagccattactgatggtatttcgttatatcgactgaagataccaagggctccatacaccataagagtgaacagagtgtgcattggacagatgtagtacagcatataatcattattgagaataatgcagctaaacgccacaaataagttaagacgccacatcatctggaagaagtaaaagttttcatgagcatcttgagtcattgaaaacaacatgtcccttagaagcatatatcatggtcaactaattaactgtgcaattgaaatgacctgagtaaatcgtgctagggagaaatcctttctgatatagtaataagagaagttcccaaacccagtcatccagacgtaggcagcaaagaaaaaaatgattgcattatatatctcagccgcagcaaagtaatga

SEQ ID NO: 34886 - DNA, 1711 bp, Arabidopsis thaliana landsberg
aaaggacatcatgatagataattattgcactaactatctcacgatctattttcttgtcatataccggtctatctatcttctgaggcgtcttatgacatgtatctaaatggcgacttaagtgatttgttccataatttccatttcgtttactgcttgtacctaccaccaactttataccacaatggatacacttagctctttctttttcatcattttctaatcctactgaaatgaaatcatcccacacaaatgaagttttgcctctcttacgtggaacttgagtttgagtcggctgaatttgtgtttcactttgtttggtgcttgaacttctacgtcttcctccttcatatctattaaatcattttgtgcattgagaagtgtctcgttcatatctatcaaatccatcctggaacaaaacaaacacagagctaaacctatttatttcacaagccaaaagactcaagagccttggaaattaaaaacacagagctaaacccgtttatttcacaagccaaaagtctcaagagctaaatggttttacaccaccatacaataagaagccaaacacaaggggttataagagctctcacctttctcaaaggcagtagtaagctctccacgagtgaagttagcagcagcaacagtagtaagctctccacgactgaagttagcagcagcagcagtactctgtaaactaaagtaaatccaaagtaaagtcccattacgaaactgataaactgaacatactctgtaaacgggtcaaagaaaaaagctaaagacaaagctaaacacagagcacaaaagccgaaaagctcccactttatcaaattggcaaagaccctctaaacactcataagctagtaaaacacacaagaacaagcaggggacacaagtctattacaacacaagatcagagcacaacagctacacaatccattatgtgaaaattcccactaagcacaacattacaccactccactttaccccaaatctctccaccctcgcgtctttccactgcgatttccgcacaccaaatctctgttttctctgttttctgcaagaacagaaccaatttcccaccggtgtaactcacagttttggaccacttacaagccacaggcaacaatccttcaaaacctttaacgactccccaagctctctgctttggatcatataagctctcaaaaatcataatccaataccaaaattcatgataagttatatgttttattcattatcaagaaattgaaaaacaacaattcaaaaagttcatcttttagaatcatatactagaaaacacataaatcaagctccattcaccaattattgatgaagtcatgaagataaatcgattattatcctctgatgcaacaacagcgtggaggatttccaacacaatgtccagtccggtaaatagctacattagtacagtcatagaagcatgcatgatcatcccgtctagcatcacatagaaaaaggcaagcaccatattttgctggctcgatcactgcacatatatacaactccacattaaaactataaatctgtagatacatgtgcaaataacagttttagtttcttcaaggttcttaacaacatatacatatacacagatacatgtaatattgtattactaattctatatttttaagaattttttgtttcctgaattattgttttggtagtgatcaaagatagttgaaaattaaca

SEQ ID NO: 34887 - DNA, 4207 bp, Arabidopsis thaliana landsberg
tacgacaattttgtaagcttgcttctactaatatagccaattagctatagatattatattacggccgttacttttctaatgtttcttttgcagaaacgtttgaaagtttaacataaaactaaccttgaaaaagtaagtcaatgaaagaaataaattttcaattatcatgtctatatatatatccaaaaaattatctaaaatatagataagaaagtatcaatttatgctaatatttttttcccaaatatgctaaattagtaaatttgaaaaaaaaaaaaaatcttactaataaagggaaattagtaaaataataaagtcggttttttaagaacacgtgaaaacgtctccgaccaggcgaccataatcagttaattgagaaagcaccacgtcatcaaagaaatctagtagagccaatggggtatgtgccacgtcaatggataaggtgcccctgcctcgttttctctttaagatcccaaaaagattttgcagatttggatgatgatgatgtggtttttgcatctgtttagaaaataatccaaaaacagagtcgcatttccctccagtcaaaaaggatcattaatgactattactcactaaacaacctggattaaactcttgagcatcttttcttggttaaactttattcaagaagaacagaaatcggatatcacaaccaaatcaataaattaaaactgagaaatcttattaaaactattactattatcaaaaatatatatcaaattttaaataaaatcttctacaaaacctgtaaaaaaatataacttcgaattctatttaaaatctagatatcataaactaaaatataaaccaatatatggcttcacttctagctacaattaatcagggtcggctcaaaataataaaggacccagagctgaaaaaaaaattagttctcatttcctatgttttgttatgtaaatcttttttttggatcgtaattgtattagatttacttcaaaaaaaagagaaattttgggttgactctgtgcctcgctcctccggcacatgtgtagagccggacctggtttccgttgtttaaatcaaaagtctaaacatcaatgttataaatgtctgcgtgtagtaatcaaattaagcttttttcatgtcattatggaaaaatatctaacgaaagtgattacgatgttaatcatttttgaaatgaaccgttggggaaaagaagtgtgtaggtccaaacgtaaatctcgggtgatttaacaccgcataatatagtgtaatgttatgattatgaaaacacttgttatctagtgcaacaaacgacagctttctagcctctggtctgcgacttgcgagattaacaaccacgaaacgtgggtcccatatgtttcattctaagtggacccacacgtttaggcccattcggtgatcgtcaagaaaagcctcaacgcacgttccttcgctccacaaaaagcaaaagctatcttttttgtcgttaataattaattcatagggaatacaacaaacaaacaattataaaaatcgtccacaaacataacaaataatcaacgttccatatggattactggagtaacaccaatggatattgacattttctttttgtcaactaagggtacagtaatcaaatacaaacagtgatattacttgatcttcacaattatcatcactagattatatactcagagaccttttttctaaatcatacagaatatatataccaaagagtattttcaagctgtattaatgaacccattacccaaattatatgatacaataaaagaatatacccccaaaagaaaataatacaaagtaactcatcttaacaccttctaattcttctttctaaagattgattacattcactattcatttttacaatctcttcattgtcttgtccgtagcagccgatcaccgatcgttctcaactcgaacgttctcacagcaaggccaacatcacagattgtagtgtctagcacataaggagtgttctcgaacacgactcgagaatcgttaaaaagttgacgacaaggctcgcggcgctgagagatcgaaccatggtagtggaagtaacggattttgctttcagccttgtggtatgttttcccttgtagattctgagacatgtgtacgcctgtcgcgaatacattctccggctggacagcgtattttcgatcccgtcttggaaccttcttgacgtctctatatgccagtttctcaattccccatttcctgaaacacaaaaccaaataccatttagatcagtccctgaactaaaccaaatcaataaccgatatgttccctcctaagatgaaccattagtgatgttcaatacgaaactaatctacatcacaattcaattgttattctgattaaacaaaaaagatacaaacaaaagatagaatctttaaaacatttctcactaaaatcatgtgaaaacatttctcactaaaatcatgtcaaccatttctcagtaaaatcatgtgatgtccaataaaaacaaaagatcgtgaccgacataggagactaatccagaatgcacaaagacttacaggccaaatgttgacagaatcaaatacttattgatattatatgtcaccttcaaaaaacttgtgactaatattctaagtcactcaataaacaacacatgggatttggttaacgttcaatcattaaaatcaacaaagttatgaatgttacctgtaagttctggccggaccatcaccggaataacaaatccgactactcataggcatctgttcaatagtaaactgagaatattcctccaaagattccatcacagacgaaatcgtctctttcactggaacatgtaaaaactcatcaacatcaaagaagaacatccacttcgtcatgaatctatacctatgcaaacaatcattcactatcatgaattgattatgataatatccatcgaatcgttcttgatctcaatttggtttgtgatgagaatgactttgatatttatagtgatgaaggaggctagggttgttggatctaatattttcaaaaatattcgaaaatatcttgcaggataagttgcaaatcaaagattggatcctcactaatgattcgaatttggtttagttcataatgattggctatatttagataagtggtaaatattgtttagttgattatggttagttttaaatttaagagaataaatttataagatttttttctaatttatggaatgtattatcgtgttatggtagttagaagaatcgaataaactcgtctatgccgattttatagtgattagtgaggagggtgaatatatgattgaagattcttaaaatcgtaattaaatatgcagactattttgatggaatatgcgtgtattagatactaaaaattgttgagatatacaactaatcgtgttatggctaagattgcattacttgatggtaacccattatgtagttttacatgtgatcaaaagcccattaaacataactcacccgtctatgtaaaacgcggatcctgtttaatttagttatttggtttggacgattttacccttgataaggaagaacaaaattcaaaattgaaatcaaaattgaggctaaattagacaaaaattcaatttgtacttctctttttaataataaaggaatattcttatcatttaaacaaatactatatacttaatatacctatattttttttcacaaaaagaatcactgaagtctgaacttttcaaaatttgatatttatttagaaaaaaggtattgtatataatttaattaatattctaatatttataagagatactgtctatctgtatatcgccagaattagtaggagatttcttatgcatagtataacatttattaagataaaaataagttttctattttctaatggacatcacgtttgcaagtgatcaaatagtacatttgtaacgtgttaaaataatacaaagtggattataaaaactaattatagatacgtataatcttgtggatgattttgtgacaaccaatgaaaccgttaatgcgagattacgatagttttttatgaaatcatgatttgtgcataaagttaagcaaatgctaaataattcataaagtgtaagaaacacgtggcagaagaattaataattcgtttgggatatttttggtatatacggacaggccacgtcgtgtcctaaacctcttagcctttccctttataagtcaatcttgtgtcg

SEQ ID NO: 34888 - DNA, 4263 bp, Arabidopsis thaliana landsberg
aaactcaccccagggtcgaacaatgtgggtcgcagacgtagcaccatcagaaacagagaatgtggtaacttcgaacataatccatcaagctgtagtgtagtgctttagtagatgatattgatcagatttcgatctcctgattacttgtataattgatgaatccgaagttacagattatctattgaaagtttgatgaataattttcactctagcgaaaaaaagctaattcaaaaagaccaacaagtttacagagattgtgttggtcaaaatctattcataagtgatgttaagaagaccaaacttactcatctaattggatataagcatttggagaaagtaaacgccaatatgtaacaatgcatataagaatccagcgccaaaagtattcaaattctaatgtgtcctatgaaatgattctggtttggatccaagttttggaacaaaccaaaccgaattagccttgccatgtcagcatactccaatcaaacattgattggtctcttgtaatgttatgtgggtcccatcatatcaagatgcagtggcagacgcagtagaactcttgctgagtctcaattgtatccataaagataataaaatttgtatatttcctctttcctctgagattcctttgtctgatcgtgaacttgtagtagtgttttcgtgatagaaaattttcaaagttaatgtgcatacactagctagtgaagaagaagaagactaactaagaatggaaggaacttgttttctccgtggacaacctctcacaacaataccctctcttcccagcagaaaagggtttcttctccaaagatggaagaccaatcggattttcaggttttcaggttttaagaatcactcggtttctggaaagtcgaggtctttcgatcttagcctcagagcttcaggtactactaaaaagtttcaagctttttgattacactacttctgcatcttttggtttgactttgtttgcttttcgtgaaatgggactttgctcgaacgtgattcgcttcttctcttaacactttatctgtgtcttgtttttgctgatggtttctgcaatgttgtcgtttcccaagtctttaattctagtttcaaagttctcatcttttcaaccttttgatcagacaccagtagtctcattataatttttggcgcctgaagcgctagctttactgcaacatttctggtattgattatctggaattcatagatttttactcatttccctacttgttattgaacaaaggtcccattagagcaagctctgtagtaacagaagcaagccctaccaacttaaattccaaagaagaccttgtctttgtagccggtgctactggtaaagttggttctagaactgtgaggtcagtttcttgcttctttaagtttgaatgataattcacaatgctggttggttgaactgtcgaagtgtcctatcaatgtcgcctttcatacagagagctactgaagctgggatttcgggttagagctggagttcgaagtgctcagagagcaggaagtcttgtgcaagtatggcttactttgattctgaatatttgctataagtgtttcatcattttggtgatgtttatccgcaattgatactttgcagagtgttaaggaaatgaagctccagaacacagatgaaggaactcaacgtaagaacaaaatgttttgatttacttacaatgattttgttgtagaaaagtaacaggcagtgtctgtgtctttagcccagctgtagaaaagcttgaaattgtggagtgtgacttggagaagaaagattcaatacagcccgcattgggaaatgcatcggtgattatatgctgtattggtgctagcgagaaagagatctccgatattaccggtccttacaggatcgattacctagccaccaaaaaccttgttgatgctggtaagacaaaaatagcttaaagcggtttatttttccattctctctttcttgtttcatcattgcttcttgtggtattatgagcagcaacatcagcaaaagttaataacttcattttggtgacatccttggggacaaataaatttggatttcccgctgcgattctcaagtaagtctgtaatgtttttctttcattacacacttttggtcagaacagcccataaaacttaatggcatgttcttgttatatgacttcttctaaacacctcgtttgtgaagcctattctggggagttctttgctggaagagaaaagctgaagaagcattgattgaaagcggtcttaattacgcagtgagtagttcacaaaataaaataaaccaaacttacagtttcacagactctttcgattgtatcacatcttagaattgtctttccatcttatttcatcagatagttagacctggaggaatggagagaccgactgatgcatacaaagaaactcataatctcactcttgctctagacgatacattgtttggtggtcaggtctcaaatctccaggtaataatattttccctcgtctctgacagagtgatatgaccagattatgaagaagagctttaagattttgtggttttctgcttccttgttattgatctccaggttgcagagttgcttgcttgcatggcaaagaatcctcaactttctttctctaagattgtggaagtggttgctgaaacaactgcaccattaactccaattgaaaagcttcttgaaaagattccttccaaacggccttatgtccctccaccgaaggttagttacagtatattgctttcatctcctctcttttcgatcttgattatcgctctcttgtgataagatagtttatctttatttatctgcatttcggttgtggacaggcatcagttgcaaccaaagaggtcaaaccagtccctactaagcctgtcactcaagaaccaacagctcctaaagaggatgaagcacctccaaaagaaaaaaatgtgaaacctaggccgctgtctccttatgcctcgtaagaaaacttgtttctcaaccgcaaaaaaataatcaaatatgtaactaaaatgacctattggcatgacattgattgttttcgatttgtcttgtttctttttttttggtgaatgtgatatatatagctacgaagacttgaaacctccaacatctcctattccaaattcgaccacatcggtcagtcctgccaaatctaaggaggtagatgccactcaggttcctgttgaggccaatgtagtgccagtgccagatagtacctcaaatgtcccagtagtagaagtaaagcaagttgaggaaaagaaagagaggcctctttccccttatgcccggtaaaaccttattgtctttgcgactttattatattcaggagtcacagtttgagtaataaatatgtgagaaggtaatgatatcgaaagtttgatggtcttttacttggccgttttatgatgcagctatgagaacctaaaaccaccctcatcgccctctcctacagcttcgagtaccagaaagagtgattctttgtcgcctggtccaaccgattctgatactgataaaagctcaacagttgcaaaaactgtcactgagacggcagttgcaacaagtgtcactgagacctcagttgcaacaagtgtacctgagacagcagttgcaacaagtgtcaaagagacagcagcaccagccacatcaaaaatgaggcctctttctccttatgcaatgtaacaaatcttcctcttatgttatttagttcctctataaatatatcaaattctattgtggtccgatttttcctcaatgcatctacactgtcttttgcagttacgcagacctgaaaccaccaacctcaccaactcttgcatcaacaggtcccaaggaagcagcatctgtagaagacaactcagagttacctggaggcaataatgatgtgctgaaaacagttgatggaaatctgtaagtatcttgaagccagatttacaaagtgtgtgtagactttcgttaaggaatcgatcaatacaatatcccgggttttttgcttgttgttcaggaacacaattccaccttctacaccggaagcagtacctgttgttagcagtgcgatagacacttcccttgcttcaggagacaatacagctcagccaaagccaaggcctttatcaccttacacaatgtgagaatagagagaagcatgctagttctaagtgtgtccattgttattacttcttcttttgcgacctgaaagactgaaatgtttttgcaggtacgcggacatgaagcctccaacatcaccacttcc

SEQ ID NO: 34889 - DNA, 1950 bp, Arabidopsis thaliana landsberg
ggccgagagagattataggctaaaggtttagaacttccttataatttcaaccaaaaacgaaaaatatataaaaagcggataaccatataagaaaaacacaagtaaggaaattgaaattgaacttgtaactctgcttcttctctttgacctccaggaaccaggaccaaacttggaaaataggtacaatgcaaaggccaaggatcaaccacagaatccaattgggttttactgaccaacttatttccccccacaacatagatccaagcccgaccagtttcatcacaagaacaaatgacgagccttttatcatcaatgaagtaacttggctgagagttaaatttgggatgttctaaatccggcatggtaggaattgacacctccatgaaactcatccatttcacatccccaccataccgattatcaatcttgttctttgtcacccaaatcttaatcttctttgttacatgacactgcctcaacaacgaaaacctatcttccctaaaaaccctaagggcaagagcatcacgacgacggttcttcccgcttggtagatcacaaaacttgaagaattcttcttacgaaaaattgaagctaagtaagaagaacaacaagggataattgacatgagtcttgtgataatgagcaagccaatacaaacttccattcaacgataccacacttaagtttgttaagcgaatggtaacacttccctcagtaattcgtctactatattttgtcttttcaatctcttggtctatccacgtatcggaggcaaagtcatggattttccacgtatattgagagcctaagtctttcatataaaccgaaagtgttttgtaaacaatttcctcaactctcttattattatcataacctatgccattgaaacacaaactaggttggtttacctttggctttatccatttagcctgtcttaaccacgggttccaaaccacgatgccttctttttccatgccacatagcaagaacccattgcaatcaatcaaaattttaggtttaagttctaaaccgggaatatccaaacttaactcacgcacttctatctttggagtgatgcttaccgagtagaacttagattcggttgctaagatgaatcgaaatgtcatcttgtggttgttaatgaacatcttatcgtcgaagagggcgttccatttcttagaaacggttctgaagcgaacaagagattcaggagggacacgagagagtatctcttcaatcagttcacacggaagcttctccttattcgccattaattagtttgtgtaagactgtaagtcacaatctttttcatatatatagacgactctttaatgatagccttcttcctagggtttccaactgatttgttcacatataaatctccaagaataattctatatatacatttttgtaggggatttttgaagataatgttgaagatttgagccataattcaacaattaattcaaatgggtgggttttacccggttaaactctgttcggatagtggataacatgtttaattctgttctgatcttggataacattaatttttggaaaagttacctaaaaactaataattaaaaacgaaaattaatgatttagttaccaaatttaatataacaatatctctaaactaaccatatttcttatttaccttaactaatttcctaaaatatttctacctaatttacacataaatatataattcttctttcatttttatttgatcttatactttattcatttgaatttatataaaatatatatagttaataaaatattatattttttctgaatatgatgtaattcaatttttttaaaccggacatatattattcaacctatgaagaaataatatgtgtcaatgtcctaaatcgaaaagaaaaattggacaatggttcagaaccatattataaaggaccaaaatgattctgataacgaaggagc

SEQ ID NO: 34890 - DNA, 2285 bp, Arabidopsis thaliana landsberg
  unsure (1)..(2285): unsure at all n locations
gttttttcaacaccggttataaaatgtttaaccctgggagctgggattaagcacttgtttgataaagcccacatgcacaaattcttcagttaaatttttgactataatcactaaaaaaaaaagagagaacaatatcatccaaaaacttaccttatgttattagaatgtccaagggtttgaaatgctacaccaacaactttgtttcctatgcaaaccggaccaccactattgccagggttcattgctgcatctgtttgtattgccggtagattaatggcaccgtgagcataatccattgattctattctagacacaacaccttttgtaacggagatattctcaccacctgccattgaatattttgctaagaatgtattaattttctctaaaaccgagagagttttccaacttaagtgaagtaaaaatcgtctcaaaacacaaactggaaaactgaattattatatataacataatctaccaatcaaaaacataataaacttgtcaaattacctgttggatagccaataacatttactgattcttgcaaaaagggcatgtctccaagctccaaaggattcatatcttcccaaaactctttgctttcgatcaccaaaatagccaaatcacattcacgcccaatagctttaacttctgctttgtacttctttggtgagccacgctttatgactagcaccaatatgtgattagccaccacatgagcgtttgtaataatcatcttccccggaatcacaaaccctaaaatcaaagtaattaacataccaatatgtgactagctaccacatgagtatattatagccttatatacaccaaaacaaggcttgttgtacgtaatatatactaatggcatgcaccaaaacaaggcttgtacgtaatatacgaattgcatgcacatgctgatatatatacctgagcctttggattttttttgtggcttattttgccaaggataacaaatgttaggcttgctagaaaaagtgttgatcttcaccaccgaattcaacaccgactcagtagccaccgagtcaatcgttttctcaggagcaacagaagaagaggaaaaaagcgaaataaagaagcaaaatcgcttcaaattccggtgaaaattctgttggttcgtagtttttgtactaaattgccgcggccacgaactgacaagaacgacattatgagagaattgtcgagataccatttacttcattaggcattcttatagagagagagatatgtttttgtttccattcctatatatacttaatttcccttcattaattttacttaccatacttaacattcataccattttttttattttttaacttaccattactatggtttttggttaatgtaacgcttctcaataaggaaacttccttttgagttnnnnnnnnnnnnnnnnnnnnnnnnnagataaacctctacattcgattgttcagttcgatttggtttggtttaggatttactagaaaacaaaataatgaaataaaataattaattatcatatttatttgaaatatatttaattgtgatttttgtgtattgttagtaaaactattaaattttaatgaaatattttgtattcaaaatcggttcattctaatcggtagaaattttctctaccgggagagattcgaattccaggctgatgagtatcggtttggttcgaacatgtgttaatggttcattcaattgaattatttggattggttcggtttgttttaattggagattgttcggttcactcctagagattgtgtctcttgagtctaacagagagagacttggaagcagaacacaagggcttcaagagacgagatcgaggttcaatttttttggaattcaatacgatttgagtctaaatctacgcattggaacagagatccctttgtgtttttctacatcctcgcaaagtgaatgaaacaaagacttctctttttgttctctcatttcatcatctcctttgacacaaaggttacagctttaacttaaattgcatatacaaacatgatgaccttatctcaatctaagcgtgtgtttgccatgcatactgaattcttcgatcatttctcgcttttcggtttatttacaaagagactgatgtaatcatggataccggtgttgttttctttcactggcgatgaccttctggtaaagctaccactttgtggaaaggtactgttctttgaggcaatgctccgaaatccaaaacgtcgtcgaattcaagcaaatacctaatcagacaaacagtcttgttatataatatagat

SEQ ID NO: 34891 - DNA, 6001 bp, Arabidopsis thaliana landsberg
agttaacatgcgagcagctatcatgtggacggttagtacttttcctggtcttggaaatttatctggttgaaatacgtatacaacgttagcttgtccaagctgctgttatgatggcattggagaacgattacgacatagaaagaaaaactgttttattagtcatcgacgttttcttcctcgagatcatagctttcgtcaagacatgacacattttgacggaaaagtagaaacaagatcttcaccactcatattgacaggttctacaattattcatccactagaacaagttaatgttactcttggtaaaaaaatgaattagtttgagttgggagaaaaagaaagcgacgtgatgcaggaagatgtggtaatcaacaatgggaatttacaatggcgcgacataatctggtttcatgcacatagagaaaaatgtgttcgacaatctaatctacacaatgttggatgacaaaaaaaaatcaaaagataatctgagtgctagaaaagatcttcgtgagctaggtatacgtcctgacttgtggcctgatgataatgagaaatatcaagctgcatgtttttctctgaacaatcaagcgaaagacacttttttaagtgtcttccagaatgtaaaactcacggatggttatgcttctaatttatcaggttgtgttgatgtcaatggtcaaaagctatcaggcttaaaaagccaagattgtcatgtgataatgagagatttattttccgtcgcagttaagaatgcattgccaacagaagttgcatcagccattgtcgagctttgtcatttttctagggatatctctgcaaaggttctcgataacgatgagcttgatcaattacaagatcgtattgtttagacattatgtcgtatgaagatgctttttcctccatcatttttcactgtgttggtacatttagtagtacatctcacagtattggcaaaactcggtgggccagttctattttgttggatatatccgattgagtggcttttttttgtacattcttatgtttatatatttacacaactgaaacttactagattcaattatatacacatgatgttaggacacttcaaatgatatgttcgaaattgcgctaagcctgaaggttctatatgtgagcaatatttagctgatgagtgtgtaacattttgctcaatgtatctcgatgatatagagacacgatttactcggattggccgggttgatgatcgacctctagctgagactagcataaacccaaattcagaacttttacttttatttccaaaccttggaatagttgttggagcgggtaaagtttatactcttaatcatgtagagcggcaacaagcacatcgacatgtattggtcaactgccaactactagatcacctacgggagtaagttctcttattcaagaacaactaattttatttatgttttattgaaattcactaatgtagacgttatggttattgtatgtttaggaaatataaaaccgagttgttgaataaacaatctcatcaaagcaggaggaatcgtgttatcgatattgacagagaaatgcatcttagttttgcaaaatggatcaagtagaaagtaaagacaaaatgagttagatgagctaactgatgatatgatgcttagctctgggtccatctgaaaatgttttaaagtatacagcttatgatgtcaatgttttcaaattccggacaacaaaaagagaatcaaacctgaaaacacaaaatagtggtgtttttgtggctactgagactacgagctatgctagttctcgtgatcctaacccaagaaagggaactgtagcttactatcggaatctgatcaaagttatagagttaaactaccatgaagttttcaaagttgtaatattcaagtgtaagtgggcgggcactcttacagtaaaaggatataaaatagatgcatattgtaacaccctatcccgctattaaaatataaacaaaataggagcatcatgatagacgcccgcagtcggccaacccaggttttcgacacaaattcgtttgcccgagtcgtcaaaccgtaagtgtccagcctctcgaacatggcctaaggcttttcaacccgtattgcacacgagtgttgtgtaagtcagaaaagactaatatcagtcggtctaccatataaattttagaaatttgagtctttatacatatataccaaatcgcatatagttttcgcatcctctttgaaaaccatacatcatatgcttagtaagaattttacaaaaagctgtaaaacctacatcggttcgtcctaagtctcttgcgccctctacaaggctggtcaactaaggtttcctgcaaaataagtagcgtcataagtaatctagcattacttagtgaaccccgaatctagatagagttaacctaatacccttacccctaagcagaaatcaacacacaataatactacgagctaacaaaaataagtacgagttatacaagcaacgcacaatcaaagatgacacccaacacacaatgcaagcaaaatgtaatgcacaatgtataatgcatgcagactcaaattcctaatatgcagcggacaattaatgcaagcatgcttccgataacctaggtaaggaaaaaaacctccatacgacataaagttactaaaataatgtattgtaatttatctatctcatcggtatcaagcacctttgcagatatatctctcaaaaacgacaaagctcaacaattgttgatgtcatgtttgttggtaacatatttcaaatcgcaagtgaaaatagatttcttattattacatgaaaatcgtggctttttaagcatgatagctttcgaccattgacatcaacacaacttgataaattagaagcataatcatccggagttttacattctggaagacacttggaaaagtgtctttcgcttgattgttcaaagaaaaatatgttgcttgatatttctcattatcatcaggccacaagtcagaacgttatttcattcacgaagatcttttctagcactcaggggatggtttgatttttttttgtcatccaaaaatgtgtagactaaattgtcaaacacattttctctatgtgcatgacatccaaattatgccttatcataacaaactcccaataagacaactcaaacaatatactttttttcttccattgttgagtactactagtagaatcacttaccgaagcaccacttcgatctcttttttttccaactccaactacaccatggttcttaccaaaagtaatattaactttttctagttgatggatgactgtagaacctgacaatgtggtcggtggagatcttgtttctatctttccgtcaaaattaattttatcttggcgataaccatgatcttgaggaagaaaacgacgatgacccataaaacaatttttttttccatggcgtaaacgttctccgctgccatcaaaattacagcttggacaagccgcggtcgtatacgtattccaacccgacaaatttcccagaccgggaaaatcactaattgtccacatgatagctgctcgcatgtcgaatgtttgctttgtggaagcatctagcgttttaatcccaacaaaccacaattctttcaactctttgataagtggctgcaagtagacgtcgatatcattaccaggcatatgctttccaaggataaccatagagaggatcattgatgttttcttcattgccatccatggtggaaaattataaggaaatagtatcactggccatatgctataattaacactcatggtaccaaatgggttaaaaccgtcagttgctaaacctagtttaacatttcttgggtcatatgcatattcatgatatgttttgatcaaatgccttccaagcacttccatctcttggatgtcgaagattcccatcattattactaaaagttatgtgccatttcatatgggatacaatttttgatgacatgaataaacgttgaagtcggggctttagaggaaaataactcaaaaattgcaggagctttactcgttatgttctctgatcaagttcatgtactctttacttaagttgtttctttccaacgagaggcttcacaaactttgcatgtttctttttctgcatatgcctcccaaaataacatgcaattatttggacatgcatgaattgactcataagtcaatcctagtttgcgaataaatgttttcatgtctttaaatgaacctggcaatttggcatgcgtaaatgcttctttcagcaaatcaagtaccatagatatccccttgtcgctaataccacacatacatttgatattgtataacttcagtataaacgaaaacttcgtgaacttaatgcatcttgtatatagctcttgattaaaatcagcaagtaactcatcaaaatcttctcctttttcacaacttccacttgcagttgatggtctatcagtgttcatagggttctgagatgatccagcttcatatccactaatatatccctatttttaatgtttttaactatgttttaggtataggttttagagtctatttgttatttctagagtcttttatagtctttttcaggtctttacatgtttgggattcatttggagataatggagcattctggaggaaaacagagaatttatgctgctgaagaaatccggagacaaatatgtacgtaggtgtcgaacgacaccacccctggtgttgagcgacaccaatacctgacggcaatttcgaggcgcaacttattgatgttttgaagatttctaaattcggcccagaactttctgctatgtttaatgaaggctcatcacgtgttttagacatataattaggtttttagggtcattgtttagacctaagctttgggaggctattccctttttctattctatttttgggagcaaaacccaatggagactcccgttagagaagattcttcttaactatattcttctcttgttttattcattgatttcttattcaatcatgttttgttcttctatgatcatgcttgagtagttttcttgttaggttttggtttctcattagggatttagatgatttaatagattgcccccttgctaggttatctgttaggattcttcatctttaattgttcttaatgctagttcttgagtagctaactagaacttgaatccacacaataggtattcccatcataggtatctgtagttggatctattataggtgtgtaataagaatcggcctatctactaagttgaacaattgaactcgtttagaatgcatgtttaggttaaagatctctcggcttctccagttattctaacctataagcatagggagtttcgcagaacaccaccggttattccataattagagtttgagtttaaaaatggttcgataacaacctagctttcattagatctactaaccaatagtttcctgagaatatcctgttcctagcaatttatttaatcgtttacaacacaatcatgctactgttttcttactttgtgtacttattattttaatcatcacctgctagcttaatctcgacattcaactcactgtttgaacaaaagaactctgtgaattcgatccttaaatactgcaattgatctcttattttagggtagttctaggtaatttgaaccatatcaaatttagcgtcgttgccgaagttcttgggaatcattcattgagtttagtttagagattttgtctagcttttacttttattttgttactcacgctttttttgttttcttcttttctgtgtttcaggtgtatggctaggcaaacaaggagcacacaatagaaggagcttatcaacttgtctattttggacttgggaaaacttagagattagcaatggctgaaagagtcataggagctgatgaggatgggcaagcctacaatgaggctggtcaaagattggattatcatggaatcatcctacttgaggacgtcgatgcaaattaggcgcgcctcaacgcgcaaatagctgccagagatg

SEQ ID NO: 34892 - DNA, 4324 bp, Arabidopsis thaliana landsberg
taagttataagttaactttagtttcttttttgtaagaaaagcattttgattatctttaaaaattcttttttggttatagaggtggcttgttggatgattactggggaaagacaagctgcaaggataaggagtttgtatctgaaaacgattctaagacaagacattggattcttcgatgtcgaaacgagcaccggagaagttgttggtcgaatgtccggtgatactgttcttatactagaagctatgggtgagaaggtaaagaaacaaaaacagcaaaaaaataaaatgaataaactgaagttactaaagatttgaaactttctgcaggttgggaagtttatccagttgattgcaacattcttgggtggatttgttttagcgtttgtgaaaggatggttacttacacttgttatgttagtttcaattcctcttctagctatagctggtgcagctatgccgattatagttactagagcttcttctcgtgaacaagctgcttatgcaaaagcatcaactgttgttgaacaaactttcgggtctattcgaaccgtaaacatgctttatgttcccttttgtaaggttgatgttcatcaaaagtttgaaatttttttaaccaagtttttttctttttttttctttaggttgcttctttcacgggagagaagcaagcgatgaaaagctacagagaatttataaatttagcatatcgatcgagtgttgtgcaaggtttctctatggggttaggtcttggagtagtgttttttgtgttcttttgcagctatgctttagctatatggtttggtggagaaatgatacttaaaaaagggtatacaggtggggaagtggttaatgtaatggtcactgtggtcgcaagttcgatgtgagtaatatattcatattattctctgtagtctcaagacagttaaaacggtttaaaaaactgtgtttttttttctctttttataggtctttagggcaaacaacaccttgtctaaccgcatttgcggctggtaaagctgcagcttataagatgtttgaaacgattgaaagaaagccgttgattgatgcttttgatctaaatggtaaggtcttagaagatatccgaggcgaaattgagctgcgagatgtgtgttttagttaccctgcgagacctatggaagaggtttttggcggattctcgctgttgattccgagtggtgcaaccgctgctctggtaggggaaagcgggagtgggaaatctactgtgatcagtttgatagaaaggttttatgatccgagttccggcagtgtgcttattgatggtgttaacttaaaggagtttcagttgaaatggattaggggaaagattggattggttagtcaagaacctgttctgttttcttcaagtataatggagaatatcgggtacggaaaagagaacgcaacggttgaagagattcaagcagcggcaaagctagcaaatacggctaatttcatcgataagttgcctcgaggtttagagacattggtaggggaacatggaactcaactctcaggaggacagaaacagaggattgctatagcgagggcgatacttaaagatccgaggatcttgctgttagatgaagcgacgagcgcacttgatgcggaatctgaaagggtagtccaagaggctttagatagggtaatgatgagccggactactgtgattgttgcacatcggttaagcacagtgagaaatgctgatatgattgctgtgattcaccgtggcaagatagtggaagaaggtaagtaacatttctgcattttggttaggggtttgactcaactgcaaaaatttaattttttgtactcatctaataggttcacactcggagctactcaaggaccatgaaggggcttatgcacaacttatacggttacaaaagataaaaaaagaaccgaagagattggagagttcaaatgaattgcgagacagatcaatcaaccgtggatcatctagaaacatcagaacgagggtgcatgatgatgactctgtttccgttcttggtttacttggacgccaagaaaatactgaaatttctcgagaacaaagccgaaatgtgtcgataatccgaatcgctgctctaaacaagccggagactacaattcttatacttggaaccttattaggtgcagtgaacggcactatatttccgatttttggtatcctctttgcaaaagtaatcgaagctttcttcaaaccgcctcacgatatgaagagagattcaagattctggtcaatgatattcgtgcttcttggtgtagcttctttgatagtgtatccaatgcatacctacttgtttgctgtagctggagggagattaattcagaggataagagtaatgtgttttgagaaagttgttcacatggaggttgggtggttcgatgagcctgagaactcgagtggcaccataggatcaaggctctctgctgatgcagccttgatcaagactcttgtgggcgactcgctgtctttatctgttaagaacgctgcagccgcagtctccggactgattatagctttcacagcgagttggaaattggcggttattatcttagtaatgattcctttaattggaatcaatggttatcttcaaattaagttcattaaaggcttcactgcagacgcaaaggttggtcgcacattcctgttttcatttttttattgtggaatgagttttcaagggtttaaggcttacttgttgaagaagaaacttaaaatagttttgaaagaaaaaaatgtttgcaggcaaagtacgaggaggcgagtcaggtggcgaatgacgcggtggggagtataagaactgttgcgtctttttgtgcagaggagaaagtgatggagatgtataagaagcgatgtgaagatacgatcaaatctggtattaagcaagggttaatcagtggattagggtttggtctttcctttttaattctttactctgtctacggtgcttgtttctacgcgggtgctagattggttaaagccggaaaggcaaacttcaacgatgtttttcaggttttttcttcttcttgggaatctttgtaatgaaatcttgggacgaagaaaactaatgatcttttgcaggttttcttggcgttaaccatgacagcgattgggatatctcaagctagctcttttgctcctgattcgagtaaagcaaagggtgctgctgcttccattttcgggattattgatgggaaatcgatgatagattcgagagatgaatcgggactcgtgttagagaatgttaaaggagatatcgagctttgtcacataagcttcacctaccaaactagacctgacgttcaaatctttcgtgacctatgtttcgccattcgtgctggacaggtaacatgtccaaaagactactatcatttgtttttttggttatcttgatatttcccttacatattgacacaaataaagtgaggagacatgaaacttaccaattctgattttgatatacatgtttagtcctttaattctcttgcttatttcagacggttgctttggtcggagagagtggatcaggtaaatctacagtgatttctctgttacaaaggttttatgatccggattcgggtcatataactctagacagagttgagctcaagaagctgcaactaaaatgggtgagacaacaaatggggcttgtagggcaagagcctgtactgttcaacgacacaataagatccaacattgcctacggaaaaggcggtgatgaagcatccgaggctgagatcatagctgtcgcagagcttgctaatgcccacgggttcatatgtggtgtacaacaggtaaactacaagacttttattcacttttgaaaaacagagagattacttactatgcaagcaaaaaaactctttcttatttcaatttagggttatgatacggtggtgggagaaagagggatacaattgtcaggaggacagaagcaacgcgtggcaattgcacgcgccatcgtgaaagaaccgaagattctgttactcgacgaagcaacgagcgcgttggacgcagaatcggagcgggtggttcaagacgcgcttgaccgagtgatggtgaaccggaccacagtagtagtggctcacaggctttccacgatcaagaatgctgacgtcatagccgtggtcaagaacggtgtgatcgtagagaaagggacgcacgaaacgttgatcaatatcgaaggtggtgtttatgcttcgcttgttcaacttcacattagtgcttctagttgacaaacaattggtttcctaagttctctcaaaatatattttgagcttaaggtatttttttatacta

SEQ ID NO: 34893 - DNA, 5201 bp, Arabidopsis thaliana landsberg
  unsure (1)..(5201): unsure at all n locations
cataagagtattaacactatccttgtatctttctggactttgtgtgctactctgtgacacagtcaagggaatcaggtatgggccatgtggtgctccagcagataccaaagccatccaaatcaatctctgttaaccaataaaaaaagttacatgagactttatcattaacaacatgaatcttcaaatttgacataccttgtaaagtacgtaagcgttattgtccttcatcgtctcagcaatatctaaagctgtaaagccttcattgttgagtgctctgaggttaatcccatcgttccatgtaagcatattcacaactatcgggtatctgtgtttagtggctaggtgtaacggtgtattcccattgatatcttgttcattcatcattcttttcccttcatcaagttttaaaagatacttgacaactttcgacttaccagctatggcagcaacgtgaaagatattctgacattgattgttaagtagctctcttgagtcaggacagtgtttaagaaactccttaatgattctgacatgtccttcctttgccgccatatgaataggagtgaagccatcatcatcagcgacataacaaaggcttgaagctgctttgtcaaactctgctagtatatagcgaattccctcataacatcccattgatgctccataggaaagacatgtccttccttcttcgttgcgtaattcaataagtcctggatcttgtctaagaacaatacctaggatatctgtcaaagcaatgaccaagaaataattaaaacatataaagaacacttggcgtacaaggttgaacaaacatagaaacattcctattctattggccttcattgctgcatgtgtaacagattttccactgaacatcgaagctagtatagatggggaagatgaagattcaagcattttaagcacgagctcgtgatatccagcttctacagccatgtataatggagatgcttcatcattgttcttatcaaatgatacatcatgcttcacacttactaggcagaaagccacctctacatgttttcctttcaacgcggcatgtagtgcagtatctccgttcttgcttttagcggcaataaacgcatcataggaagaagactctgtaatgaatcgaacaagaatctcaacaatattgagactgcctgctctggctgcaacatgaagagttgtctcacccatcagattcacattttgtagaagatttgggaatgtagagattataaactccactatatggacatgacccaaagcagcagcaatatgaagtattgaattcccttgattgtctacgagtcgttgagtgacctttacgtcatcgtttatccttttcaggagggagactttgtcacctgctcttacagcacacaaaatcgctggattcataatctcagattcatccttgtctttgaaaatagtccactgatctggatctgaaagggagccagatgtggacgaggagcttactgtttcagatttactgtcacacttcatactcttgttcagtgctactttcactttaaaatctcctgatcaaaaagaataagtaagatttgataatcctaaaacttcaggaatattagacgacataaacatccacctaaataactttaaattaatgcagcataagaaaaagtgagaattacttgaagcagagagacagattcgaacagagagagaatctatgcgcagtactgggtagattgaattacttcttaggttatgtagagatataaatgtgagagatatattctcttgatgacgtgaagaggattagcgtcgcttttattctagttctaaacaacatccgtaaggttcaaaagatcaaacttttatcatcacaaggttttgtaagtttgtgtgtaatgctttgaccttgtctcagttacgcaatgttattcaatgttttcggtaatccgacattagaacagtatccttaaggttcttctaaagatcagacctttttgtcatcacaaagttttgtaagtttgtgcgtgtaaatgctctgaccttatctcagttttgcaattgtattcaatgttgttagttagagattagaattttagcccctacgaccaggcctcttcaaagttctaaccgtgtaaattggtaacaataataaaatgttttcgtagacttcaaattctgaaaacctgagacatcatattatcatacaagtctagatgaacagtgatgagtagataggtaaaaggtagagagtcgagagatacagagaaaagagaacagtgactagtagttcattacaagaatttgtatgatgctggttgctaaagtgtctttagagacagcaccgatgattgtatccttcttctcaccattgacaaagatcatgatagttgggatgcttctaacaccatactggccaggggttgcaggagactcatcagtgttaagtttgtagaacttgaactggccggccgtacttttgcgcgagttcgttgacaatgggatcaatcattttgcagggtccacaccatggtgcccaaaagtcgacaaacacaggctcatcagccttgagaactagagagtcccatgttgaatcgttgaccactggaactgcatggatcatatagcaaaaaaaaaccaagattaatgactcaccatgagtgtagaattatgaatgaagggataacaaatccaacaaacaagcatcttgagtttctatagatagatacttagagatcctaatacatatgtgcataaataacatgacaaagaggttcaaatccgaagaaacctttttctagttgtcttccaatttcactacttgaacatggaagtcatttcatagacactaagagagagccccattagagttaacccataagaattcccagaaacaaaacgcataatcgagaaatagcattgatttacaaagacgagagaacatacttcctgtagcagtgtcctgagcttcacagataacgcctcgtcgtaatcgggaaaccctagaattcttcgagagtgaagatagagaaacgcgagtcctcaatccgctcgattccggcaacacagagaacatctgtcgagtagagaaggaacccgtcggcgaggaagcgattctcatctctgaccggatagaaatcggcggacggatagtacacgtgtaagcagccattgttgtgtagcgagataagagatagatagaagcaatctacacgcgcgatagattcgatttcttcttgagtcccgaatgtaataatatccaagcgaagaagatatcaaaaacaaaacccacgaaaatgagagataggagaagattaagaggagtgactgattttttaggaatccttttttctttagagctactattgtttaattttatccgattaaataaattccctattattcaagctctaagactattgggccgcagtttcattaaagcccattaatatttctcgttttgggaaaaacaaaaaattatcgaaccaattaacttgaagtgtatcaatcaaggttaaagctcactgggccttagtttcattaaagcccaatagtattcacttaccccgtaaaattaaattattattcctcgagaagcccaaacagtaaaaacgatgcgttgtatcgctggagcatccgtagccgatttctctccgtcgctactgtttcaccgccgtaatctcgtagctgttggccagagattgcttatgacttcctcgattttgcgttctcatacgagggaattcgacgtttgcgatgaaggaatcatctcggtagaggagtggcggaaatggggtccggtgtctccatttccatccgcggtcaaacagattgtggatgatttgaaagttctggagtgcaaattggattctccgatagattttggtggtaatggtggcaagttacaggtaaatgccgatgactatcatgataatgaaacctcgttgcttgtttcctttcaatcgttttatgcttggattgtttagtgctttctattggataactatgaatctggttttgtaatttttgtgttcaaactagtaacctaagttagatatttgagctatggttacgtatgtggtgctatgtgccagtggtttctgacttgatgttttgagctcttaaatgttatagtgaggttataatacttctacttgtgtgacaactatcacagggaccgtttggtgcatacgaagataagaagcatagggctacatatgaagcattagatgacccggagaaaaagtttcgttttttttctgctcgacaggttgcttgtcggctgcttgggagcaggggttatttatgccagaaggtacttcatttactcttcttgaattgttgtattttgccatgaataaacaactcaatacctaaagatgaaacatttctgaatatgcagtgttggcttgctatggaggattgcatgtgttcatatgttaagccatgtggtttatggaaacggatacgtttttggctgtatatgcatcctagggttagtattgtacccactagttttagctattccaatcgccaattcctatgtattgatatgctgtttagctgttggcaggattttctacgccagaacaacacagggaagctgttgtggcagatatttggcgtccaatcagctacactctgcgtctttggaatagctgaagacgaagagatcatgtggaatgaattcaagcgtgcaggttgttgattcttctaagtcttagtgtagatgcatttgtttaatcttacatagatgtcactccatgattttgctaaaaatcttgtctttttgttctgatggatgctcaggaaaaagccaagtccgttgcctctatcccaaccacaactcggaagtaactttctcggttaaagacgcttttggtagttcggcttcagagaatcatgtatcatccacggtaaagattgcaatgttttgactatggactctctgttcttctatcgtcacttatttcaaacagaaaaatattagataaggttgtggaaggatatagagtgaaactctacactttctatatttcccagacagatgaggataaaactctgcatttcattttgcttgatggcacgtggaacaattctgctgcaatgctcaagcgtttaaaggnnnnnnnnnnnnnnnnnnnnnnngcctttcatcttttccccctttctataaagaacaaaacgaaaatatgcttaaactctaaactcatctgtag

SEQ ID NO: 34894 - DNA, 2082 bp, Arabidopsis thaliana landsberg
gtttaaaagcccagcatcgaaactaatgaaggatttcctgaccttccccattatcctgttgacgcgcgacctcggtgacgtctttccaggtacgacgacgagctcggaagatcgcctctataactccttggaactcgacgggaaaatccggactaggcctgtatcgatctgcaacaagaaaaagctatgagaatctagtcgggatcgacatatctttaccctatctatttaaaagaaatttaccaggaaactccgtccacatccttttcctccccgagaacggacgctcatacgactcgaggtcgaccctgacgtagaagtaatattcttcccagttcttgaagttactgattttaggaccgggaagaaagttatgctttgggcggttgttcaccacccaatagccgggcgaccttatagctttcaacgtcgtcatttcttcgaaacaacggacgtttactaggtaaccttcttcagcaccgaaggtcagagcggcaacaaaattacagatcgccgccggagtaagctgggagaacgccatacgacgacgattcagaaaggagatgatcagagacggaatgtgaaaccaggagtgacattgtctgaagtaggcttcatacatgcagacgtaccctcgagggggattccatggacgctcattttctccgggaatcatgtaagtgagcgggcgatctccggagccacacaaggcaaatacttccgcgactgactcagttgttgaaagggtctttttcgcggtgatctcggtgttccagctaaccactgggtcgaggtcaaattcaacatgatcctcatgaagtaatcgcgcattaacttcagcctctgtatactgcggctgcgtgttataagcatcctccaggtcgatgagtgggtcgaactgagctaagaaatccaccggatcttcaggagcagcgagatgtccaccggaaccttcccgatctggctcatcaagcaacgtcggaatctcgatccggttagatcgactagactgagcttcgttacttggattcccggttaaccgagagtttcggcgaactaatgatacttcgctctcggaggaagaagaggacggagagacaagaacaaccttacccattgccggaaaaatcgataaagaatcgagagtacaaaataattcgcagaggagagagcgagagctaccttagattcttcttgcaagcggcggaaaatgatttcccgagggtttaatctaatataaatagaggcgattgggcgacaaacctacgaggtcatcattaaacctacgagacgcttcggttcctgagcttcacgcgcgcgtacagacgcggcgatttgacacgtgtcagatacgttcgaaatacgaatcgattcggaaatgatcactttgtactgaacctcgctttactgtcatctggctcaaaagggtttctcattctcaatctcaagccctctaactttcttctcagtgataacgacaaggccatcctcggggatgttgggatcccttatctccttcttagtatccctttaccaagttctgatatgacagagagacttggaactccaaactatatggcaccagaacagtggcaaccggatgtcagaggtcccatgtcctttgagactgattcttggggatttggttgcagcattgttgaaatgctgactggtgtacaaccttggtctgggagatctgccgatgaaatatatgatttggtggtgagaaagcaagaaaagcttagtatccccagtagcataccgcctcctctcgagaacctacttcggggttgctttatgtatgatcttcgaagccgaccttcgatgactgacatcttactcgtcttaaagaggtaaatcatatcttgacaccgttatatattcagtttgaacaagatcgatttagaagtgtttatatttcattatgtatgggcatagtatcttcggaaaatcccatagtttttatagtttcgtgtctgatgttttaatatttttttggaatccaatttctttattcttgatggaaattttaattggctacctttaattgtgatattgactggaaccgattttgcagcttgc

SEQ ID NO: 34895 - DNA, 5108 bp, Arabidopsis thaliana landsberg
gtagtgcccgtaactcttctgaagggttttttgaatgtttaataagtcatatgagcatttaaccaataaaattaaattaaagtaatcagcctgcattatagctcatgaaaggattgtctgttttgtgattcgtgttatgcgctcagaaatcgtgacagcgtgttttgcaaacgaatcaatggttgatccatatgctttcagcattcttgccaatcgacatcgttttcgtcttgttctgcttcttctgcttccacattcaagtccaccttgtagtttccatttgctgcatattaagaaagtaaccaagatgagcatcacatgtacaccgaatgagacctaaactaatctcagttaaactatgagcatgtcttaacaagtatgtatcttcttgttgaaactctgaaatctcaaaacattcaaagaaaactgttcttcttctgaaatactctgcttcggttttatacttggaaaaaactaaacgaggttccttctaactaactaacgtgttgttgacttgtttcatataggaaacaaagtaataatagtaaactaaaactgacctgcaacagaagcttcttcttcttcttcctcttcacgtttggacttcataccaacctgacgatctgaggatgaaagtgcccattcaatggtcagtgttactttgcctgcggttcttgctgattcagcttttcagcaagctcttgctcctccagtagagccgcgtagtaagctctaaaatactcatcctgaagaaaatcgagaatactatactcaaacttatggaagcaaaacccacaaagatactactgtgggaatctccccaaaaggcattaccttcaaattcctatcatcatcaccattctccatagatgagccaccatcatcagcctttgcttcatgtcttatttctcctctttgttcatcggacagattcattcctttcttgatcaaccatgaaggcgtgagtttccttctagaagaatctccaacttcatcagatttgacatcttcgttttcttcaccaaggttaacctcaatctaaccatgcaacatttaaagaaatcaacaaaccacacaataaaaaaagcaagaatgcagggagagctttgattcatctatagtgtaactaacgattacctctgtctctccgagaaatggcatcggtgttgaaccatacccaccctgtggcctcaaagtatcatcagggttaaggtcaccattttcacgagcagccttagctacacgagtctcccatgccggaaaagattcaaagctaggaaccggtaggtcttttattctgtttatatgatccatcagaggtttcagtcgaacctccatattctgaagcaaatcttttagatgatcccgccgactccttggattgtcacttccatctactactacttcttcggaagttagcttgttacattccataacaagttcaccatcgcaattttcacaatgaaaaaaaatcctcttccatagagagttatctcagagcatccagtgcattatatctacaccagaatgtaataagaatctatttaggataagttaacataacacaactcatgaatataaggatattataacataaagagtagtggtctttacttccttttgcagttagggcagccatactcctgaacgttatctttatcttctagtacatctttgaattctttcttcatccggtgcagtttgtaacgaataacatcatatatctataagagagaacaagttctatagagttttgtctcgtgtgataagaaaagcaaaacatcaaactataaacaaaacaaaagtattagggacatacctgtgaataatcaagacagcaatacgagtacatgtggaccttaactttgtcctctcctcggccgttagttgtagcactcgacttctattgaaaagtattgagaatcaataaaagagcagagtaaagaaagaagtgtttagagatatctgcacagacctctttcctgtgaacacgcatgataaattgttgttcttcaaagtatcttaatatcgtacgaagttgcttggtgtttaacttcaactcttttgccaagtcttcttctcgaacccattgccgcctagcaaacatagatatgaaagtcagtaaataaatataagccaaacaatggactcaaaaaagttgtatgaatctactgtgacaacttaagatgtaatcaaaattcacctaatagaattttgaggatagaaactgaagatgtgcacacaaaccttgtaagcgcgtccagcaccaaaacggcaattcctccgctgccattttttgcagatttcttctgattattgtttttcggagtataattatcatagaaagttttcgctacaagcttcaccatcctgaaaattgatgcaaagcaaacatatgaaatgcaaaaacgattgataaaggcattgcttgaacatagattttggtagaaaaaatgtatcgctatggatagaaacaaaaaagttgtattgtatagagaattacttgataaatggctggcgcacaaccacaggacctggtttttccatggactacaagccaaagtttgtattaggtttgcgtttgatacaaactctacattgatatagaagactacttttttcatagagattgaaaacagagcaatcacaggattcaagccaagaataagaaaactagaaacgaaagaaaaccagttgtgaaacttgaacaaagcaaacagcaagagcaaaaggtattgcaaattggccaatatgctatatacaccattcaatattgtctcacaaatatattaaaggttcatcagtatattaaggttcttgtgttcacaagggaccacgaaattagggtttttacgttcagagctatgaactcaactcgacgtaacgcttagaaccaacaattgtaggtcaaattcttagtttaatcatatctctttactttgataagtctagtatcagttccaaaggaaaacctcgacggctcgacgaagtttatcggagagacaacgagtggatctctcttctaatgtttttaacgagtgtctttgtttatttgtagctttttccaaggtcaaagaagcaattgtacagatttttttggatcaaactggtgatttgaacgtgcttgtgtaatgggtctttaaaactaagttagaccatgtacataggagaatttttgtgggtatcataagcctaaaaatattaaattaatagataaagcaacagatttggatttgagaagtatcactggagtgatatttaaaataccagtctctaatgacgtggcggcttgtaattagtcggaaaaacgcgtttttgtggaaaatgagagaaaaaaaaattatttgctctcgactatcgctccagtagccgatgctagcatgtaatttcgattttacaaataaattttgttttttgatgataccaatactggtcttaccactggaaagagattattatgagtatcataaaaaatctcaaacaataaacaagcattaaaattaataataaaaaattgttgatgatactctatgagtaccaactatgtgcatgctctaacaagtttacacaaaaaggattcaacttttaaagtaaatatagataagaggctttataaccttgagaatggctggtgaaaccgagttaggccctctagatgagaatgcagcaaccttagtcgttgcaggctgaccagttagtgttgtggccgcactaattctcacagtgggagatctgttggtttgacggatcaataatgtatatattccagaaatgtatatgaacttatataagtatgtaacagagtgttttggcatcaagatagagagacctggtagtacgtatgtattgtaaaatgtgagttccaatctcataatctgtgaaaatgtaagaattgtctggggcaggacgatcatcaggctttttggctaagatgactgctactacacctttccctgcaattgaagaaggatgagtactatcgaaaacaagaactgttttccccttcacatcaacatcatcatccaagaaagctaaacccgttgaaatttccggtccagtgaacagagattcagcctaaaaacgaacgaacaaaaaacaacaagttaatttgagcttttggtagcaaaaacaataaggttgaactttgaactattttctcaaagttatttttggtatcaaacgtacgaagaaagtttggttattcccaagtgtgatctttgtaggaaaagaccggtcaagagtagttgcagcaacagtcaagagccatggagcaacattgcaaatagtctgagcaccagacccatcatttcccgccgcagctacaactgtaatccctttagccaccgcatgaaaagccgcgataaagtcgaccctctcggaatcctcgggaatactcgccccaatagaaaccgacaaaacatctacctgatcatgtatagcatcatcataagccttccacatatcagcagatgagcatataccgccccatcccactacattccaacatgccttgtacgaggctatgcgggcccgaggggtccacctcggaccgtacctgataagaatccacatccgttaagaaaaataaataatgtcttataaaaccggtaccttgactcttaagttaacctttttagtgaataaaatccataaggtttttgctatatcactacctcgtgctagaccataaaagcttgcgttgggaacaaatgagccaccggctattgtggctgtatgcgtgccgtgaccaattgcatctctgttggatttgaaatcttggatgattgttctgttgaatttccctccagtctcggcgagtagaccgcttagatagtactttgctcctattagcttgttgttgcaatgtattttggcgttaaactgttctcctgattcacattttcctctccaacgctgaggtattggtccaagaccatgatcgttgaagacctttgactccggccatattcctgcatagatatacatacatacatgatgtgaatcaaggagaaagatagagatagagttatatttagagagcgagagaaagaccggtatcaacgacgccgatgatcccttccctgcccatgttggtttcatgaagtata

SEQ ID NO: 34896 - DNA, 9090 bp, Arabidopsis thaliana landsberg
  unsure (1)..(9090): unsure at all n locations
tgctctcctagacctaataaactcaagtgttcatgctaagacaagcttgttttgctacttccgtccgaaaaaaaataaacttgaagtgtaagccctaacaagcaggaattagtattgagttttgaccaaagaaaagaaagattctttagctaagttcatagctttacttggtaagctccatgctgattctttagctctatagaaaacagaacatgtctcttgtgttaaaagtttggtcaaagttgatttcagaaaaagtctctgcgacaatatctccgagctttgtcaaaaatgttgaggcaactgaggcaactgaggcaatttttgggaaaatttccttctttaattaaagtttacaaagagtcaaatagtttaatacatacatgtactacagtataagtacaagcacacaaatggttagtcatttttatagatttagttttcatcatagtagttctgtaggatttgcgttctcacagacaaaggaatggtgacattgtgcagagagtcactccatgtcaagcttccaaagtagtaacctgtattgattttgtgtgtggttgagactttaaccttaaaatagacttttttggtcgtagagttgaacactagcgtctccggtgtcacggtcacttgaaaacccgaaggtggctcgaccgttactctatagactgagttgagaggtccaacgttagtgagggttcttgtgacagtcacttcttctttgaggtttgggattgtgatggaaggcaagttgaaatcaagaacagatggtctcggatttgaacagactgttgttttaccgataagctgagagattgatgtctcgttgtaaccaacagagcacatgtagagaacatagtcttcgaggcccatgtcatatacaagacctggatatgcagctttctctggatttacaaggcctccaccatagtcgaacggatcagctagcttccgaggtgacccttctgcaaatatctgctctctaaatggatctgttctccaagctacatagagtaaataaaacaattaagatcagtatgtttttgtttttttttagcattgtataaagaaggtaagaacctgtggtgacaatggctgatctaatggcagcaggagaccaatcacggtgcagagctttgagaagagcaacaactcctgaaatggtaggagctgccattgatgtccctgacaagaaaatgaatcctcggtcgttgaaagttttattggtagttgtagccgctaatatgctcactcctggtgctgctatatccggctgcatttgtgacaataccatgagattacacacatcttgtagcaaaataatgtaatatgtctgaaaaacagaacaacaaaaaaccagaacatactttgaggatggcaggctcaattgaattaggtcctctttgtaagtgacaagacacaagcccagtcagcccaatcacaagcccaacaaaacaatgtccaagtcaagagttcctctcaacatcacggtcagacaaaacagagtttgcagaatttgcagaagaagcagagtcaaccagctgactctccgaccatcgtactatgtaaccgtttcagtcctatcacatcagaagaagagagtggctagatgattgacaagtgtaaccagatccttgactgcaaataaggatccagaaggttctttttgtagtataagtataagctctttgtattcatcgtgggtttgggagagtgttaatgaaaagtattattcagtaagaaaaccctcttcttcttttattcacatggtatcagagcctctaaaaccctaaccggtgctgtcatggctgagacttctggaccttacccctttccttccactcttcacgtcgctagctccgtcacaatcaagctaagcgacagtaactatcttctctggaaaacccagtttgagtcacttcttcgatgtcaaaagcttctcggttttgttaatggttcagtccctaaaccaccgacggttcttgttaccactgtcaacaatctcgccgtcgaaactccaaacccggagtatgaagcttggatctgtacggacgagctcatcaaatcttggatctttggtactctcactgaagaagtgctcggtcttgttcatgctctgtctacatctcatgatgtttggatgtctcttgctgaaaacttcaacaaaagctctgtcgctcgagaatttgatctccgtcgccggcttcaacttctgaacattaaaggtaagaactttaccacctactgccgtgagtttcgagccgtctgtgacagcttgagttccattggaaaaccagttgatgagcatatgaagatatttacctttcttaatgggttgggccgtgaatatgacccaataactacagtccttcaaagctctatgtctcgtattccatctcccacctttaacgatgtcgttttggaggtctctggttttgattcgaagttgcagtcgtatgagacttcttccgatgtatcgcctcatcttgcttttcaaactcaaaaaggcggttactttggctctggtcagagaggtcgtggtagcaatcgagggcgaggaggctactcaactcgtggtagaggcttctctcaacaagtaaactcctctggctggaatccaaatcaatcgggtaactcctctaactctcgacccgtgtgtcaaatctgtggtcgtactggccatgttgctcttaaatgctggaatcggtttgataactcttatcaaagtgaagatgttccccaagctctcgctgcacttcatgtctcagatactagtggtcgagaatggctcactgattctggctctactgcccacatcactccaaccacgacttctcttcagactgcgactccatataatggacctgagaatgtaatggttgcagatggaagcttccaacccattactcacgttggttctactactctcacaacctccacaggtagtgttcctcttaatgatgttctagtgtgtccgaccatggagaaatctcttttatcggtctcaaaactgtgtgacgactatccttgtggggtcttctttgatgctaatgctgtgtatgttattgatttacaaactcagaaggttgtgacaaagggaccacgtcgtgaagggctctatgtgttgaagaatttggggtttacagctttctattctaaccggcaagttgcagcaagtgatttggtttggcatcaacggctcggtcatgcaaacttccagattcttcaacttttacaaaacagcaaggcaattctagttaataagagcagcactacttccgtttgtgaaccttgccaaatgggaaagagcactaagcttccgttttcttcttctatttctagtgttaaggaaccattagatcgtttacattgtgatctatggggtccatctccggttgtatcggttcaaggtttcaaatattatgcagttattgtggatgatttctctcgttattcatggatatttcctctcaagtccaagtcagatttttgtgatgtgtttatggtttttcaaaaacaagtcgagaatcagtttagtaagaagattaaagtttttcaaagtgatggtggtggtgagtttatcagtactcggttcaaaactcacttacaaggtcatgggattcaacatctaatctcttgcccatcaacaccacaacagaacgggattgcggaaagaaaacatcgtcatctaactgagcttgggttgtcgatgatgtttcaaagtaaaaccccattaaaattctgggttgacgctttttactcagctaatttcattagtaatttgcttccaactcctgcgcttaaccagaaaagtccacatgaacttctgcttaagattaaacccgactactccttccttagagtgtttggtgctgcgtgttatccttgtctccgctctttcactcaacacaagtttgaaccacgctctcttcaatgtgtttttcttggctatcatccacaatacaaaggttatcgttgtctctatcctcccaccggccgagtttatataagccgccatgtgatctttgatgagaattgctttccattcacggatagatatcgagatttggtgccgagtcataaaactgggactcttggtgcctggcaatctgctgatgcttcgagaccaccttgtgtgttgcctactctacctccgcatatcaccaatgctcccaatgattcacaatggcttgaatatgtggtggaatttcctcaaggagacaatgaatgtacagaaacgagtatatatactgaacacggttccccaccttcatcctcaacggatccttctacggtgaccactgaagagattggctctccggctccggttcaaactgacgattctcccaccacagcccaatctctccatccaatgacaactcggtctcgagatggtattcgcaaaccaaatccgaggtatgctcttgtggctagtaaaacaattccatctctccctaaaactgttgcagaagcactcaaacatccgggttggcgtcaagctatgttagaggaacttaattccatatatgagagtcagacttggaatttggttcctgctacttccgagatgaatatattaggttgcagatgggtttttacagtcaagttaaatgctgatgggacagtcaataagctgaaagctcgtcttgtggctaagggtttcaatcaagaagctggtgtggactttactgagacctacagtcctgttgtaaggacttctacaattcgaattgttcttaccgttgcaacagcaaagagttggcatataactcaacttgatgtgaagaatgcttttcttcacggtgacttacaagagaatgtgtatatgattcagcctcctggctttgaagatatcaacaaaccgacacatgtttgttctctaaaaaaggctctctatggcttaaaacaagctccgcgtgcatggttcgacaaattcagcaattatcttctggaatttgggtttgtgtgtagcaaggctgatccgtctctgttcacttaccatcacaatagcgataccttggtcttgctcctttatgtggatgatattctactcacaggttcaaatcccacactctttaagtctttgattgctgaccttaatactcgttttgcaatgaaagatttgggtgacatacactatttcttggggattcaagcacaagctcatcaccagggattatttcttcatcaaaccaagtacactgaagaaattctccaccatgccaatatgacaacttgtaacccggttcacactcccttgccacttcgccttgatcatgtgtttcaagatactaagccattctctgagccgtcttactttcggagtcttgcgggaaaacttcaatacttaaccatcactcgtcctgacattcaatttgcggtcaattttatatgtcaacggatgcatgctcctactgaatctgactttggtcttctcaaacggattcttagatatcttcgtggcacatctaccatgggtttacacttgtacaagaacaacaatctctctcttgtttcctatagtgacagtgattacgcgggctgtaaggatactcgccgttctacttctggtttttgtgttttgttgggatctaatgttgtgtcttggtctgcaaaacgacaaccgacagtttctcgatcttcaacggaagcagaatatcgtgctcttgcctccaccgcttctgaactcacttggactgcctctgttcttcgtgacttaggcatcacacaatctcgggctgctatccttcgctgtgataatctatccgcagttcatctctctgcaaatccggttcttcataatcgttccaaacacttcgatgttgactatcactatgttcgtgagagagttgcacttggtgttcttgagattcaacacattccggctgtcttgcaacttgctgacactttcaccaagtctcttccacgacaatcctttcaacagttaagacacaaactgaatgttcgacttcctcccacactcagtttgagggggaatgtaagtgacaagacacaagcccagtcagcccaatcacaagcccaacaaaacaatgtccaagtcaagagttcctctcaacatcacggtcagacaaaacagagtttgcagaatttgcagaagaagcagagtcaaccagctgactctccgaccatcgtactatgtaaccgtttcagtcctatcacatcagaagaagagagtggctagatgattgacaagtgtaaccagatccttgactgcaaataaggatccagaaggttctttttgtagtataagtataagctctttgtattcatcgtgggtttgggagagtgttaatgaaaagtatnnnnnnnnnnnnnnnnnnnnnnnnnnnnnnnnnnnnnnnnnnnnnnnnnnnctaaaaccctaaccggtgctgtcatggctgagacttctggaccttacccctttccttccactcttcacgtcgctagctccgtcacaatcaagctaagcgacagtaactatcttctctggaaaacccagtttgagtcacttcttcgatgtcaaaagcttctcggttttgttaatggttcagtccctaaaccaccgacggttcttgttaccactgtcaacaatctcgccgtcgaaactccaaacccggagtatgaagcttggatctgtacggacgagctcatcaaatcttggatctttggtactctcactgaagaagtgctcggtcttgttcatgctctgtctacatctcatgatgtttggatgtctcttgctgaaaacttcaacaaaagctctgtcgctcgagaatttgatctccgtcgccggcttcaacttctgaacattaaaggtaagaactttaccacctactgccgtgagtttcgagccgtctgtgacagcttgagttccattggaaaaccagttgatgagcatatgaagatatttacctttcttaatgggttgggccgtgaatatgacccaataactacagtccttcaaagctctatgtctcgtattccatctcccacctttaacgatgtcgttttggaggtctctggttttgattcgaagttgcagtcgtatgagacttcttccgatgtatcgcctcatcttgcttttcaaactcaaaaaggcggttactttggctctggtcagagaggtcgtggtagcaatcgagggcgaggaggctactcaactcgtggtagaggcttctctcaacaagtaaactcctctggctggaatccaaatcaatcgggtaactcctctaactctcgacccgtgtgtcaaatctgtggtcgtactggccatgttgctcttaaatgctggaatcggtttgataactcttatcaaagtgaagatgttccccaagctctcgctgcacttcatgtctcagatactagtggtcgagaatggctcactgattctggctctactgcccacatcactccaaccacgacttctcttcagactgcgactccatataatggacctgagaatgtaatggttgcagatggaagcttccaacccattactcacgttggttctactactctcacaacctccacaggtagtgttcctcttaatgatgttctagtgtgtccgaccatggagaaatctcttttatcggtctcaaaactgtgtgacgactatccttgtggggtcttctttgatgctaatgctgtgtatgttattgatttacaaactcagaaggttgtgacaaagggaccacgtcgtgaagggctctatgtgttgaagaatttggggtttacagctttctattctaaccggcaagttgcagcaagtgatttggtttggcatcaacggctcgnnnnnnnnnnnnnnnnnnntcttcaacttttacaaaacagcaaggcaattctagttaataagagcagcactacttccgtttgtgaaccttgccaaatgggaaagagcactaagcttccgttttcttcttctatttctagtgttaaggaaccattagatcgtttacattgtgatctatggggtccatctccggttgtatcggttcaaggtttcaaatattatgcagttattgtggatgatttctctcgttattcatggatatttcctctcaagtccaagtcagatttttgtgatgtgtttatggtttttcaaaaacaagtcgagaatcagtttagtaagaagattaaagtttttcaaagtgatggtggtggtgagtttatcagtactcggttcaaaactcacttacaaggtcatgggattcaacatctaatctcttgcccatcaacaccacaacagaacgggattgcggaaagaaaacatcgtcatctaactgagcttgggttgtcgatgatgtttcaaagtaaaaccccattaaaattctgggttgacgctttttactcagctaatttcattagtaatttgcttccaactcctgcgcttaaccagaaaagtccacatgaacttctgcttaagattaaacccgactactccttccttagagtgtttggtgctgcgtgttatccttgtctccgctctttcactcaacacaagtttgagccacgctctcttcaatgtgtttttcttggctatcatacacaatacaaaggttatcgttgtctctatcctcccaccggccgagtttatataagccgccatgtgatctttgatgagaattgctttccattcacggatagatatcgagatttggtgccgagtcataaaactgggacttttggtgcctggcaatctgctgatgcttcgagaccaccttgtgtgttgcctactctacctccgcatatcaccaatgctcccaatgattcacaatggcttgaatatgtggtggaatttcctcaaggagacaatgaatgtacagaaacgagtatatatactgaacacggttccccaccttcatcctcaacggatccttctacggtgaccactgaagagattggctctccggctccggttcaaactgacgattctcccaccacagcccaatctctccatccaatgacaactcggtctcgagatggtactcgcaccccaaatccgaggtatgctcttgtggctaaaaaaacaattccatctctccctaaaactgttgcagaagcactcgaacatgcgggttacgt

SEQ ID NO: 34897 - DNA, 3007 bp, Arabidopsis thaliana landsberg
  unsure (1)..(3007): unsure at all n locations
gcctctcacaatcactcgatctctcatcaccatcttcatcacctcctttactcgaccaccgtgagtctcgctccaccatcgtcattttcaagctcactcgattgccgaatcaaagagaaggagagtgaagctctaccaccgccactcgaccgcgtttccctctgcacattcaagactcgacaaaggtgctacaatctccacaccggctcttgttcaccatacactcgaccaacaactctcaatcgaaaaaaaaaacttttttttttccaaaccaacggtttcattcgaccggtttactcgaccggtacgctggtttagattgtgtttttggttttgctattactaacatattaacgtttatctttgagtttcgtctgttttcaggtttcatcatgagtaactacagtggaaaatcctctatggaccctgattataatgtggatgaagctgagtcctggtccactagaccagagagaggaacatgtttacgagagctatagggatgaatttgaacgctctgcagcccgacgtaatcagagaagagctgaaatcgccagaggaaagagggcgatgtcaagtagatatgagctgattgatgaggatatcgagactgagtatgagccagagtcatggcgcaaggagttgaagctgctgaacaaacccgacaaggttacagtggaggagtatatcagattctttgagatgaatgacttctggggaacgaggtatccgtgctataagactttagcccagctggggttactagaggacgtgcagcttctgttcgagaagtgtcatcttgagacactcatgtcttacccttaccctacctataaggaggagacaatcgagtttctttccacgctgcaagtggagatgtatgaggcactcacagactttgagctggataccatggggttaggcttcttgacgttttcagtggatgaacagcggtatcagctttcgatcaagaagttggaagaactgtttagtttccctagtggaaagggaacccaacccagatttgacagagaggagcaaaagaaaatgtgggccactatagggaacaatctatcgctaaactcgacgcggtccaagagcaaccaaatccggagtcctgtgatccgctactttcagagatcggtcgccaacgtcttttactccaggggtctacagacaccgtgtctaacacgcacttgtgtatgatacgtaatcggacagctagctcgtcgcgcttggtcaggttttgctctcggaacacgcttgaagcgtagagaccaccgtagaaagggacgtagaagatgtcggcagtgtctggctcatacgtgcggcatggatggttttcgacacgtgcgtggaagatcatctcggctatgaactggtgcgtagagaaccacgaagttcgtccgcggtgaagaggctgtccaaggccattgttgaccacgtgagggcacaacatggtgtggatgcgtgggacacgtcacacccggtaccgtggcccttagtaatatctcatcccttactagggttgcttatgtactattttccaaacaagccgctacgtgttcgtcgagctttacttgtgcctgggcgatcgacatttggatcacgtagatcatgcctgatgatcggggattttaattgatcggaccgagcgtatgatcgagattgcttttgttgtgtaagcagctagttagaaatagtggcctagtatactcatgggcagataggtattattttagataagagcaaaatcggatagagatgacatttggataagtatgattgcggataggaacgagaaccgatagggacgaaagtggatagggacgtgagtggatagggacaaggtacggataacaacgtgtgtggataagtatgaatttcggataagtatggaagcggataaggatcgacttgtggataagttcgttcatgtctatccgttccatatggataagatcgttcgagtttatccgatacagataaggtcgatcaagtctatccgcgggtttttggatagagttacggataagctcgattgagcctatctcgccacctcgtgcttcccgaaccgccccaccatccctataaatagtcattccgcctcattcttcctcattcacaccaaacgaactaaaatctctctgaaaagtccgggagtgagagttgagagtccggtacgactggttcgtcccgaggagctttcgggtactgccgaagttctgccgagcttattagttaggcgattagaggctgattaggacataggattagatcgagtctaaaccggtcagcaaggtaagtttctagttatgcttgattgcgtgctgcatgtggttccatgtactcgacgtactcatggtaaccagcttgattggctattttattgattgctngatgctatgctatcaatattgtatacttccgcatgctgcttgttattttgggttttgggttggaaattattgtctgttagagggagctaggacttgctgggcgattagcgctcattcccccccccccactctcttttgtaggtaaccttagttagaaaccttagtttaagcatggatgttagggaagccggtgtagttttcattgcctttgtaaaatgatatctttgtatcatagtatttacgactcggttgagcttggcttttatacccaaaacctatatttgtatttggtaatgtatatcaatacattacatatgaataagaatcgggattcttaaaactctcgtgtatcctctcattagtctagtccggactaatcccaactcgcggtcgcggtatgggttgcaaagcctctaagtctcgtggtcgcgaggggcggtcttctacagtcgggcctggccttgggtgacctttggctggattcgtctgcgggcggtcgccaaccatacgtgacgcttccggattcgttccttagtcctaggacggttcgggggtgttacaccaccgatcctcccgaaacctgtaatcggagaaccactctatttgta

SEQ ID NO: 34898 - DNA, 6932 bp, Arabidopsis thaliana landsberg
tacacctctaagacgatgccacagaacaacttctagagtaaatgaacagcaccaatgtctagacaaaaagccagagcaccttttttaggcctaagtcttttactcggaatccttcaaaacaagactcatcacagtataacctattaacctttgatacagagtttttcattcttggccagtggacactaagaaaactaaaacatagattatagctgctggtacatacacctctagcatacgcttaagcatttaccgagttcccaagaacactgtgggtgtttctttcaagtgttcctaactacaacgtacatgctcaaattaattaagacaggattatggaagcaatgcggacataagattcatctagtccagtaactttggtcagatgcaaaagcaaacagcaagaattgttcatgttcataaacagacaaaatgcagaactgaaagctaaatattgcggcaattcagcaaataaagaaaagaacattgacacattctctgttacgcgagcatattttgtagattcctatgttttctgtccacatttagttaatgagtttctgaagattccagcaaaaacctattctcagaaataagccaatgccaaacatatgaatcaaattcagagttgaacaacatacataataacagctgcatagggatgatagatcttagcataatcatgacttcgatcatcacactcaggacaacaaaatgggcttgattataatttcgaaagttgaaagctttgaacttacaaatggaaccttagaagctttgtcgttcaaaacagcgagcagaccgagaccaacaaagaaccctaatccgccactcaaccatgccaatgcttcatactgttcacattaatccaaaatcaatcagaaaagcaatctctttttacaccgagaatcaccagcaattagaaatcgtgtaaccaaacctttccgacggtatcagcaatccgatctatgcaaggctctggaaacgcagtcccgttgtcccacatcagctcgtcgtttaccgatagctgacccgcaaaatttgtaaacatcagattttcagaagaatctaacaagaaatttacaacagaaatttgactcaccggcttatcggggacgatgtgtttgccgacggggagacccattccggcgcgttgacggagagaagaaccgacggatcgggcaacgacgccgtttccacccatgattcgtgacgcaacaccgctcaatcttccagccattttcgctcttttcaggtttcgatccaaaatccaatcaaattacagatagagagagaagaaagacgcagtcactgaaacgattccctgaaacgccatcgttttaaaagaggtcaatattgtaatttcgattaacgaattttaaaaccaacgaaatgagcaaacacatacacttcaagtgtgtcaaaaagcttcagattcttactatatacaaagagattcatgtggtgaatacacaaaggtacaaaaacagaaaaagctacaacctttaacatatctataaactactcaacagtgaggcgcagttcgtccgagtcgggataaactgtcttgttgttattatcacattcgcaagagttaatcttgtagaatgctctccattcgtcgatgttcttcatctgatcacatctcaatttaggtaaccttcttctctctaagatctctagaatcttctctgttcttcccagatgcagagctgctcctcttactgattcttcccttacttctacagctgacaccaaacacttgacggatatcacttgtgctacgttgcaaaagcaacctgacactatgtctgatattgtgctttccagctttctcaacagagcttcccctgttccatagtctcttgattcgtaagttagtagaattgtttgacagattcggtacatggagttggctgctagagtcttgatgggccagtgagagggcttgtgcttcatgcataccatcaggttcatctgccatgactctgagaactctttcttcgcgatttccatcagctcccgaagggtttcttctggatttctttgttgctttgatagtttccgaagatccacatcaaaccacttgtgatagagatcaacacctagccaaacgacctcagcagctttcctgaggttaactgactctcctccggtatccaggacgcattcaaacttgttgacatattccagtgcctcgttgacagcattgagtaacttcttgagggaggagggcttgatgtcgggaagtgcaacagcaatacttgtgagtgttacaagcgggagagcccaacaattgggcggttctccgtgggccagagaagccaccttgttgctgtcgaactctgcaatcccttcaaatccttttgaaatgggtgttgttgcttccaaaagctctatcagattcactggttgtttctttctgcccttctctatccaatgatctgtcgcttcccggttgctccgcaccatcacatccaccagcgggtcctctccttcaaggtgcaggacaaaactcgctaggtcctgtctcgagcttggatttgaatcggatttttctgactcactgtgtgtgatagtattactggtccttaaggcgaaatgacagcacaacaagatcttacccacacaggataccgagatgtaacggataattttgctaccaaacacaatcacatactgtatcacaatacatacatccaatatccagcgttttgcattgtgtgcagtcttcctgtatctgcgttctttgaggatccaaaggcttaagggatgttgcttcttctctgagaaccaatgtgtccagtaactctctattctaaactcatctctataatacttctttcctctaatcggacacctgaagttcacagccgtgaaccatctgatcgcaggagcaatggtccctatagctacagtagtagtctggcaaacaagaaccagagaagttgaccatttgtaatcagaatctccatggcagaacccaagtgaccttggtcttaaaaagtaactcctaaccatagcttcaccaagcgtaatggcactcaggagacagaagaaaccagaagcagtgcacgtgacagaacgagccatcacgaattgagggctactagtatgagccatcatccaaaactttgacaaatcttgctgaattttcttagcaactgttctctctgtagccaaaggacacttcatagcaacgtcgtacctcttattgtacttactctccaagattcttttcgtagtgggaactgtggtggccgagaaacacaagatcataagcataagaagcatgagaagtacgaccagaaaatgttcctcagagaaaacataaatcgcaccagtacccaactgaatacagatgttaacaacatcagtgatgacaagaatccctaaagccataagattcatgaggagatcattgttgtccataatacccagagaaggcatcgaattacccatcacagtacatacaaagacggtgctgctgagtttagctaactgatcctgacgactcggcatggaagtgttgagatccacagagagtttgattccgacagcgatgaaagtcagagaagtggcgttgagagagaagaacttacagggaaaccagaatttgcggtgtcggaagccgtgtataagatcggcggccatggctagaccacagatgagtgaagctacggcaacgtagataccaatcgaaggtaagggtttgctgaactctgcatcgttcaaatcgccatgggcgtcgcagccgaggatacccatcaatcgaattcaaggatttgatcgaaaaagctcttcttcaagttgactccatggaaatgagtgatcttgttgacatcattctagagactggaaaagtagcaaactttgacttctctgaccgattttgagcacaaattccaacctttctactacactcttctatgaccatttcaactaaatttcggatagacactgttgaatcgcagatcaaccgggaaaaactcacgggaagaaagtgtttctgcctgctttcgtggagtttggaaaaggcctggagtgatccacctatcatgggcctaataatcggcccaattagttttgttactggatgtgttaataatgatgaagagtagaaactttgacttgtctgataaaatgatcacactcctttcatgaccatttcgattcaattgaggaattaggcactgttgagtgacagatcaaatgtcctaggatctataaacaattgacattccatggaatcagctttagggggttttgagcaatcatcatcaccaatcaggttattcgagggatccagtttgtttgtttttgaattcagcttaggggaacaaaagagttaagattgtgaaaacaaatgacatgaatcacttgattcgatagcaaacacaaaagcaggactaatctctctcacacacacaatgtctcaacttaaacagagaaaactagtcaatgtcccaaaatgaaaatatagtagagtactagctaaaagagaggtagagagatcattcattcaatagggtttcttttgttgttgatggtggtcatgtcgtcaggaggtatgacagcaatcctgagaacaccaaattctgcatcccaagcgatggtgttgttcgaaattaaagcgggaaaaggactttggacgcttccgaggtaggttcgaccgctctcatcgtgttcatacacgtccttgatctcagctttgaatctgatttcctttccatcagcatacacttccacatcatccggactaacacctggcatgtccactgcaaagtgagcccctcctcccgcttttgtcaccccaattagtgctcccttgcgaccagacaccagacacggatgatcctccaagcgtattccggattgaccttaataaagaacagagagtactgtattaacaacaaatgatgcagcaaaagagattgtgactttagagaagaggaatgagtcgaacctgtaaaaggaggcacagtgagagtacacttgttgttgttgttgtcttgagccttgctcacaaccttgacccttgtgagaatcatcctcaaaactccatctttcattttggcatccacgcctgtgatctcgcagcagtcacagccaagcccagtggttccagagtactgacgcacaccttccttgccgttgttcagagtttcaccggagaaaaagacaaccttttgtctcacggcgtcaactctgtagcgaacggcgtcgtctggaacaccaggcaagtcgacacgcacgtagagattgtcgttctccagaaccttcacttgaacgaaaccctttggacccgctttctgaaactgattgttcgtcgcgtagaacccctctgtaataataataagtaaacaaagatcaaaacttgatgaagaaaagtatacagagaacaaaggaagacacttatcaaagatggaactaactcgatctgcttcattttcatgaatcatgcacagtaaaaaaactgtaaatctttgtaccaagttcatgttaacacttcacaagtaaacaaattgagacaactttctagaaaaaccacattttttccgagaaaaattagaacaatgttgttcttgggaaatctagtagctcgtgaaaagagatacctcgaactttaggaattcttgacatgtccctgaactctgcctttgtctcacccatctctctctttgttttttgctctctcttctcttctagttcaaggtaggttgcgtaaaaatggcgttttgttctcctgttgataaatatagacgaagcaccatcttgtggtacagactgtgacgtggcacgctccagctggcttttttttaaccttcatagcataagtttgactggtcttgcctacgtcaccgactctctctctcggtaagaaaaaaaacttgcttttactcttttgatttttttttacggtagagaataagctgacgtcaccagctctgtgagctatcccacgctttttttactcctttcgtttatatgtaattatgtacgacaaaaatgactgcaaaagtaaaaccgtacccacactcttcactcttcattaattttcaaacatttttgacaagacgacgctgacgtcagcaatcttcaagagtaaaaaaattatgagctctcaattatctttttttttttcatcaaagatcaaataaggtttcaaccgtcgtttagtgtttatccaattattacgataacgctattaaaaagtttgatccctacttacaacaacatatatctattaacatgtccaggttacatactcctaatccggtttaataatggcaaagatctatatagtcttatcgaatagctaggttaatgtaagattaaatagaacaaagaaagctgacaactttttctttattgagatcacgacatatagaagcaagatcgttcttaactaaaccacaaaatgataaacataaagcagtagctgcatcaaagttcatagatagatagagacgctagacacaagtaccattacgagacacaaaccaaggtgttgttaaatcagtaatggaggatcctctccttgacattaatggaagcgtttttgcctgggatcttagggacggtgatccagagcactccgttgataagcttcactttagttttcttgacgtcgtaagcctcagggttgaaaatcatggagcctccgtatttgcgtccggcgttttcgtactcaggcattgctggttcgtcggcgaagaagtggacgttgttggcgtcgacccagtaggtgagatctgactcgggacaaccaggcatgtcgactctcgtcacgcaagatttttttgtctctgtcacgtcgtacaccgcttgactcccacttttctgaaatcggttccttactgtacatacataagataaaacaaacacaaacccgttccacaaagagagatttgacgtgtataaaaaataaa

SEQ ID NO: 34899 - DNA, 3813 bp, Arabidopsis thaliana landsberg
  unsure (1)..(3813): unsure at all n locations
ggttacttctctgtcttatttgattttgagtctctgttttgtctcttctcttgagattgcgataatgagagaacggattattacattcgtttcgctgcttcttgtagctttgctttcgtttcccagtgttagctactgtgacgaccaaacggtgattggtcacttccttgaaaaagttcctattttaaagatttgttcatcgaatctccagtaacatggtgtttttgttgttgttcagatcctgtatgaatcgtttgacgagccttttgatggtcgctgggtcgtnnnnnnnnnnnnnnnnnnnnnnnnnnnnnnnnnnnnnnnnnnnnnnnttcgtgttttgaattttttggttttctttcgtctgttgaagtaaaaacaagttagaattagtgtaatggaagttacaatcaaaagggggtcttaaagttttggtttttattggaacagatttagaaatgtttacttttactataagtggataagaaacagactttgtgtgagctcttaaaaggttgcttcttatttgaaatcttttaggtgtgtggaagcacgagaagagtgaagggcatgatgattatggacttctagtgagtgagaaagctaagaagtacggaatagttaaagagcttgatgttgatgagcctctaaaccttaacgaaagaactgttgttcttcaatacgaggctcgtttccaagaagggcttgaatggtggtggtagttaactaaaagtatcttggtcctcaataagctggatgggttcctcaagggttttgataatgattctccttactctatcatgtttggacctgataagtgtggtgctaccaacaaggttcatttcatcttgaagcataagaatcccaagagtggcgagtttgttgagcaccatctcaagttccctccttctgttccgtttgacaagctttctcatgtctacactgcggtcttgaaatctgataatgaggtgaggattttggtcgatggtgaggagaagaagaagggtaatttactgtctgctgaagactttgagcctccgttgattccttccaagaccatccctgatccagaggacaagaagccagaagactgggatgagagagccaagattcctgatcctaatgctgtgaagcctgatgactgggatgaggatgcacccatggagattgaagatgaggaagctgagaaacccgaaggatggttggatgatgagcctgtagaggttgaagaccccgaggcaagcaagccagaagattgggatgacgaggaagatggtgagtggcaggctcctaaggtttccaacaccaagtgtaaggcagcacccggatgtggcgaatggaagagaccgatgaagaggaaccctgcttacaagggcaaatggagttcacctctcatagataacccagcttacaagggaatctggaaaccaagagacattccaaatcctgattattttgagcttgagaggccgaatttggagcccattgctgccattggtattgagatatggacaatgcaagacggtatcttatttgacaacatcttgatatctaaagacgagaaggttgctgaaacttacagacaaagcacttggaagcccaagtttgatgtggagaaagagaaacaaaaggcagaggatgaagctgctggtgaggcagatggtctcaagagttaccaggtatattgattttcgccacaaatttggaatgcttatacatatcctttgtacttatattatgtatgtgcattactgcagaagaaggtgttcgacctcttgtacaaggttgcagacatttctttccttagtgcgtacaagtcaaagattatggtaagttctcattttcagactttagaaacatattgtataatgaagaatcttaaatgagaatttgcaattttcgtttgtaggaacttattgagaaagctgaaacacagccaaacttaaccatcggtgtgctcatttccatcgtgatcgtcttcctctctctcttcttcaagctcatatttggtggtgcaaaggtaaaaaaaaaacatgtcagtgagatgtaatggtttggttggcgggtgtttgagtcttaacgaaattcttggtatgtatgtaggctaaggtagaaaagaagaaaccggaaacagctgcagagacctcgacaagcgaggcaaagacagaggagaaagcagaagcggtggctgcaccacgaaagaggcagacgaggcgtgagagttagataaaaagaggattagattttgatttttggggctttttgttttgatttatcaccgtatagacaaacagtagtggacctgatattaagacgattattgtaacatgttttttttgtatgcttttagtttcacatgaatctgaatgtggatcacaacatttatgagttgaaatttgataagtaatgggttgtgtacatcacatgcatcagcattatcagtttatcgtctttagctcgagtgtttacaacaaaatcttagcttcgagatttagacttctctaccaaagggtcttgatagccatggcacgagactcgtatgatatactaaccacagttaggtctgtttgcagaatggattctttgacagagcacgagcttcagcagccagaagagcatcataaaggtttgatcgctcttcaaaatctgtgtctaaccacatttccaaaaccacgggcaagaacgagctcagcactattcaccagctggctgactgccagcagatgatgcagtcacttcatcagaaaataagaccaaagttgctccaacgaccatatccttcctgcttagtctctgctctttttttgttctttctaatgtcagtgtaacataaataagacggcttaaggaatggaaagataagttggaccagaaaacacacaaaaactgtaagcatggttcaaacttccccttatttcaagtcctacatggaaaatttctttaaaaagtctaaaacgtatataaattaaaagaagaagagaagaaacaaatctaaaaccttacaaaaagttccacatgtctttaaactctttagagaaacacaccgaagcttctctccctacctcatggtccctttgaaccatatcacgacttatcggtttttatgattttaccggcgaccaccagcaggctttctggccggaacattgtcctcatcatcggactcaatgtcaccgtactgccagattccaattctcgacttgcgagcttcctcttggaacttctctaaagcatcaagagcagcttgtttgcctttgtgcccccatctcctgcgtttctccattctcgctattccttcctgttcatcatcatcctcatcaataccaataccaattcttggaaatgttttttagacaaggtgagagaaaaccgacctgaagcattgcagcatttacagagatctcatcatcaacagcaatgagagtgacaacgaattcagttccagtgccttgccctttgactttgcctccagatgtgtctctttcttctatcactgctttgaactctttaccactacccagagttacagtatgcaaatactctcccgcttcaggaccaaagtcgtcttccaagcttggaacctttatgtaggcaagtctgcagagctgagcgagccctggtgctgcagataccgaagggtctattggtctgattgcgctgtatggaactgtctcttggtttccataatcgatgtagaacacttcgaatttttcatctggggattgaaccgctgctcggggtgctgtcacaatctgaacacaagtatcgattgtatgaataaagccataaagcacagaacatctcgaaacaaag

SEQ ID NO: 34900 - DNA, 1704 bp, Arabidopsis thaliana landsberg
tatggaatatatgcaatgcagaaaacaagatgatttctgtttatattaattcttcagtactccaaaatccccagtgaggcgacctctagtaattgatggtcacagacctcttgataactggccaaatgtaggatcaatcgtcttcagagacctacaggtaaataacaaagtagatgtcaatacattcagaaacaagttgtaatcaagattctcaatcctgagatgtctttgttccaggtccgttatgcagaacatttcccagctgtcttgaagaacatcacttgtgagtttccaggaggaaaaaagattggagtagtaggaagaacaggaagcggcaaatcaactttaattcaggcattgtttaggattgtagagccaagtcaaggaaccatagttattgataatgtggatataaccaagataggtctacatgacctgagatcaaggcttgggattattcctcaagatcctgcactatttgatggaacaatcagattgaatctagaccctctagctcagtacactgatcacgaaatatgggaagtaagaaacctgcaaaattttctctgtagttcttgtttgatttacttttgacaaatactctatctaatacaatgtgatacttaggccattgataaatgccaattgggagatgttattcgtgcaaaggatgagaggctggatgctacaggtgaggtttctgaaatcattatcaggaaacgtttttaagttaatgttttttggacaatgaaagctaagattcttgaatgtatgtaacagtggttgaaaatggagaaaactggagcgtagggcagagacagttagtttgtcttgggagggtgttgttgaagaaaagcaacattctggtgcttgatgaagccactgcttctgttgattctgcaactgatggtgtaatacaaaagatcatcaatcaagagtttaaagatcggacagtggtgactattgcacacagaatccacacagtgatagagagtgatcttgttctggttctgagtgatggtaagaacaatatacatgtgttttcatatacattcacacacataattatgaggtctaagtcacttttctacgagcaggacgaatcgcagagtttgattcacctgcaaaactgctacagagagaagattctttcttctccaaactcataaaagagtattcgctgagatctaatcactttgccggctcgaatgatcttctcagctaaacaccactaaaagatggatgatcttttgcagagaaaacgaaatatgaattccacagttaagcttaagttgaaagtctaactagttatttagtactacataagttgaacatagaaatggagagagcaccatggttagaagcatggcgcatcgaagaaaattcagttcaacattttaatcagtacttgtgttttaggttctatactgagttttcagtgtgttcttggagaactatccatgtaaccaatggaataaagcaggaatctattgttaatgcacgaattaaacaagtacgaaaatgggatctctagggaaggaagaagaatctttctattaatgacgagcccgcgacttaggtgaattggacggattacaaaggatgatttcttcaacaagcataaatggagtaagaacgagccgattgtagatgaaagacgagcttgaggccggaagacgatcttgatagctgaaccttgtaaaa

SEQ ID NO: 34901 - DNA, 6357 bp, Arabidopsis thaliana landsberg
  unsure (1)..(6357): unsure at all n locations
cctgatctcgcatctcttccgtaaaacacaaaagtcattttatacacccctaaaataagtcattttatgacagccctaagacagattaagctagcagtatacctccaattctgaagtttctaaaagagttttagcccacatgtcatcatacccaaccaaaggtctagagaagacattctcctcctcaacatctggtgcatctgttccgactccggcaatgaattcattgacctgacaagtattatataggtctgagtttcacttgcagacataaaacaattggtagcatttataatcaaattatgtacgaataaatacagtagatcagatgaatggtttaactactactgaaacctgatcagaaaatttaattatgccttactagatttgctacctacttataatcagaaacggtaatacccaaacttttcatcacaagtgtagtcccaaagcattcattctttaccccattcagaccagtcgaacgtttactatgtcttctttgaaaacaaggtactctaacgggcaatccacacaactactcttactttctgattccttatcagaaatatttaattatgccatttccttgatcttaataagaagaatatctaaatagacacgcatgcactaaactgcacacatactaatccgtttatcttaaaaagtcagataaaaatagcaactgaccctactcattgctggggcattgtttccaagaagaccatcatcaccaaggtttgcagcccaagcattcaccaaatcatcatccagaccactggagtttgaggcagcgggggcaggctgagtggactcatagattaagtccgagatcccagtagcaacaacagctggatcggtggacccagtagatgcagtgatattgtgctttgtacggtatgtgtcaatgagcttcgcgcttcatatgttacgaggaaacaaaataagtattatcatatgaaacctaaagatagacaatagcacctaataaaataaagaaaacggggaagtaagcatgcaatttacacaacaaaggtcagcagcaagatcaccaaagatgaactgtacattctggacttcttttgattaaaatgttcataaatagttaactatagtgtataatcgttcttgggttttgtcagaatctgggataaaatttatacttttatttgtcctaatgaataaggataattacatgcaacacaataaactctgttgacctagataagcatcaacaaaaaaaagcagaaagtcttttggaaactataaatcccatcttccctatgcaagattagtattgtaagtaagtattatgtattagaagttaggctgtctttgactgatataataagttcagaatactaccttatcgggcccagtggtaaatacttggctctaggaataaagcaaaacaatgaaacaaaatccagcagcctctcatggttttcgtagagttttttcagctcctcgtccttccattctttgtttgcattatcgtgatggcgtatatcccttgttatcaaggaaaaattcatatgtcaaccataatatcatatagaggttacatgcacgcatcacatgaaaaaaaaagaaaagaaggcataaatttctttcttacttgattaattcgtcttgtccaacatacatttcatcaagaacttttaacatcggtgttattaaaactccaagacctgtaccactagctccttggtcttccccattactcaggtgcatttcagaaagttgagactgtacaccaccctctgctaaggtgtacaaaaactcgtatatctgcagcctgaaaggttcaccagatctaatggctattgtagtaagagcttgaattgcaacaattctgacctgtgtatccacaaaacataaacatttaggcgggaaacactagaagtaacactcatcttagtagactattctggcattattgtgcctatgcttcacaagaatccaactaaaacgctcggaagaaaatcatatacatgatgtaattaagcatcacaaattataatcagctattttctatattaagatatctaaacagatagtaataaagattgatagaaagagagaccaaacatgattactatagtcaacttgcactactttgttcttatagtttctggtcaggcacaattactacaggtttcacattctgtttcatggttaaaaaaaacccattaaaagctacctaactagacatcctattcgttctcacttataaaaaaagggtctcaaacatggtcttaaatctagagtactcaaatgatgaatcaaatcagctacaaaccaaaatgttcctagacatgggttaggatcagtgaccattgcaaggcaagccatctacaaattgataagaatatgggtatgaaaatgtcctacatacattgtacaggaggggtataaatcaaagtcttataagacagaccaaagggcactaagacctttacgctagctttatagtgagttctacctactttgtgggattgctttgtgccctacttctatcacaaattgtccaattaaaaacaataaaaaccaaatcaaatatacgaccagcaaaatatagtggtatacctcccagcttccactaaatgcacacctctggaggcgagttaatgcaccagctagagtaggattgcgagaactagcagcagcaaccattttatctgcatccaacatcataagtgctgtgcctggtggagttgcagattcccatgcatattctgatgcggcgtagtttgcattttctccaaggaaccatacctgccacagtattccttttaagatcatgtgttgaaaacattaccaaattcatgtaaaaccttatgaggaagtcttactgctgcttgcaccaatttctgcagtgccagagctgacttaggatctgatgcagagaccctatcaattgatgtcagtccagccatggaccccggttgtggaggtggtagatcgagtactatcgtgactgcttccagagctgtgtgtttcccgtcaggaccagctccaacaagacatgtctagaagttaatcagatgataaattgtgttaaaaaatactatctgaggtagcaaaaattcagtaaaatatcccacaataatttaagccttgcaaatatactttacaaatatgatttttgtccaattatatagctttaaaagattaaataaacaagcgtacaaacttaaagatctaaaaatgtcctaaacacaataaaaatttgaaacaggacgaaatatacaacatatgtaagtacattataatagctttagaattatatccgcaagaagagaataccttccagagcagctgtaagacatcagcgtcaattttccctggaactttggtggcaaatattctggcaatttcgagaagaataacagccatatctggagttgcctgtgaaagaaaaattaaaaagagttaactagtcagaagaaaacagttaacattactcctcaataaatctgttcaagtttttcttcagtttcaacgcaatggataaaaaaattgatggggtccatgatgtaacatgtttctgccagataactcttgttacaaaatctaagaaattaaagagattccgtacatcagagaactactaaatacttataggattgtggacaaacaacagagctgcttaactttgaaacagttcgcaactacactgcaaaatcaaaaaagccaagaaaacatcatacttaccttaaagcgggcatgcaaagtaagcaaaacatcattgactagagctgcgggccaaccaggatctgaaagctccgaggcaatgattgattttaactcatccaatgattcatctggactttgcatccatatcaatgctttgataaccattgcccggacatacacgcactcgcatgctactgttgtccgaaccacctccattaatgcagctagcaaacttgcaattgtatcactgcgaccaggccctgcagatatggatgatgttctccgaattcctgcaaaagtcgaacatatacaaagtaggaacatgttagaacatatatagaattcctgctaaaaataagggtaaacaagtaactcaaagagtgggaaagaaggtaaaaagtgatttggaacatgttaaaactcgaaagatataaggataccctacatatttagataattcggtaaagaaaatcaaagcaataggacagaaaaacatgttcctttgtttacgtctgaagagaagactgataatattatactatttttgtaaggacatcagagcattgagtttactcacatttgtagttttgtaacgattctagcatattgatgcgccatcagagcatagatgcaatgacttaactcacatttgtagttggtgacctttcaacgtataataaataataatacaacaaaattgaacaaaactcttatagaccaaaagcttgcatacaattttatgctccatacgaaattagaaatatatttgtgcatctgtcagacatctaacaaaataaataaaaaagattgtaattcatattaagaggatactgacaatgtaccttctggatgagaactttcattggtctcagcatcatctagagcatcagaaaatgcatttacatgaacggattcatcaatgtcctgtaatcccatagcaaacgctgatgctctactctttcccatctcttgcacaacccttgctgctgcatgaagtactggtcttgagaaactgcgaaatgagctctctaacctgaaagaacaggatcaatttgcgaaagttctttaacaagaaacacaaccataacgatcattacaatccaaagcaacattctagtgaggaaagggaatccataagatctgcaattctaaacacagtcttccaccaagctaggagtacctcctcattacaagcttaataaggggctgtggacgcttggttttattagatttatccttggaggacaaggatggtgcttctggcagcttcaggatctctctcgtcaagcgataccacccagcagcacgctcatccatcctaaatgatgcagtacattttggttattcaataccttacaaagaatgaactaagagaaatcaaagtcatagaactcatgcctctcagtgttatcgtgttttcccagaatgcacaaaatcgcctcatagcataccctttcgcttggatctaggagtagctgatagagaattgagttgaactgagacctaatatcaggcctctctgtaggaagattgaaaggaaactagcaacatgtaagttctcaaaagatctctcccatatagccagataagaaaaaaaaaaacagagcgagaacgggcagcagaaagaggttgatagtacttaccatctaatgcccgagctctagatattgagtggcacaacctagccagagaaactctagcaagaacatcattcatatgcaggatatcttgcaaagcccctaatttggtgtacagaagaaaggtatatcagctaacccagatcgtgttccaaacacttctttataattagcacaaataaacacgaaataaccagcaaaaagattaacgtcaagagataaaaggcctggtgagcatacctgttggagacgcaagcttttctgcagcaaaaagatcaagagacacatatcaagttttgaatgaaaaacagttatgtctctacacacagaaatagaatgaaaaaaaacaatataagggggaatagaacaaattatttacctaatgtcattgctactgtataggggtctcttgtggctaactcagatagaatttccagtgaatgcctcaccgcaacaggatcagcaaagaaaacactgcaacataaaagtgtgaatacgagaataactgtccaatatactgcataattaggaatagaccaaaaattcaattgctcttgtgaaacctacatcactatacttaaatccaatactctatacttaaaaagatagtagaaagaaccaaaaaaaaagtcttacccctgagctgcacggtgcagaaaaagtggatttcctggatcaagagggagtcttctcagtgcactcatagcagcgtattgcaagttacttcgcataatcgactaacaaaaacgagataaaacgctcaagttaataacaaagtttagtgttgnnnnnnnnnnnnnnnnnnnnnnnnnnnnnnngtgaggaagaattctattcgtctgcctacatatctagaagctaagttatcaaagttgttcctttggcttattgataatctgatatacgaatagaattgtaatgttttaaaaaaatggttttattaattcaaataacatttaacttggcccctcaaaatctgatagctaatagccagagtcaacaaatgtgcaaactcatatca

SEQ ID NO: 34902 - DNA, 2124 bp, Arabidopsis thaliana landsberg
gttcctatttttgtttttccgtcacacgagtatagttcatccggtacaatgcatgctagatcattattggatcatattatcttatttagggagaataaaaataaaaaaagtattattatcgtcccacattaacgtattacaatttgactatgatttttcatgcacgagtatagtcatccggtccaatgcatgctattgctagatcattattgtatcatattttcttattttaaaaaaaaaacaaattctgaaaaacaatatcttggtccttgcttattaggtgggtactaattaggtaatacgaaatgttattttttcctttaatctagatttaaaatgaataaaatgacagtgtgtgacacaataagataaattttacgagctatctctttcatccatgtaatatttataatcttgtgaaatcttgatttttcctatttttattctgatctttttgtaatgaaaaagaatatatttattctgcttgattagtctacggatttccttttcatttaatgaatattccattattctgatctagtttatacacatggtgaagacatgggctatttctataatctatatatttatttgtgtgagaactttgctaaacagacacatagtattctgaatactcaaaatcaggatcaattatgggtatcatcttatatgattattcatattccttatataaattatcttttattataaatataaataacaaaattttcattctcatattccataacacgaagtgtgtacgtatcactctatataaataaacttgcaataacataagcaagactcacatttttccaactgtcttcatatcagactctctgatcaaataaacccaaaataaagaagagagaagaaagccatgaatgctttagcagcaaccaacagaaacttcaagcttgcttctaggcttcttggtctggattctaagctcgagaaaagtcttctcatccccttccgagaaatcaaggttcgcaaattttcactcctttcttaacctaattaaccttgatccgctgattttgtgccttcgccggcgccggagacgattcgtcgcggtggattttagtgaaaaatgattactgaatgtttaggggcatttcgaaacccgacccgcttttttgtggatccagttacttcaatccggttgctgaattatataaccggaacaaaccaatttaaatcaaccggttctggtatttttgtaggtggaatgtaccataccgaaagacgatggtacactagcatcattcgttgggttcagagttcaacacgacaatgcaagaggtcccatgaaaggtggaatcagatatcatcctgaggtttttgaccttttgactctgtttttttgaaccaaaactcaaatgtaacaaaccagtatacaatttcggttttggtatatgatgcaaaccggttatcgttttcttgcaggttgatccggatgaagtgaatgcattggctcagctcatgacatggaaaacagcagtggctaagattccttacggaggagctaaaggagggattggttgtgatcctagcaagctcagtatctcagagctcgagcggttgactcgagttttcactcagaagattcatgatctcattgggattcatactgatgttccagctcctgatatgggaaccggtcctcaggtttcgaaaacatgatcttcagaagtcttcatcttgtattttacgtgttgaaaccatctttcaactttttcccttggtggaatttgcagacaatggcttggattcttgatgaatactctaagtttcatggatactcgcctgcagttgtgactggaaaacccattgtaagtaaagaataatcacaatcttgttttgctaatgactggtttaaccacctgaatgtttaatgatgtttatgaaccaggatcttggtggatcgctagggagagacgcggctactggaagaggagtgatgtttggtaccgaagctttgcttaacgagcacggcaagaccatatcagggcagcgttttgtcatccaggtgacctttcttttattgcggtttcctgcgagccaaagaaacttttcttattctggtttacatattggttcattagggatttggtaatgtgg

SEQ ID NO: 34903 - DNA, 4894 bp, Arabidopsis thaliana landsberg
gccgtgaaaggggagtcaagaccatgctgaataggagcttgcgaactggcactaagcaaagcagaaatatcttcttgagcaaacatggtaggaccttgaatccctcccagaaggttctcaaaatagtcaacacaatggttctgaatggcgcttagggaatccagacgggacccgttaacatcaaagaggtagtgtatgtgattcacagcctgacgggaagaggccatcttgtgaaagtaggcggtgttcctatcaccctctcctaaccaggtgacacgagatctttgtaagaagaaactctcctcggccagagagagagtctgccacttcctttgccattctatctcccgctcagcattgtggatggttgggttttcgaggactctaccttgggcctccaaaagacaatccagggactcttgcgttcttttttccagatcagaatagttatagcggctaaactctcttattacatgcttcagcgctttgagcttacaggatactctgaacattgcagacccagttacgtttagagaaagccagctgaaaccgatgagaggcacaaagtctgggttcttcaggagaaagttgtaaaaacgaaaaggcttctttgtctttggcgcagctgaatcaaacaggatcccacaccaagcatggtcagagaagtgcggcttcccaaagaagcccaaagcagagggaaaaatatcagcccacatatcgtttactaacacacgatcaatcttctttgctataggtgagttggctctcttgttccaccaggtaaaagtgcttccacgaaagttcaggtcaacaagagaggcatcaagcagagtttccctgaagacccttgttgcccggtccacattctgactaatggtggcagagtgatcgcttgggtgcagagtttggttgaagtcacccatcacagcccaggcctttcccacaacacgactgtctgaagaaagggccacaagctcatcccataaagtctgcctaacagtctcgtcatttgaagcatacacaaaagaaaccacaaaagtctctgggtagtccggaacctgcacttcacaactgatcatttgcagggacttagagagaaccaaaagctttacgctggggtgccataaaatccaaatctttcccagctccgagaaatcataattattgtcaaaagaccaacctggcaacagcttattgataaacttctgctgcttcggctgtttaacatgagtctctaccagacttccaaaaaggggttggtggcatttaaaccacttcttaaacccactacgatgcgaggaagaattaaagccgcggacgttccaacaaaaaatgtctatacacattaagaaactaaagggatttgggacctttgcccctcgcactgcgttgttgtcgctgagacaacacttcagtgaactgctcttcatcttccaaatcagtatctgaatcgtagggcgacgatgggacatcagaagagtcgtcatcctcctcggaaataggggccacatctttagttcgggcaacttgcttcttctgcttgctttcgcgcccaataggcttgggaacagagcctttctgcttaggagcatctgtcacccgcttcccccgagaggaggtggcagcatcagggttaattaagggaactggcttgtcttgcagtgtccgcttgcccaaccctacagccgcccagtcaccttctttgagcatcggcttcggcgttttagatcgccgacgtcttggagttttcttctctgcttgggactttgccctggggcaagcatcagcagaatgctgtgtagagttgcaggctttacaggtgatcggtgctgctttacaccgccgcaagctgtggccaacctctttacagtgggcacaaataggaggcatccacgggcttgacacttccactcttctaatctctccagactggaattgaacattcacaacgagactagcaatgtgctccaacccgtcatcattgaagcattgaaaaggaacgtttcggagctccagccagatcggggcagaggtgagctctggcttaactgggcggagcccaggttcccatttggcaacaaacatggtttgtccatcaatctgccaaagccgttggttgagcacgcgagtacgggtttgcacatttgggatgcgaaacaggaacgcgtttccctccatcttcgagactgagacatcacgaaactgcttgctccaaattccattgacaatggtatggacagtaccctgagcagggggatcagagtaaaattgcccgaggatgaacgagtcccaagacttctgatgcttctcaataagcgaattgggaatcgccacacatgcttctcctgagggtagagtaaaagcggaacctttcttctctagccttttagatgttgtacctttgaatatatcgacccagctatccacggggggaggagcaataggcgcgacaatgactgggtttgctgcagcaaccatgacaggtgcagctttcgcagagactttagagggattcgatggaatcactgtaattgtaggaggcacagatggagctgaagcaggtacacttgtagccgctagctgcacatcgacgtgaccggaggatgctagatccgccgtggatctaggatcaattgtagatctgggatctaagacaggcgcagatctggaaactgcagacaaagaggcggcgggggagatggccgcggaggagatggcggcaggggcacttgcgacaggagaaggcggaggagacggcgaggagatagccaccagagaggcggcggaagagaccgagggagacgagctccccgaaggagagaacgacttgaggcgcttttgcttccccatgaggaggggagggcctgccgagcccggcgagaggaggagccggcgccgctggagacgccggaggctagaagagaaggaaaccacttttcgccctttagagagagagaaaaagcttgataattaatagtgaatagttgatcgtgagagagagatttcctgatttcgacattatcttcaaagattctcctttatcatttccgaaagtcccataaaagatcctattttaccggaaatgatccttggagaatgaacggtttttacaagtctttgcctcgcgtgttcttcacggctcggtggtcgtttgagaggtggcttcggggcaaacggtatgggcttggtacctatatttacacacagtgtgcacaacttaacccttgctcaattttttcagcacgagataatcgatctccgtcccgataatgcaaaggtctactacgctaacgcttgactctgctaaggttctgcgttcgaatttgattcagcggccaaaagccagatctccattgctgatgctttctgcagaaaaggatggttgtcgtagtaatagtgtgtataacccatacaatgatagggtttacgagacgaagagtgactttgcagggtatcgattcctggtaagctcaggtaagtggtttctggtggtagattctcgaatgaaactctatattatacatgtatttagcgagaagaggatcgatcttccaccactagaatcatttaagggtagccattttaagatttggcgtgaaggagaggagaatgtcaagcatatgctaatggatgatgaggatccattttgtgatgaaattcctcatgctgccgaagatctgagaggtcgtttgtgggttgacgacaagaatggaaactacgttgttgtgtggcagtttgaaatgtacccatttctagggttttgcaggacaggggatgatcattaccgcgagattccaacagagctcgaggttcagagggagttacgaggtttaaacgatatggtactgaaaggttacaatctttacgtctatgccacccgtgagttcattcgacacttagatttgtctggacaagatgaagatggtttcaaggatgtatccgagaaacataggcttccaatgtggatgccaagtatgacaatgaaggaacgtgaaagtaggaaccaattgaagtgtatcccatctaacaaaggcattgctgttacaagagcaggtcaagttttgcttgtctatacgttcgatttaggtacctctgcaagtcataggatgttccgtttgtacaagagggatcctaaagatcttgacccgaaaaccctcgacacctggcttcttgaggtgcattctctaggtgatgaggccctctttcttgatttgggtattactgtgcctgctgaccatacccttggtattgagcctaactccatttatttcacccgtggtgatcgtatccgtcacaaagaatcgtcatgcctcgacatctgtgtcttcaatcttataacaaagaccatcaaacgcttccacggtctctccaacttcaacttctacgatgctcagtggtttcttccttcttgattcttgccttcctagctcatggttgatcccttttggtcttgctctgttgtccttataaataaattttaaaatagaaaatgttcatagttcacttgtacgttgatgataacataaacttagtgtccgacagctaagtgtctgctaaggcatttgatgttagagtgttatggattacaagtttacaacgatcatgttgttgttatgcaagacataaaagataattatcaagctttttctctctctctaaagggcgaaaagtggtttccttctcttctagcctccggcgtctccagcggcgccggctcctcctctcgccgggctcggcaggccctcccctcctcatggggaagcaaaagcgcctcaagtcgttctctccttcggggagctcgtcttcctcggtctctttcgccgactctctggaggctatctcctcgccgaatgcttcgtcttatcctgtcggaagtgcccctgccgccatatac

SEQ ID NO: 34904 - DNA, 7369 bp, Arabidopsis thaliana landsberg
ttaaggtctttactaattgagctacaatggataataaaagaatctaaccttccaacaaaaagaaatagtattactaaagtcaataagaacaatctatagccaaagaaaaggtctatgggtgttgtggttataagaactaaacaaaagtcggtcaaataacattattgtcttctctattcgttcaccggtcccgtaactgaactttgacgttggcagcctagttacttgattgatttctcatcatactaataaaaataataaaatgttgatacaacccttacataaatgtatacaacatctcgaccagcacgccaatatccctttctatataattaaaattcatcttctaaaatcattttcaagtaccattgcctatccaaactctatacgctatactacatgtaatatattaatgaccataactcgttttcatgacgtatacgtcgttcattgctcggtattattcgtattgctttttttttctgatgatatagaaaaacaaaaaaaaagacctactattgtcaatttttatatacacacacataatgcgagaattgcttcgtcactcctatcatctgatataagaaaaataaactagttgaatgcaaattttcatatctttttgtgttgattatatatacataatacatgaataaagaagttggttttttattaatttcgtggtaagtccgccgatttggcctttctatacgcattcaaacttcacaatactataagaaattaactcctcagttttattgccttcttgataagtggcaactggcaagtaagggtaattagtagtaacggtagaggctaacgaattcacacgagtcactgtcaaaataaaaaattgaattcaaatgacatgagtaaggatagattaacaaaaagaaagttgtaatggatagacgcacattgccaaattccacattatagctttaaaaaaaaaagtctgaacgaagaaagagttgcaattatttagtaatttcaatgatatggaacttgcaaattgtggaaattcttaagaacgtccccaaccaaaaaccaaaaaaaaaaaaaccaaaagcatgcaacatggaaccacatataagagtacccttctttacgtcaattatcttttaagcaagtcttcgctcttcaatttatattttaccaaatcatcttctctctttctctatctctcaaaacaaaaagtaaccatgatcaagacaaagacgacgtcccttctctgtttccttctcacagccgttatactaatgaacccatcttcctcctcccccactgacaattacatatacgccgtttgttctccggctaaattctcccctagctccggctacgagacaaatcttaactccctcctctcttccttcgtcacctcaaccgcccaaacccgctacgccaacttcacagttcccaccgggaaaccggaaccaaccgttaccgtatacggtatttaccagtgccgcggcgacctagacccaaccgcctgctcgacgtgcgtatcaagcgccgtcgcacaggtcggagccttatgttcaaactcgtactccgggttcttgcagatggaaaattgtctgatccgttacgacaacaaatcgttccttggggttcaagacaaaacgttgatcctcaacaaatgtggacagccgatggaattcaacgaccaggatgcgttgaccaaagctagtgacgtcatcggttctttaggtaccggagatggatcttacaggacaggtggcaacgggaatgttcagggtgtggctcagtgctccggtgatctaagtacatcacagtgccaagattgcttgtctgatgcaatcggacggctcaaatctgattgtggaatggctcagggaggatatgtttacttgtcgaaatgttacgcgcgtttcagtgttggtggtagtcacgcgcgtcagaccccaggcccaaactttggtcatggtcagtcttcctctaaacttattttaactaaactagataaaaaaataaaaagtcgtaatcactaaaaaaaaaacctttttacgtaacctcagatgaaaatttaaatattagactgatcttaacaattagtctaatggtttatatatttgtgtacgacgctaaatttttaaacccataaaattgatagtgttgaccataaataaaaatatgaacattatacttgatggagaaaacaaatttattaaaaactttagaggtggatggatagttttaaaattatatttatatatttggcagaaggagagaagggcaataaggatgataatggagtgggaaaaacattggcgataataataggaatcgtcaccttaatcatcttgctcgttgtgtttctcgcttttgttggaaagtgttgtagaaaattacaaggtatttttgatattgatttacgtttttttttcagttcttttatcgatcataaaatctaaattactatgtatatgccttttgcagatgagaaatggtgtaaatgaaaggacaaagtgggaaagatatcaatcaacaactcgagtcgagccacactgttagttgtatttttgtaattttttttgttctccctcataagatgtacgtagttataggtcatgttcgacacgttaacgctgcgtcagggatccgcgattgaaatttaaacgtcaacaatagcaaaagaaacagaaaaaaattagtaacggtgtcgctgcggccacttttacatgtgatgccggtgtcgtcggcatcgctaagaaaaagcggcgaccatttttatagacgctgcggctcttttcacaagaacgattatattagttttcacaaacattacatggaagtaagttataatttccggccgccgaccgctgacgcagcgataacgaaaagaacagggcaattggctttatatagccttgtcaatacaacgatcctctcaagaggaattcattaactttcatggtatcagagcatcatcgctccttaaccttttctctcatttctctttcttctttccttttttccttctttccttctttcatctctttcttcttcttcaaaagtctccaatggctgctcaacttccagcgatagagcgagcgtttggggttacaaatatcaaagcccacatactcttaattctcgatctcaatgatcacaattatgatgcttggagagagcttttccagacacgctgtctgacgttcgatgttctaggacaccttgatggtactatgcttcccagtggagataacgatggttcttggctgaaacgcgacggactcgttaaactctggatctatggaactcttgctccagatctgttccgctcatcattcaagactggaggcactgcacgtgacgtttggatccgaatcgaaaaccaattccgcaacaacaaagaggctcgagcgatccaactggataatgaattgcgtaatcaagagattggagatcaaacgattcaggcttattgtcaaaaactcaaatcgcttgctgatctgctcgccaatgttgatgcaccggtcaacgagatacatctggtcacttacctcctcaacgggctcattgacaaatacgattacatcgtcaacgtaatcaaacacaaagagccgtttccaagttttgagacggctaagtcaatgttggaattggaggaaactcgcctcaaaaagtaacaccgagctttcgcaacacacaaggataactcattatcatccactgttttaaccgtctctgcaaccccatcaacaacctcgcctatacagccgcataaattcaacaactacagaggaaacaaaaagaagaacaatcatttcagaggaaacaagaacaacaatcagtttcaccccaatcaacaaaattggacttactcaaatttctggcccagaccatttaatctgtggcccaatcaatttgcgaactggggacccaactctcaactaggctcataccgaggcccatatgtctttcctcaaatacaccagtaccctcaacaagcccatctgacggaaattcagtcgacgactgacttcacacaagcttacacgataaagactttggttgatcctaatggtgcaccatgggtcatggattcggctgccactgcacatctctcgggcacagcaggtaatcttcactctaatcttaatcataacatcactcactcggtcatcgttggtaatggttcaaaaattccttcaatttacggcttatgtcaaaaatcaattcaatacccaaataaaatcttgtcaatgcgacaatggaggaaaatataataaccatgagttcaagaattatttggattcaaatgaaattacagttcgtttttcttgtcctcacacatctcaacaaaatggaaagtctgagcgaatgatacgcaccattaacaatgcgattagagctcttctctttcaagctcaactctcgccaagttattgggtagaagctctccatgtcgatgtccacctattaaacattcttccctcttccgccatccaaaaccaaatcccctacactcgtctttttaataagaaaccaagttatgatcacttgagagtattcgactgcctttgttttccaaacttaaatcattccaatcttcataaactttctccaagatcaagtccatgcttgtttcttggatatccatcacaacatcgtggctacatatgtcttgatctaaaaactaataagatcattatatctcgtcatgtatactttgatgaggatatttttccggcaaccgaaacacatcaaaaagacacaaagtatctatttctcgatgatgatgttccttcttctcaattgcaacctattcttcaaactccatttcctactcaaaaccaacacctactagtgttcctgctcaaagaacccagccacaaacacaatttatttccattcagccctgtcactcaatgatgacacgtgcaatagctgggattcgaaaaccaaaacaggtcatctcacttctcaccaccacaaaatcgcctctcccaaaaagtcacattcatgctttttctgatccaaattggacaccagcgatgactgatgagatagatgctatgcttaagactaagacttggagtttagtgcttagacctcctaaggtcaatattgtaagatctatgtggctgtttaaacataaatatgatgcagatggcagcataactcgtcacaaagcaagattagttgctaatggaaaatcacaggaagccggtgttgatttcacagagacgttcagtccgatggtcaagccggcgacaatacgaactgttctcaatgttcgtgttggtctcgattggccaatacgtcaattagatgtcaagaacgtctttcttcaaggagacctcgaagaaacggtgtatatgcatcagcctccgggatttattgataagaactctcccaatcatctgtgtcgattacacaaagcgatctatggtctcaagaaagcaccacgagcttggaactccaggtttgcaaaattcatcacccaccttggctttgttacaagcagggcagatgcatcgctgtttgtttacagaaaaggagttgaccttgcatacattctcctatatgtggacgatatcctcttaactgcttcttcgaccaaacttctggaaacatcattgcttcactgaaagctgaatttccaatgacagacatgggaaagatacaccactttcttggaataaaggcagaatacaacgacaaatgattgttcttagtcagtctttgtatgcaaaggagatactggaacgtgcatgaatgagtgattgtaaacctattgcgactcctgttgacttaaagtccaagctttcagtagatatcggagatggtgtttcagatcccactttgtatcggagtctcgccggagcgttacagtatctgacttttacaaggcctgatagaagttacgctgtcgatcaaatatgcttgtacatgcacgacccccgtcaaccacattttcaagctttgtgcagaaccattcgatatataaaaggcacattaacgcatggactgcagctggttaaaggccaaatagattgtctcacggcatattcagacgcggattggggcggttgttcagacacaagacggtcaacatctggctattgcgtatttctcggtccgaacttggtctcttgatccgcaaagcgccagcctactttctcaagatcaagctcagaagcagaatacaaaggcgtcgctaacactgtggctgaactatgttggctacaaaacttgatgttagaacttcatttgacgataaaaagcctccgtcgtttattgtgacaacatcagttcggtctaccttgctactaatccagtcaagcatcaaaggccaaaacatatagagctggacatacactttgttcgagagaaggtagttgttggcgaggtcaaagtagttcatgtcccatcctcccttcaatatgcagacattttcacaaagggcttacctacgtgtctgtttaatgagttccgaaccagtttaactgtccttcaaccggccgcttcaactgagggagggtgatagaatatagggatgttctgttacaatttgttttatatattctgtatatatgattttgtaatcccttgtcaatacaatgatcctctcaaggggaattcattaactttcaatccattaatacataatcgattaataaaaaagacgatggagaagtgaatttccacgatgctttcgataatgaagccttactcgccaacagattattaaatctgtttctttccttctccaaattcaatcccaaaagtgatgagattgttgttcttggctatcctctcatggaagaaactccattggcttttgatgatactcaatatcttctcttgcattgattcgtcaattctctgtaactttgttatgcctgaccatgcccagttggatttataaatatatttttgttataaaaagaagggtgagagagaaatctcgatttagtcattaatctttgttgtcttaatatccgtttagttctaatctcggtttaatcagaaggagttggttatgttttatagaggaagatgggcttcagttttattaaaaaaaccgagaagagaagtttttttttttggtaggagagaggagactaatgtctccccaatttattcaaaccaaaacaaaattacaagcaaacatatctccgaaacgcagtttcgccaacatttttcaaagaaagtaacttaacactatctggtgtaggttcaaacaaatagaaacctagtggaaatgtaaatgtatagttcgccaaaccgtcagcaagtcgatttgtttttctatacacgtgagatatatggacattccagtccttcaataaaaagccatatcacaaacataataggaatgacagcagatgagtat

SEQ ID NO: 34905 - DNA, 5749 bp, Arabidopsis thaliana landsberg
  unsure (1)..(5749): unsure at all n locations
attgtttatatcattttctacgtgatatgacgatggaacacatccgcaatgatatttgctgctcgcaagatctaaagctttgtttcttaattacaatctacaagaatgtttaaggggatgtatttttttgtttgtatttacagattttaagaaactcgtgcgttttattcttggtcaaattaataagtcaatgggtaaaattgggttcattccggttacaattaggtttagttggtttgtttatcggttttgtatatagtaaaccgattaaatctagcttcgtggggttttagctctcgaactattgactcggggatatctaagtatagatctttcgatttggggggaaataggaaccgaacttctacttcatggatatatggaccgtggtataagtttgggctctatctgttatgatgtcatagttctcgggggaaatagactgttttcctctcgtatttgctatgtgatcttaactttggacttttggttggtttaatgatattttcaggttgtttctggaaggactaaataagtttgggaaaggagactggaagaacatatcgaggtattgtgtgaagtcaaggacctcgacgcaagtggcaagccatgctcagaagtattttgcaaggcaaaagcaggagagtacgaatactaaacgcccgagtattcatgacatgactctgggagttgcgggcaatgtccctggatccaacttggagtctactggccagcaaccacattttggtgatcaaattccttcgaatcaatattatccctcccaggaaaactttcggggttttgatcagcgatggtgatgggtgtatggcaaacttatactacgcttaagttttctaatgtgatttttagttctagggatttagagttttggtgttagagtgttggtttctggcgtagagttaagtttggatatgtagtttgatcacttcccaaagtcttgtcaaacaaactaatcacccttcttttaagttctaactaataaaaccaaatacaactatttagagatgctccacattgcttaaaccaggtgtgctaaaagttcgactgcttgatccatcaaacctttctcacataatctgctaatgacttcctcaattctcgaactcttaacgaacacgttcatgttaaatgcttcttccaataaaccatgagcacaaacaacctcgtctacctcaatatatgcactaatcataatatcaaatgtgtggctgttccggttaactccattcgtctccatctctttccatagagtcttagctcgactcagatctccagcttttaccaatgccttgatcaatatattgtatgtaactacattaggctcagaacctagcttgttcattgaagacatcatctttaaggcgccttcaatatcgttctgcttgcataacccattgatatacacattataggtataaacatcaggagccaaacctaacaagagcaactcatcaaacaacttgtctgctttcgggtcatcctcatccgcaataacgccttgcaacatgattgtataacaaacaagatcaggctctactctgtcacatctcatctgattcagtacacttacaacttctttcccccttcctccttccaccaagaacctcatcacaactgtataatcccnnnnnnnnnnnnnnnnnnnnnnnnnnnnnnnnnnttccaaatatccaattacatcgaaacatgacgaatccttgtgtttacatacagaactcagtaaccgagagtataatcttggatcaacaataacactatcctgactcatgtatctcactaactcagtagcacaatctacctcacctattctacaaagcgcatcgatcaatatcccgaaagtagattcctctaacctaacacccattctacaagctttcaccaaaatctcaggaaccaattcaagactctgtctttttctcacaagaactaagagcaaagcattgagcgtgtaagcagaaggcacgcacctgaaattagggattttgaagaaaacctcaatcgcctcttcgattctaccggagaagccataagcagcgatgacatctctgaaaatggattcaggtgtatcgaacttctcagagacttcaaggtggtaaagaacagatgaaatattctcaagctgagaggatttagctagggttttgataacgaatctgtaagcttgaggagtgggctcacagttatggagttggaatgagcttaagagggttcgcataacagaagcattctctgaatctgcgagaaggttgcttcttagctcttccatggcgtacttctgcttgagattctcgttccatttggttttgaaagacgaatgaggaatttttcgatactttctcatgaaatttgacattcggtgccatgacgaagatcttgccatttcttcaattcgataaaactgaaagacatgtcatatacgatcttgtcggtatataacatctgtaaaagcccaactagattcaaaagcccactactggcccagcttcatttagggtttttatgtatcttctattgttacgtgtgtatacactcccttcaccgcagaaatacagaattaaaaaaaaaaagttttgaacgatgatgatctcaatcttccaaagatttgatagaggagattctttctaggcttccctcgaaatctatgaaaccagtgagattaacttacaagagttggaacaatatatcaaaaagtaagagctttacaaagatgcacattttaaaatgttaactaaaatacacaaatttaagtctttataaaattggttatacgatatcaaatacagtacacatatctaaagttataagagaaattattttaaactatccttttcatctttttctaatagtatagcaccaatcaaaaacaacgtgtcaatcaattgtagataaaatgtatcccaccttttattatataccctttttatcatacatcttcttagataattctcatccaacacgtaatcgtataaatatagtattaaaatccaatctcttaagaacaagataaacaacattagaaagagaattattatccacgtaaaaaaatcattagtctttaatagttttaacgttgactacataatacaaacgcgtggtttcacgcactaaagaaagagcgtgcagcgggaaaatttgccgtccttaaaaactcagaacaaaaaaaaaaaaaaacagatcgatcagaaataaatagaaaaaaaaaagattttcccttttttaaattaaaatttctttgtttcatcctctggagatagaaaaggaaagaaacaatttacaaaaggccttaaaaaagcaaagattcttcgctgacttcgttctctctttcgctggcgaagaagattttctagggttttttgtttgattttcgtgaagtcggaaaaattattattattaatcgtgttgagctgtttgatcggtgaagactatggcgtcgtcttcagcttcggcgacggtggctgttgataaagctaccagcgatcttttgttaggtcctgattggactacgaatatggaaatctgcgattctgttaattctcttcactggtaagtttttgctcgatttggtgttgggaattgttgattgttcgctgcaattggatttatcttggattggttgatgttcttatgattgcgtgataattttgataaaaaggttacaattacatgcataatttgggatttggtgttggtagtattgattggagtatgaacatcttacatatttgcatctgtgttaatggttttgtggctattgattttgctcaggcaggcgaaagatgtagttaaagctgtgaaaaagaggctgcaacataagagttcgagagttcaactacttgctcttacggtatgatgtttctagtgaatatttgggaccttgttccttggctaattattctgcgtgtagtttcggctcttctgaactctctatgtgttcttctgtgctagcttttggagacgttggtaaagaactgtggagattatttgcaccatcaagttgcagagaaaaacattttaggggaaatggtcaaaattgtgaaaaagaaggtagctcttgttcacggttctatgtgtatatttccgtactggtgattgttcgtattgctgatgatatggaggtttataggcagatatgcaagtaagagataagatattggtcatggtggactcttggcagcaagcttttgggggtccagagggaaaatatccacaatattattgggcatacgatgagttaagggtgagtaattttcttgaaatgtaaagtattttacttgaatacattttctgtcacctttagtggacttgtttgttgcttgtgatattttacttttcggtcattgtttattttaaatttgaagtactgtgtattggtagcaagtctggcatttgttgccactacttttttttccgcctggtgctaaatgtaaaagttcagtgtttatagttgtggagtcgtgttgctccgtgcatttatcttcttcagatctcgatatacatggaatttgctttgcattttactgaggggctcatgtgcatgatattcttattctcaaggttgctgttacatgttgcagcgttctggagttgaattcccccggcgttcacctgatgcgtcccctattataacaccaccagtgagtcatccaccgttaagacagcctcaggggggctatggagtacctccagctggctatggagtacatcaagctggttatggagtacctcaagcgggttatggaatacctcaagctggctatggagtacctcaagcggggtatggaatacctcaagtgggctatggaatgcccagtggttcttcgagaaggcttgatgaagcaatggcaactgaggttgagggcttaaggtaagtggatttgttagttcaatatgttgttaatgtgctgccagttttagatttcgtaccaaattttccactgtttcaatattcttttcttggttaaattgtagcttgtcaagtattgaatccatgagggatgtgatggatctcttgggcgacatgctacaagctgtggatcccagtgaccgtgaggtattgaagtctattatacagctatactgcgggtttgggaatgaaatctattgctttacccatgatttttctgttatgtaggctgtgaaagatgaagtcattgttgacttggttgagcgttgtcgttccaatcagaaaaagctgatgcagatgctaacctccactgggttagtcctttatttttaggatctttgtacttaaatttgttagatgtgtaatgatattgttgatctgacaggttccattgttgtgctaaaaagtcttttgtttatgtggcagggatgatgaacttttaggccgggggctcgatctaaatgacagtcttcaaattctgctagctaagcatgatgcaatagcttctggttctcctctgcctgttcaggcttctggttctcctctgtcagttcaggcttcgaaacctgctgactcgagccccaaatcttctgaagctaaagattctagttccatagctggttccagttccccaataccagccactgtttcaacaggaaaaagcccaattgatgaggagtacgaagaggaggaagatgagtttgcacaattagctcgaaggtctgtcttacaaattacaattggattcagaaactgtgcatatcttaactttagtatttgacatatcactctttatcgtttcaggcattccaaaccgccagcatc

SEQ ID NO: 34906 - DNA, 4848 bp, Arabidopsis thaliana landsberg
cactagttttactgctgatcctcttctgcctcaccacttttgagttcataacttttgtctttatttctccatatcgtcttatccttaattcatatgtgtttgataaatgataatgaataattcatcattctcttcagcttcatgttcatgctgctgaagattcacaagtcggtgaaggcgtagtgaaaattggtatgtaacgctaacatatatgtaaagtgttatatctctgtttatatatgatttttaaacggttaaaaactagtcatatgtgtataaatatatcatgtgaagattgcggtgggagatgcaaaggtagatgcagcaagtcgtcgaggccaaatctgtgtttgagagcatgcaacagctgttgttaccgctgcaactgtgtgccaccaggcaccgccgggaaccaccacctttgtccttgctacgcctccattaccactcgtggtggccgtctcaagtgcccttaaatatatacgtacacagatgtgtatatatgtcttccgcgagcacacacgtacgtttatgttttaaggacaatagtatgtatgagcagctataaacaaaccagaagttaatggttcatgttgaactagtataagttgtatgaactgtgcttcttttgaacaaccacttttgctgtaagtttagcaacccaaattagagattacaaaaaaaaaaatgaaaaatgtttaaaaaacgcggatttttaaatttgggattaaaaattaattttcatgatgtttgttttggttgatttgtcaataaattagctaagttttgtatactaggccgtttaagatatgctgttaaatttttgataatagagttgccttagaaactcataacgatatcgttttagcaaaaaactgatttcaaccgctgacaaatgaaaagaatacgagtttgtaaaccatttagccacaataatatttttgaattctaacaaacaaaagtatatatataacgagtactttttgtaagatcgtatatgttagtattactttttggtctctcgtcgtacgttggtttctcgttataccgttctagaacctagggccgcctgtgtcaacataattatgtctggtttttaaaaatttatgaaatttgaaggtttacgtaactataaatttgaagaatttctctttctttttttaggcctgcggccatgttgggtttttaaccttgtaatcctctttattttaatttaagtggaaatttaaagttaaaaaaaaagaaaaaagaaagaagaatgttttacaagaaaattctgtatcggtttttatttggcaagttcttttaacatgaatttatcatattaaattttttgattttatgtatgttatatgatcagcagaaaaaggtagaaaattaaacgatatagaagcaaaaacattatccgagtagaagaaaaatgaaaagaagaagaaagagtaaaagcaaacattgacggcgtcaaagttgagtccttttacctcctaaaaattgacactgcacttattgatcaacgtgtacttaacggtgttttcgccgacatgaactccggctgctttatcagcctggtttatgaacgcctgacaacgaacatggagatgataattccctatagtaagagtcccgaccttccacctcacgcgtccatcaacgcatatagtcaacgtgaaaaccccactattctgctcgtccccgagagccacggcgttgaaaggagcgatagggacttggtttccatataataaaggagaccaaacgctattttctttgtgtctttggtacgtcggaggaaggtcgctagctagagtgatttgctggttccggtaagaagcgtaggcgtgaagatggtcgtagtagattccgatgttggagtttcggttgcgtgaagcgattgttatctgaaactttgaggtgaggaggttaggctgcgagaggttaaaggcgtagacggtggtgtcttggaggatgaattctgggtttttcggttggaggattatccaaacgaggaagattgtcatcaagacgatgatgatgaagccgatgattgctccacagattctacaggcggttccgcctcctccaccgccaccaccgtggtttccgcactctttggtcgtcattggtattatgtatttacggctttgtgttgggatttctctttttctatgattgaactctaacacaagcaacctaatttatagagttatcattctaacacaaaaatagtaacttgctaattcacattgtgacaatttcccttttccttgtgtgccttgccttttcttcatgattttctttttggtcaatcctcttggttgcttgattttcttcttttcttgaatttcctttttcttgattaggaaacaaatctatttcaacactttgccattatgcttcgttgtgtgatggatggagaagatgtatgagtgatggagagagtgaaactatgattagtatttatactgatgattataagtgatacagttttgtgcctttgtccgcctttttatttcaaaattacacttagctagttagctaggcggtagaaaaaattgaatcagtactttacaaaaatgtgattttctaatgttcatctgagaaaatgacttccatctgttggaattaacgattgtttttatgttttttgcgacaacgcttattgcagatttcatcaagattttgtctgaagggatagtattagtgggcagctcaagtatgtcgaggacgttgctcaaactcaaatgctaaaaactaaaaaggtcacataggaagttaggagtgtcattgatggatgaatttgtgacttgtgagctttattttgtatatctaatccattgtgggccgcggaatttaagcccatattaaacgtatctagttattctccgattcacatgtgatccttactttaaaaatgtgccgacctcccaggatcattaaatgacaaccgatattaaaacattataagaaaagaaaacatagaacatctataaagctattttaattgtcccctccaataatatatagtattttattttcgaatccgatattactttaaaagttgaaacctctcctccaatcattttcctcctcacattctacttttgaattaatttcttataatttcagaactacgtcaactaacaaacatatatattccaggaatttatatgacatgtagttatagcagattcaaaccaaaaattataatttacgagaagatcaacaggaaaaaaaacgtagacaaattaaacgatattgaagcaaaaacattatccaagtagaagaaaaatgaaaagaagaagaatgcaaacattgacggcgtcaaagttgtgtcattttacctactaaacattgacactgcacttattgatcaacatgtacttgacggcgttttcgccgacatgaactccggcggctttatcagccagatttatgaacgcctgacaacgaacatggagatgatacttccctgtaataagagtcccgaccttccacctcacgcgtccatcggcgcgtataatcaacgtgacaaacccacgattctgctcgtcgccgagagccacggcgttgaaaggagcgatagggacggagtttccataaacgaaaggagaccaaacgttgtcttctttatggccttggtacgtcggaggaattgctgtacgtagagtgatttgttggttccggtaagtagcgtagacgtgaagacggtcgtagtagattccgattcttgagtttcggttacgtgaagcgatcgtgatctgaaagtttgaggtgaggaggttaggctgcgagagattaaaggcgtagacggtggcgtcttggaggatgaatcttggttttgtcggttggaggattatccaaacgaggaatattgttatcaagacgatgatgatgaagccgatgattactccgcagattcgactggcggttcctcctcctccgccgccgccgtggtttccgcaatctttggtcgtcattggtattatgtatttacgggtttgccactatgcttcgttgtgtaatggatggagaagatgtatgtgtgatggagaaagtgagagtgagactatgattagtatttatattgataattagaagtggtatagttttgtgcctttgtccacctttttatttctaaattacagttagcttaggcgtaagaaaataatgaatcaatacttcacaaatatgtgattttctaatttgattgttgatcaatttctaatttgatagtttgcattcaaaaagttacatggagaaagtaaatgtatacggatgaatgagtttttaacttttcactcaattatgtaacaaatgtagcatacattatgtatggatatgatttgtaggggaaacaaaggagtggacataaatcagtattcttaaagtttatgctatttaacatctagtgtggtttgctcaaaaaaattaataattaaaaaaaaaatctagtgtggcttcatctaccctaccatttttgttaatatggtgcaagattcccccataattgtatcaccttgtaattgataaagagaaaacgaattttagattagagacgttcgttgattttcatttcgactaaatgacttgtctttgtatcttactttagagttaggaatattaaaattttaacttaaaaaagattagcacagtttcaatatttagtattggtgggtccataatcagcattggacgtacgtcgctcaaaacgatattataatgtccaaacgataatcgcttacataggttgcacttgtatgattgatagatattcaaacattttctcatatttggctcttaaaacaacagtattaaatgtatataaatattgtattttaaaatcaatct

SEQ ID NO: 34907 - DNA, 4214 bp, Arabidopsis thaliana landsberg
  unsure (1)..(4214): unsure at all n locations
tgctagagaagtgagacggaaggattactgagtttacaatctgatcttaagagaagagaagaggagatcaacaatggttttaaggagatgtcgattgagaaagagaccttagagcagcaactacaggttattgctatgaatactgatgttcttggctcttggattagggagaatcaagggaaagccaaggatttgctagtggatttggatgttgatgattcatttgaatgcattgactcattgtctaagcagatgttagagtgtactgcattggatttagctattgaagatgttgtttattccatggataaatcgtttagagatggttcgttaccgtttgatcagtatttgaggaatgtgaggttgttgtcgagggagcagttcttccaccgagccacggctgagaaagttagggagatacagatggatgctcaggttgcttccattgcagctaggttgcattcgtgatacttaagcaaagattttttggtgattactatttctattcgatttttattgggtataggaatatacactatatacaccagtgcatatacaaagttgaattgatcacgttttgggtttatcatcatcttctctgtcagtatttttatctaatgagaatcattttgtttggaattttgtttttccttctgcaattcccatctctcataacttctcatttggtctctctataagaaaatagttcgagttgtggtgaaactcatgacaatccactcaaaagtatttctccactatttagctttgctccaatttctggaggcttcactattgacaaaagaaaatgaagcatttgcaattctcttaataggatgataagtgaataaacagagtataaactcatgaaaatccactcaaatttctaaaatatgaaatgagtccaaacgtatagtatataatgatacaacatgcaaaatcacttgaaaggaaaatgggaaaacaaaaacacgaaaagcacatcaaagtaggaaaagtttcggatttaggtggtaagctccatgatggcagagactatatctccattagcgagcttgagcgccttaactgcccttggcttagacactcctgcttgggtcatcacaagctcgatgtcctttggctctactccctcctcgtctacctcttcatcatcatcatcttgaacagcagctgcagttgcagcactcgatgtttctccctgtgaaatcacgttgctgaggttgggagccttgaactgctctgcggcttgactctgcagctgcgagctcaaatcctctatcttggcctcaccaaagatcacatatgtatctgaagctggactcttaaacacatcaggttttgatatcacaaacaagatctgcaattttcaatccacattctatcaatgaatttggaaacataggaaacaattaacacaagagagatttaattttctgaagagcacaaacattcttgctctttttgacggtgacacggctaacaccagtgattggtttcatcccaagcttcaacatagctttacgactctttttctcacttctgctttgctttgaccggccaccggcctccccatcatgtcctggttaaacaaatcacagcactgtcatgacgtagctcatcagaaatgataccgaattcctcattctatatttaccaaaccaagtatcaaactttcaccagtcagggtgacataaaagcaagagaatggattaaacagataggctcattacaacaaagtttcagattatcaacaaatagacatctctgttactcttctacacgcaaagtaaattcaacttagctgcccgagtagtaaaaatgaatggaaccaaccacatcaaaaatttgaaacatgtagcattttggcaaatgaacttatagaatgcggacaagatataattgaagagaattgaaagaggcaaaaacaaaaaaaaacttaccctccgcctcgtcatcgtcctcggaatcatcctcatcattgtcatcatcatcttcaacctcaggtttatcaagctacaattccagatcagaagaaattagatatttatcgacttaagcaatgcgacaatcgacatnnnnnnnnnnnnnnnnnnaaaagaagattcagatctaaaattggtaactctagtgttacaaaatctaaaaccagtcactgagatcgaggtaggaagaaatcaataatacgaatccagctaaatcattttcagactttgaaatgaaaaaaaaaagaaacaaaaaaggtagaaaaagagagataattacatcgatcttctgctcttccaatttggcggcgagctccactttctgttcggcagtcatgttttctagagagagaggattatcggcgagtgacgaaaccctaaaaacccctttgatggaatggaattgattgctttcaaaggtaaaatataaaaatggttaaactcgttttgaagtaagtgcaccgagtcgggtttggtttggagtttttatatcctaaaccaaataacagactaaaagttttcggaccaaaccggtaaggacaagacaagaagacaaaactgaatgtactcaatagaatcgccgtctgtggggatcgaacccacggccacgnnnnnnnnnnnnnnnnnnnnnnncactgagctaagacggctttgttgattactgagcacttgattatttaattgacatatattattcatattgattatcttttacgctaggacccaagatctgaccgttggagcatgaactccagaaatcgataatacatgatttatgacataaatgtcccgataatcagatcccgctcctatttcctattatataatctctccgaccatcataatttgaccgttggagaacattactacttttcgcaaaagaagggaaaaaaaaaaagagagataaagctctcttcgattcttttgcaatcttctctcgcgggggttgtttcaatctccgaccaaacctatacaccacttccagtgctttcgaatagaacccagaaatggcatcgccacagagtaccaaaaccggtttgaatcttcccgcagggatgaaccagacttcgttgcgtttagaaacgttttcgagctcatttcgtgggatttcgagtttatcctcgccgtcaaaatcgacttgcagcgacagattcataccgtgcagatcttcttcgagactccacgctttcgatctgcaggataaggaaccgactaccccggttaaagagggagggaatgaagcctattctagacttttgaaatctgagcttttcggatctgattttgcttctccttgtttgtctcctgcaggtggtcaaggatctgcttcttctccgatgagtccatgtactaacatgttgagattcaagacggatcgttccaattcaagtcctagttcgccgttttctccttccattctcggaaatgataatggtcactccagtgactcgtctccgcctccgaagccccctcgcaaggttcctaaaacacctcataaggtattatatcgtttagatccaacctgtttatgtgatgttattacagattcatgagaagtagaaatgatagattgttttgtttttgatgtggtctcaggtcttggatgctccttctttacaagatgacttctacttgaatgttgtggactggagttcacagaatgttcttgccgttgggcttggtacttgtgtttatctttggacggcttccaatagcaaagtgagtgttttgatatacttgactagttcttaagatttgcacaatgtttttagttgtggtgtattcatttaacagtgaatttgttggttaggtgacgaagttatgtgacctagggcctaatgacagtgtgtgctcggttcagtggacacgggaaggttcatatatatctattggtacaagtcatggtcaggttcaggtgtgttgtttgttaccttccaatctgtggttgtggaaagttttgttatgatgcaatgaagttactaccggtttaatttttggcaggtttgggacggaacacagtgcaagagagtccgaaccatgggaggtcatcaaacaagaactggtgtcttggcatggaactcaaggatcttatcatcagggagcagagacagaaacatccttcagcatgatatccgagtccagagcgattttgtcagcaaactcgtgggccacaaatctgaagtctgcggtctgaaatggtctcatgatgatagagagcctgcgtctggaggc

SEQ ID NO: 34908 - DNA, 3713 bp, Arabidopsis thaliana landsberg
tattatggggttaccgaacttcctctttgtcctccttgctgtcctcagaatcctttcagtttccttctctgcgtcccattcgaagttagttcctgaagtaacaatacacagctttgtaatctagaatatgaacatcttcttactttagtctaccaaaagatggaattttgagctcttcactgtttcgactttagaaagtttcatacctctggtgttctcgttgatcaggcatgaaaaacctccatcaatatcttcttcatcggagtctatcacaacactgcattgctcaaactgcatgaattgaattgcacattccttagattttgatgaagttaaaacatttgttcttattatcgctgaccaatgcgaaaatgcaacccagtacctgcgtacgagtgctttcggatttcactggcttccttgttgctcttttcttgaaattgcttttttctggtttcaccgtcttccaacatcccacttgtatctttggggataaatatggttttacagctctggctgaggcgtcatttggactgtcaatgcaagataagcatttatataatctatctgtggtatatcaaaaaaagggtagaagtagcaaaccaatgtttgacctactttctcggaaattgtggttgtttggttttcagtgtagtattacaaaaggaattgctctgcaattgattttacacttgtgttagtgacagctgagctagtaagcaaaatggaattatgaggagagggatattcactgcagtagagtgagagttaccttggctactggaccgcgctgctcaggaaagttttccttagcctattgtttaacaaacagccacattaactgctgaaatttgcagcttaaagagcaaaatacatgaaaagcaagagactctcacttgtggtgctgctggaacctgaactcttggctcaggcatcttcaagctagtcaaaacctataagagatttggtagtgggaatcaaagcattacatgtcctataattctacaaggttgagaatttagagttaccttggccgcttgaccacgctgctcaggcaggttttccttagcctgataattaacaaaggctacattaattgctgaaatatgtagcttaaagaacaaagacatggaaagcaggacaaaccttcacttgtggtgctgttggaacccgaacccttggttcaggcgtcctcaagctagccaagacctataagagagttggtagtgagaattaaagattacatgtgcagacaagtctaaagatttatcgcaatccgatatgacacacagctctgctgagatagatataactacatacagattttcttgaagcactaatatttttacctgaatctctctggtgaacgtgtgacagatttccctttgtattttctgcagagcggtttctacttgctctgggatagttgttagcatctgtaagattttctgtagcttctcctgattgggatctttgctgaattcctccaatataaatttaacacctccatcaagactagctttagaatcggcttgttcctttctctgattcccaattaatcaatatagtaaggtaaaccatttgcacaaggtcgagaaagaaacaggaaatgaagtgattttaccagctgctgaagtgaagtgtcttggagagtcaacttttgctgtatgcgttcagctgcagtaaacagaagaaactataaatccagctaagtatctattgagaccttcacaatgagtatggaggaattactattgtcaagatgtgatcaacacggtcaagtgaattgatcttcaaacaaactgataaatctattggagcaaacaatgtcaatctgtgaattactattgtcaatatcacattcctaaaggagtaagatcagattgacacggcccctgctaacaaatcctatttggctaagcaaatgagaatccaagggaatacactctcctaacccctgttcagttgctagcctatgtggttgctacatactttgagaagagagcgaatttggcattttcaaatatgaaatgtttaaaatgagacaatcatagaactcactttcaagaaatacttctttagttcctcgattggcttgcatgatgtcactctgaattgaatccaacatcattccaaacctgctcaaagaagtctccatcatcccaaaccgttgctcaagctcttcactgatctgagctactaggtgacaaatgaagaaaagttgaatcaaattaggaacatatccccacgctaatttgtgaatttagaaagagcatacttacacttagactctccaattgaagcagaactccatcttctcgaaagaccacttgaagatctagaagcgaccaactgactatcttctcgtttatgattgattggaggtaagcaactactaaccttcttcaaagagagatctctttcctgagaactaaatctctgtgcaaaaaggaaaagcaagcacagaaatatgaaatcgataatcagaagaagagacgatctatagctaagtagcaaacctgatcgttaatgaggagttcgtcgatagaactctgagtcatctgagaaaaaccaccacaaccacgctgagacgaagaaggtccctgagagaaggactgctgtgactgttgagatcgaagctgctgagatgcttgtggttctgctgatctccttctaattccaaagagtaaacattatcagtagccaaaaccctaatggattctcctgggaagcgataaattagttggtaatagatcaaaaacaatgtccacatacagatcactgacactcgtctccagtcacaaaccagattcggaacaaaacaaaaaccctaaacgatggaaatcgcagtgtaatctcaaatcaaattgtgaaagagagagatacggagagaagcgagatggcaccttaaattaggaggaaagacagaaatagatttcagatcgcaggctttgttaatattcatcttcatcacccaagatctcactacccagtagacgaagacgcagcagcagctattcacgataatgaactttatgctatagagagagagagagagtgagagaactgaaaccgaattttgaattttgaaaagatccagagatagagcgactgactgagaggaacgaaaagtgggaaattatttttatttttgttttaagtttttgctcttgtgcaatgaatatagcggggaagggacgattttagaggcccataaagcccattagctgtgtataaatggcccatactgaatgcaaacccaataatttctagatgaaagtgacaatgaaaacgatttatactgaatgcaacacaacattaaaaaatgcatcacacaaaccgttaagaaccaaatacagtatgttttctttttaatatcttcacattccttttttttaattacatatactaattgccaaacacacaaaaaataaaaaaagtggtatcttttaaaatcatactattagaactaaaaccccagtgaagtcaacatttataaaacaaacttgatgtatacgtgtacaccaaaacatctcccgaaaccaataatttccgacaatattcttagaaacttaatgtccaagtgttaaggaattaattaacactagtattcccggaaacttaatatacaagtgtaaagttcaactgctccgtcgaattaaataatatatgaccgagaccctcacaagccattgacctgagaaaataacacg

SEQ ID NO: 34909 - DNA, 3423 bp, Arabidopsis thaliana landsberg
ggacttgggtaacggtcaaacccttctgttttttctctcttcccccgacgcctcctctagggggtcgtgtggattatgaaacgacgccgtcagaacctttccggacagagtcaccggactttttgattgtcggggagacctcccgccagaagtttgccataactgtgtcgcctttgccgtcaaggacaccttaattcggtgtccgaacgagagagatgtcacgctcttttatgatgagtgtacgctaagatactcgaaccttgtggtaacatctgctctagatcccacttatgtataccatgtttgtcccagctgggcaaattttcccagaagcagcacttacatgactaatctcataacccttttgtctactctctcttccccctccgcctcatactccactggattccaaaacgccacggcaggaaaacaccccgacagggtaacaggacttttcaattgccgtggagatgtctcaccggaagtttgccgtagatgcgtctcttttgccgtcaacgaaacctcaactcggtgtcctaacgagaaagaagtcacactctattacgatcagtgtacactcagatactctaaccggaatatcctctcaacttctaataccaatggaggaattatcttggctaacagtcagaatatgacatctaacgaacaagcccggttcaaagatttggttttaaccacgatgaaccaagccaccatcgcagctgccaacagttccaaaagattcgacgcgagaagtgccaattttacgacgttgcatagtttgtacacactggttcagtgcactcatgatcttacaagacaagactgtttgagttgtctagaaacagatcatcaatcaattacccactgacaaaattgggggacaatttattgtaccgagctgtagttcaagattcgagctttgcttgttctacaatcaatccgccgttacaacacctcaaccgcagcagaattcagctcctccaccaccgccaacttcaattccttcaccacgacctggtctgaacagtcgatttcctttgattacatgtttaagcgcagtttcttttgaaaagttcaaagatttgctaaaaccagggttcatatgtattctaataaaaattgtttctgagaatacaggaaaaggcggaaactcctctgtcataattattgctgttgttgtttcaatcactgcccttcttctgctctttgtagctgtttttagtgtccgcactaagaggagaaaaaagatgattggagcgataccgttgttaaacgtaaagagaaaagacacggaagtcacggaaccacttgctgaaagtaaaatactcctctttataggtcaagtgaatagtctctgatgtattaaactgtttaagttgttgctacagatggggatagtattacaactgcaggctcacttcagtttgattttaaggcaattgtggcagcaacgaataactttttgccgattaacaagcttggtcaaggtggattcggcgaagtttacaaggtattaccattgaacagagcttcactatatgaggatgttcatttcacagttgcggaacaaacaagcactagttattaattatcatcgtccttcatttgtaacaagaactgacttcttcagaattgcatttgagtacatcttcattttcatgattaatcttacagtcagttccttatgaatatttatcaaaaatattacttaagtagggtacatttcctagtggagtacaagttgcggtgaagaggctatcaaagacatctggacaaggtgaaagagagttcgaaaacgaagttgttgttgtggcaaagcttcagcatagaaatctggtaaggccgcttggttattgtctggaaggagaagaaaaaatacttgtctacgagtttgtgcccaacaagagccttgatcacttcctctttggtcagttaaatttagtacgtagccaagatattttcaaattgtatgccattctttgttcttaacattttaaatacgctgtacagactccacgatgaaaaggaagctagactggacaagaaggtacaagatcattggaggaattgctagaggaattctatatcttcatcaggattcacgactcacaatcatacatcgtgacctcaaagcagggaacatcctcttggatgttgatatgaatcctaaaattgcagattttggaatggcgagaatttttgggatggaccaaacagaagccatgacaagaagagtagttggaacttagtaagtattgctcttgccacttttttttcatcaatagaccgtaatacgtttcaatcaactaaaaaaaataagaattatggcagtggatacatgtctcccgagtatgcgatgtacggccaattctccatgaaatcagatgtgtacagttttggcgtcttagtacttgagattataagcggcatgaagaatagtagtctctatcaaatggatgaaagtgttggcaacttggttacatatgtgagtataaagccttaaaacttctaatttctttttgctttatttaaaaacgtgaccaaagtctaaattattaaaatgttcaatagacttggagactatggagcaatgggtcgccatcagagcttgtagatccgtcatttggagataattatcaaacaagcgaaattactaggtgcatccatatcgctttactatgtgttcaggaagatgctgaagatcgtccaaccatgtcatcgatcgttcaaatgctcactactagcttgatcgctctcgctgagcctagaccacctggatttttcttccgaagcaagcaggaacaagcaggtccatctattgattcatctacgcattgttcagtcgacgaagcttccattaataatgtaactcctcgttgaagacaaaagtcgcgatatatgatttagtctattgaattaagcatcgatcgacaacaaacaaaggtttagttgttaattagctctttcttaggttttatagtctgtttatttgttagcattaattatagcgtttttacgattaaagtaaagcaaataaatggtgtaacatatattgtaaatgaaattgtgtaatggtgtagggaaggaatcaaaacctctgaacaatgcatgtgaaaactttcttctttttagtgtttttattgagtaactagattatatttaccaaataaagagagttgaagtaagacacaagcatatgcaatacttttgaaagagtgtcttgcaagcaaaatgtataaaatatagatgttaatatacatacatgtgatgtatgcagatacatataagcctatatataataatttttgtagagaaattgtgttacctttaaagtcatagatatgataaatgatgttatctaataacttttttcttttcaagattagatggagctctatagtagtcgtttttgctaaaatc

SEQ ID NO: 34910 - DNA, 2774 bp, Arabidopsis thaliana landsberg
gggtacaaacttctgatgacacgacacagcttttgttttttcccaccgtgattccgtgactgcccgggactaccttttcctttgacccggctacgttctccgttgttctaagcaccacgctacgacctaacaccgacgtcgcgaaatcgatcatatcctccgctgatcctacgcaccgtttcgtctctccgacgctcggtggcctctcgcactccgtcactgcgtcggtgattatacctcccatcgtcgaattctcaacggcgtggaagattctcttaatctcaccgagtttagaagtagagaagggtagtttcgtaattatactccggggtaaaaacgaccttttaggcattttatctttaatatcaggcataggaatcactgtaccttctttaagcgacgattctctaaagaatttacccggttcgatccatttatttacggttttgccatcgccgacggtgttcgcggtggttgttgaaacgttgtatttagcaaaagcgacgccctttttggcgtagtccttgaaagtagagtttggtgtataggttttgaagctgagtttgcttccttcagctcctttgccataaccggtgaaagtttctgaaccgggattgaaagattgaccgtaatttacgaaattaaccttctccgaattcgaatctttcgcataggatgagaacgaatcgtctccgacgttggccttgtctctgtaattcgcgaaggtatccacggcggcgttaccggaagcaccgtagttattaaaattgttctgaggtacattaccgtcgcttccgtagcttgtgaaggtatcgttcgccgcgtttccactctcgccgtagttagagaaaccggagccgattacattggaggagacgccgtaagaagcgaactcgttaggaactccgtttccgtttttgccgtagcttgtgaatgattgaccgttaccggcgttagcttcgtgtgtgtaggttttgaatgtttgagatcgaccgttacctccgtcggaatacgccgtgaatcgactcgttggattgttcacgttgttttggtagttagtgaaatctccggcgccgccggttccgaatgttccgtatgaattgaatccttcctctaccacgttactgttttcaccgtagacagtgaatttatcgtcgtgacccgccgcgttacggctgtatctccggaacgaatcggttacgacattaccgtctttcgagtagtttttgaacgaatctgctcctccggcacgagcattgccgtagttagtgaagttcttctggtcataaacggggaatttaacgtcgtcgtcgtgtttctcgagactcgctcctaaatcaggaaaacagaagagattcgcggcggagcagaaatcgggaaaacgagtcggcagcgagttcgcggcggcgagttttgagaaagttgctgagtctacggcgttgagtggtgaagcttttgagattaaaaactccgatctgggagattggccacgaatctctttgttccagtaacgaactagagatgcttttggagtaaatggattctcctccgctgagaaaccgccgccgaatgttcttcctccgacgataactacctacattgccaacaaaaaccaaattcattcaacaacaacacgatctatgtaaccgcaaatttaaaaattcactagataataatcaatagtaaaagagattgaagaatatgctttacattgaagaggaagaaggagaaggattggagaagaagaaactgtttgagcatttttgttcttcttctagtgtctacagagagagaagggcagagaagaagagattggtgggcttgtttgcgtttgagagcggattgtgttatatatttgtggtaatatatatagaagtcaatagcttacacaattatgttttctccataactaaaccctacacaattaaatttaaatctatttatagacttttaatttttaatttatttataatttatgtatagttggtaacgtataattttgtgaataatttaagaggagcgtatttaatctaatattttaagtgatttgtgtaaaatttacaaattttatgttatttaattatgaattttaataattctaataaaatttagtgttattaaactaataatttaaaaatttactgttattgaaaacggtttgtcaatttgattcttattaattttgaaagattggagaagatttgagaagatttttttagttaaaaatatagaaatccaaattatacggttttagatgaaatttgaaaagattttataaaaattcatatcaactttcctaaaatcatcaaagtcatataaaaacttactaaaactcagatcattttccaatacatctcctaaaagcttggtatcctttgactagacatcatctttcatagttaattttttaccaaaactatataattgagttcaattacaaggctcagattttgtttaaagatgaaagcacttaaaaccattagtcgaaataagaaaaaaaaaattggaaccatgataatagtattagtaagtcatgcatacatgcaacctatgtttacttagccaccacatttttttctgtaaaattcagaatgaaaaaaggatgatagttggataaaccaagaggttcttggtctaatagttaatttgaaagatgagaattttgattcgaatccacttagtaggaaagttgttccaaaaaaggctccgacggtgatcgaccgcattgtgcgtgcagtgtatgtagatatttcgttctattagaattcattgtc

SEQ ID NO: 34911 - DNA, 1932 bp, Arabidopsis thaliana landsberg
  unsure (1)..(1932): unsure at all n locations
ataaatatgtaatgttagttctcacttatatatatatatagataatcttagctaattgtgtaagtgagaactgacattatatatttatatgttatagagacaatccgttgaatgttagcagcctcattgagatccttgacaatgcgtgacttgtatgacctccacaaattttccatctgctttagcacatcaatcctttgaaactcctcatcaagcttaaaccttgcctgcaaaataactaaccatcaaaattgatacactatagtctatgaagatgacacactaaaatggacatgttacctgaactgacttccacaatactgttttgatatcttgactaacgtgcttcaagttttcaattataacaggatcatgctctctaaccaatgttccaacgtatgatgacagcttcaatgaccctggaccatacggatcggatctcccatgagactgtaatcaactttttctctgacagttggatctttggcaatgttattcatcttgggttggtcccctatgtttcttacgcttaggctgatggtcttcagataactctacctcaccttcaggaacatcctcagctccatcttcaggcagcccgtgaggttcaggaagctccacagttacagtctgaggctcctgtggcattgtagtctgaggctcatgtggcattgtagtctgagtcacagcataagtaaggttcaaaatacatcatcaatataaagcaagttttaaggttcaaantacaacctctgtctgaggctccacaacctctatctgaggctccacggtttcagcctgagactccacagttgcaagttgagcctccacaacaacatctttcttttttgattcaacagttttctttcttttgtttgcacccttcttcttttgtcccatcttaattcacttgtaagaaagaacagaaatagttagaacatgacaataatctaagacacttaacacacatatgaattgcagacatcagaagaaaagcaaaggcaaatatacaagaccctatcaaaatgcaaaagaaagctacattttgcacatatattccttcacaatcagttctagcaatctcagaatcttccatgtcaacatccatgtcaatatctgctggcaatggaccaatatctgcgttgccctcctgaagatcttctttacagtttcttcttgaaaaaccttgcataactacataccagcttgatgcatcatcttctctagaataaaagacttgctttgcctgagaggctagtataaacagatctttcaataagctaacttgactctgattcaagttaacaagcgtgaacccatcttctaccttagctccgtttcctctaactgccctttgacaccggaatataggcacatagaacacattataatccagcaaaatgatatctatgactctaccatagtaggataccaaatccaccacttgtgagttatctttagcactagatctacacatagcagttgcctcataataaatcccactattctgactttgcctttgaagtgagcttgtgtggaaacgctgcccgttcactatatacccagtaaaggacctagcactacatcgtggaccatatgctatccacttaattatatcttcatgttcagtcgaaccaagaggtatctagcaagcggttaaagagactatcagttagagttaaccagaatcaccgtcatgagatttcaatctattctcttaaccaagaaaagagatgacttacctgttcttttaaccaagaagcataattcttggcatgcatactccataagtgtgatgcgttacgcctacaccttggatttgaatcttgtagatgttgtagatgcatgcttataaaagagaaatttaagaatttcagttacatatataatcatattgatcaagtgcagccatgttttaagaaagaaagagac

SEQ ID NO: 34912 - DNA, 2195 bp, Arabidopsis thaliana landsberg
  unsure (1)..(2195): unsure at all n locations
tttccttacaatattaattttttcctcttcgtttaaactttaattttctccgactttggaaattttcttctttgttgtttagtaatatattttacaaaccaaaacataaacttataattctaatattaacttatttgcttttttttggtgattgaaaatttcctttgttcatgaaaagtaaatatgtcctcaccaaaaaaacaaaaaaaactaaatgtgtctacatgagtttaatttttcatgttgatataaactctttcttattatgtattctttacaaatatataatttgttttccttttcaaaaaattttaatatagaaattagttataattataaaaagttaattaaagtgattgctaaaaaatgttaattaatgacatggtcaatcccgattggtcgtttaaagcttaggtggacggtctaaaaaacaattagcttcaacttttttttattgtatagactaggttttgaacccacggtcgctacgcgtgggtactttttatttattttggtaaaaattatatttgaatgataataattatcaaatattattttaaatatattgtattttttttaattcaataattattaaaaatcattttaaatacataattttaaaaattataaaaaataactgtgtttaagaataaaatcagatcaaaagaatcattaatcaaccttattcttcttctctttcatcgttttcttactcttcatattgtttctcgtatcttcatcgtcaaatattttgtagttgttgtcatcgttactctcattgtccgcttcttcgnttactcttcttctttttcttcttccctttccttttcctcgntattttccacactttattcttcatcctctccatcttcttatgtaacaaacatttgttattatgtggttaaaaaacagagtagaaaatttaaacttactaacattaaccaaacatatatagctcaatatgcatgtggattaactattcaaaacaatgttgttcatttaaccttttgaacctgaaatttgatgtctttctaccataatttagttccacgtctcctacaaagtttcagaatactcctactaaatttcaaattattcagagtatgtttagatgttcgtttaatgtctatacgggactggtgagatctaaaacttcagaaaaaaaatcttttcaagcaggttgaagaaacttagataaaacaaatacacacaagaaaaccccgtttaaatctatatcataccattaaacctacatacattaacaccagaaaccatatatccacgtttctctctttctcatttatttttttttacgttgaaagcgaccctctttgatacctagattatgacgtcaattgttcataatgcaagggaactctcaacaattaaatttattatctttcttatgtcttgccaattcccgttcttgactggaattggtactccaaaaagaaaatttttttcacaattttaacaaaagtctccatacattttacctggttagatttcatccaactaaattatatacaacctaagtttttaaaaagaactacacattaagttacctcattagccatagatgtacttgcaatttcacgtaaactatttttactatattggtctaaacatcttttccaagagaggtttcttgcatggtcttacatgtatgattgataatttgattcatgttaggttgtttgatctactttttgttaatattagcttcttttgggacttatttctcttaatgcatgtgttcggattgatcaccaaatactgatccaagggattaggactcctatcgggtaactctaatcccaaaaatagtgttaccaatccttcgtgttgttgcttgcgatagttgagtaacatgacttagagtactaagtgaatcaatctttaatgtgttgaactatgcgtcgttgcttgcgaaagttgagtaacagaatatagggagttttgactattagacccatagcctggactaattcgcttattcagccgttcttcctttgcggtgtctatggcggagttggtggcgttatggtgggtatagctgtgtgattcggtggttagcgactgttcctttggttctgcttggcttgcgtgaaaatcgtctccagaggctctaatatctcaagcctatttgggtagaatctaatatatatatatatatatatatatatggatatatg

SEQ ID NO: 34913 - DNA, 4418 bp, Arabidopsis thaliana landsberg
  unsure (1)..(4418): unsure at all n locations
acctcccacagaatgcggggaagccctctcgtgcaagcccgtcagtgtgggcagtggcgtttccgtcgtctgaggatccgtggaagtcatctgtgtacggttaagcgtaagtaaaggaaaaagaattataaaaataacaagaaaaataagactcggcctttctttagttgaatgaaatggtactggggaacttagtttggtcataatttaagtccttactaattttccatttgtttaattaaagaatgcatgcatgctcgtcctgaccgacctcacaacaagataaagggaatagggaaaaactcccatcctgtaaaagtggcctgtagggcctaatcacttagccacctagctacccttctatcatcctaaggcttcacgtcctaggtctatcctactcgtcctactatctatccaacattgttgctatcaagttttatttggaaaaaaggtatttacattttattgattcctctgtggtggtacaagctccgataccagctgtggcggaactgcccgaattattccaacttaagtgtccaagtcccgccttagaggctagaccacacttaaatgggaataaaccgtcaatccctcggatctggtccgacacggccactgacaggatcaagtaccacaatctcactcgaaggtgagtcacagagcaaatacaataaagcataaaaccatacatgccataatgttaaattattacatcaccatcatcatcatcggagtttttgcaaaagtatccatcattgttcgaagtgcagcggaaataaactaacggtaaataaagcagagagatagggaagcctgtcccatcactcctcatgctcctcctcagccgaggcagggtcccactcgacagtccaacccggtggcagggtggtcggccaagttatccccgcaaccatctcctccagagaacctgtaaaaattattccacaagcaaggctgagtatactaatactcagctagacttaaccggtgtgaggagtctactcctctacctctagactatgcagctgtttggctggggggtttggtttgccaaaagcactagctgtgactaaaagcaaattttagcttttcaaattctatcatcattaacttagctagatttgctccttttaagcatacatggtaacaatcatttagttcaatcaacaatttatctcatgtaaccacatttcacttcttactcgatgcagtacaaggggtcaagcagtctcattagctgtgagaagcagacgattcgaatcgagttttaaccttgcaaggtaaacctaaacacacgacatgtcagggtactctgaccctacacatgtcaactgtcccattgattccccgttcgcggccaggcctcaccgccttggcatacaatgctccactgaccccggctgccgtcctgcagtgaccgcacttgtacccaccatagctagcatgggagatcctatctcaggtcgcgtgaggggtaaagtccgcgcccgacttcacgcaggtactaggtttaccggttaccatatttcccgacatgtgtttagtacgttcaaacgcttgactcaggtattgtcggcgtttcgagaccggggggtccctgggccgacgagtgaatgtcaccgcgtgccccagctgtcggtgttttgggtccgaccgcacacccggggttgcccctcaaggtgtttttaggagtaggacggtgtcgacgactgtagcaaaatggttcgtgctgattgcacgagggacagtggacaatgtttacaggttcgggccgcttagagatgcgtaacaccctacgtcctggggagtatgcttggtgaatgaggttacaaggtagctctctgaattgagaatgcagagagttgaggtgggcggctgagtaatagggtcgatcgttttgaaggggtgcccctaggccttatatattcgaccgtggggcaatacacgtggatatgataactatgtgcacctaaaagatagtgaacttgtttgagtctatcttcctatgattttgcggacctatcctcgcctggatccgctgcatggggctccatcgcgggaaagtcggatccttgttgtggtcgcttgctcgacgttgtgggccgtccgggtttgcaccaatccgatctcacgtcgctctgcttcagttcggttgtttctccctaggcccatgaaagaatgaccttatgatttattgggcccttggctgttcgtgaggtcttttactcctttagtggacccgggggatatctatcccccacacaaacatactgtcgtcgtgttgtaaagctgcgtttcttttcctcttgttttgagtatctggacttatttgtcggtaacagaattgtttgtccgagcgagagttacttttcacggaaggtgatgagtgaggtatccgtatcccggaggcgtaggagtccctcggctcggtcggccttgttgttcgaggcttctcttgcttagttaaaggaacccctcggccgctcttcgatgagccgaagccgggggtagcagtgtcagctcgaacagaggcagagttggcttcgaaaagaagacttggtcggcgggagctagccgggtcgtccgctggcgggaccgacgccggagttgagttgccgaggccacgggtcgggctcatgtcttcgggggatagccggctgttgggggccttcggcttctgaaggtcctcataaacgtaatttgactatgttttccaagagaaatatgtgaacaggtaccttcgaagacagattgcgagtatacaagagcatggtcaagacgaagcttgactgggatggaaggcgatcatgacgaaggatgagacgatcacgaagctatatgcagaaaagcttcggcatgacatcagaaaaagggaaccgacttaaagatgaaaagccaaattagacctcgaagaattactatagagttattgataaatgtanagggtattaatgtaattttacacgggctgcgtccgtgcctataaatagatgaatagtactcccgtactgctcacgcggactgggcattcgctttagcatcacgcttgtacccttactctccttcaagccgaagtacatttgtaatttgtcgttgtttacacaagtaatataataaaaggaaataataataatgtttaaagtaatcatgttattttccgtgttttgtgtataaatctctctcatcttttattatgattatgaagctgtgaccttcataaccttcgtccgaaattcattatatccgaagggaaataatgcttcgaaggacgaagggctttgatatttacattttatgttgccttgttcttaactcttagcatttgagaacaagtccccaacattggcgcccacctccggtgaactcacttccatttcctgagcttttcgacaccttcggcaagcatcagcttcgtcatgccgccgaagaaggcttcagcaccaggggctggcacgctgcagccgctggaccccaatcaagacgtcctttctctcagagaggcacgaagccagaagaggaaggctaccagtccaacacatccggaggatgatctagatcaggagattcagaatctggaaatccttcagcagcaggttcaacgcaggaaggagaagatggccaggctagctgaactgcagaggcagatagatgaagcctctgaagaagttcgtcatcttgctcaggatgagcaacaccgaaggcctcagcatcaagaccttcatcaggagggctttcacaacgaagacgactggtatgacaatttccatcgtgggaattttgtttttgatgatacttctcccctgtccgctgagttacaggctacaccttggcctccgtcctacaagccgcctcagctccccgtatttgatggccattcagacccgaagcagttcttgatgagctacgaagcaacagtgtcttcgtacggtggcaatgcttcagtcatggccaaatctttcgttatggctgtcagaagtgttgctcaaacctggtattcctcccttcgaccaggaacgatcacttcatggcagaagctcaaagatatgctggtgacaagcttccagggcttctagacgaagccagtcatagctcaggctctgtttcaatgcacgcaagatcacgagcagtatctccaggcatacgttcgaaggttcttgcatctgagagcacaagcgcctatagtgcccaatgaaattgtcattgaggccatgatcaaggggcttcgtccaggacctactgcccagtattttgctagaaagcctccacagactttggagaagctgcttcaaaagatggatgaatacatccacactgataatgactttcgtcaaagaaaggaggaagcctacaggttctctgagatgaccaggggcttcgaagcgagcatccacccaaggcacgtcagatcaatcaac

SEQ ID NO: 34914 - DNA, 5687 bp, Arabidopsis thaliana landsberg
tatgagatggtcaaggctatgggaaggaaccggatttgtttgtgtggggtgctttgttactgggtgtaggaatcccgggaacatggagcttgcaaggattgcagcaaagcacttagcagagctcgaacctgagaactcagggaatggtttgcttctgaccagtttatatgccaatgctggtagttgggaaagtgttgtaagaatgaagaagatgataaagaagaagaggtttagaaggtttctaggcagcagctgggtagaaactgtttgatcctaagactcattctggttttgatcatcaaaaccgacttagattttgaaaaaaaaagatgaatcagtcacatgcgcctcgaggtcaagtgtcaccaagcagctaaactgattccaataaggccagtttggtttctgtttggattgttacaagcctgacgctgggtcctggacttatattaaattaagtacataatttgaagcttgttgaggcctgtgaggctatgcaaatgaaatcggacttgtttgatcaagtagtggtttctattttatttggatatggaaatctatgttaaaaaaagaaaaccatattagtattaactaagaatagaaagaaagccaaaagaaaaaaggaaaggatgagaatgagatagacatgattagacaatgacaaaaggaagcctttatatgggcaagtcacggcatttgtcatttcccgaagctaatcttcttcggtttctttgtctaattttgtaacccacgtgtttggtcttttgctgctcctttcacacaatgttgagagctttccccaacctcataattctttccattaagagataatatatatatatatatatatatatatatatatatatatatatatatatatataatgtcgatgagaccaatgaaatagttaacctatctctcacgtgtctatatatcagataagcagccttatgtctctttgagctttttccatttcatatattgagaatgagagagaattaagaaaaagagagagaaaacaatggaggaaaagcaagtgaaggagacaaggatagtgttggttccagttccagctcaaggtcatgtaactccgatgatgcaactaggaaaagctcttcactcaaagggtttctccatcactgttgttctgacacagtctaatcgagttagctcttccaaagacttctctgatttccatttcctcaccatcccaggcagcttaactgagtctgatctccaaaacctaggaccacaaaagtttgtgctcaagctcaatcaaatctgtgaggcaagcttcaagcagtgtataggtcaactattgcatgaacaatgtaataatgatattgcttgtgtcgtctacgatgagtacatgtacttctctcatgctgcagtaaaagagtttcaacttcctagtgtcgtctttagcacgacaagtgctactgcttttgtctgtcgctctgttttgtctagagtcaacgcagagtcgttcttgatcgacatgaaaggtattcaagattctagcttgttttatcttaattcaaaatcctatttatagaaactaatccaaatgatcgatgttatcttttcagatcctgaaacacaagacaaagtatttccagggttgcatcctctgaggtacaaggatctaccaacttcagttttgggccaatagagagtacgcccaaggttgacagtgagtctgtgaacactggaacagcttccgctgttatcatcaactcagcaagctgtttagagagctcatctttggcaaggttgcaacaacaactgcaagttccggtgtatcctataggcccacttcatattacagcttcagcgccttctagtttactagaagaagacaggagttgcgttgagtggttgaacaagcaaaaatcaaattcagttatttacataagcttgggaagcttggctctaatggacaccaaagacatgttggagatggcttggggattaagtaatagcaaccaacctttcttatgggtggtcagaccgggctctattccggggtcagaatggacagagtccttaccagaggaattcattaagatggtctccgaaagagggtatattgtgaaatgggctccgcagatggaagtacttggacatcctgcagtgggaggattctggagccactgtggatggaactcaacgcttgaaagcattgtggaaggagttccaatgatatgcaggccctttcatggcgagcaaaagttaaacgcactgtgtttagagagtatttggagaatagggtttcaggtgcaaggtacggtagagaggggaggggtcgagagagctgtgaagaggttgatagtggatgaagaaggtgcagacatgagagagagagcccttgttttaaaagagaatcttaaagcctctgtaagaaatggaggctcctcatacaacgcattggaggagatcgttaacctcatgtagcagttcttaaaagaacataatgaacttcatgtatcataaaagaacattgatttttattgaccctacaaagtttacaatgttcgaatttataatttatagacccgtttggagcatcatgccaaaggaaaattttaaaaagattagaatttcgaggcttaccactaactcctcccaaagactctttgcctttcatagtgtagaggctttcatagtgtagaggcacaagcttcccagttcttgaatatgtttaaagaaatcccctgtcaacaccgaaatacagttttagcaaaaggattcacaaacacaaatttctcgcgctttatgagagcacgatctaaatagcgaaggaatctatgagtataaagaagatatatccaaaggttgcatgtgctattgctatttgaacataaaaatacggtataaatacagaattaagtctcaaatgttgacaaacatatagcagagaataataacacagcaatacagcagatggtattcattcttacttctcaaatgctcttcctaagcatttgttggaaagattattgaaagattattgctttttaaaaatgagttatactaaatctttgaatataaagaagatagaggtttgcatctactgattgctatttgaacatcccttagaaactcactaacagactaataaattgtgctatgtataattatactgacctgatttacagagtacgtatttggtttatgaaaatcaaaatcaaatacgattatctcttttggcattttactcaggatagaattgatgcagcagaaaaagacaatttttttggtatggaccatcttttgatatgaagccaaagtcggcaaaagaaccaagaagacaaaaccatctttgcttttttttttttggttatcaagatagagagatataccaatgtcaataagtaaagagagccaagaaaaacgaaatacagatgaaacaatgtccacaagtctgagaatctgatatttatctcagaaacatactcattttaatattctcatagatcggtcacagggaagaaaagaaattggaggaccaaattcggaaagcacgaggcagagcagttcttgtaaattttcgaaatggaggaaaagccggcgggcagaagagtagtgttggttgcagttccagctcaaggacatatctctccaataatgcaacttgcaaaaacacttcacttgaagggtttctcaatcacaatcgctcagacaaagttcaattactttagcccttcagatgacttcactgattttcagtttgtcaccattccagaaagcttaccagagtctgattttgaggatctcgggccaatagagtttctgcataagctcaacaaagagtgtcaggtgagcttcaaagactgtttgggccagttgttgctgcaacaaggtaatgagatagcctgtgttgtctacgacgagttcatgtactttgctgaagctgcagccaaagagtttaagcttccaaacgtcattttcagcaccacaagtgccacggcttttgtttgccgctctgcattcgacaaactttatgcaaacagtatcctgactcccttgaaaggtactcttgaattctctgtcttctattcttgctggtttctataatctgtaacagcattgttcttgaccttttttgcagaaactaaaggacaacaagaagagctagttccggagttttatcccttgagatataaagactttccagtttcacggtttgcatcattagagagcataatggaggtgtataggaatacagttgacaaacggacagcttcctcagtgataatcaacactgcgagctgtctagagagctcatctctgtcttttctgcaacaacaacagctacaaattccagtgtatcctataggccctcttcacatggtggcctcagctcctacaagtctgcttgaagagaacaagagctgcatcgaatggttgaacaaacaaaaggtaaactcggtgatatacataagcatgggaagcatagctttaatggaaatcaacgagataatggaagtcgcttcaggattggctgctagcaaccaacacttcttatgggtgatccgaccagggtcaatacctggttccgagtggatagagtccatgcctgaagagtttagaagacgggtttggaccgaggttacattgtgaaatgggcaccacagatagaagttctcagacatcctgcagtgggagggttttggagtcactgcggatggaactcgaccctagagagcatcggggaaggagttccgatgatctgtaggccttttacgggagatcagaaagtcaatgcgaggtacttagagagagtttggagaattggggttcaattggaaggagagctggataaaggaacagtggagagagctgtagagagattgattatggatgaagaaggagcagaaatgaggaagagagttatcaacttgaaagagaagcttcaagcctctgtcaagagtagaggttcctcattcagctcaatagacaactttgtcaattccttaaaaatgatgaatttcatgtagtccctgttttgaagtcaaaactgtatcagaagagattctttataatcatcatgaatcaaatggcataaaaggagatggtttctatttttagagtaatgttttggcagttgtatctaaaaataaaagagtttctgcatttgtagacaaaatcattgttcacatgataagagataaagagcttgggcttctccattacagttgctgaggccacgtttcaaccacttgaaactttcatttaggttactttaataatatttcactgtcaccaaactaagcagctcaactaagtcccatgaaaagactggcgcattggaaatttcaaggacagtttgagtcagttgttgtaagtttaggaagggtagaggagacacgagtgacccacaaagaagtaatatgaagataacgttagagaaacatcttttgaatgaaacaaaacagagaggtgaaaagtgatcttctaatggcgactctacattggtcacagaaatattctatggattctcatctagtttgcagatttaaagatcttaacagattatttaccaaatgaaaactatatggctaaaaggctaaaactactaactcattgtgggcaaagaaacacgagcttatggttgaaatgtcactttattccttgtggttgggagttaattggtgtatgaccatccaacacaatcaaaagatact

SEQ ID NO: 34915 - DNA, 3540 bp, Arabidopsis thaliana landsberg
  unsure (1)..(3540): unsure at all n locations
tgtcttgtcaaagggggaggccgcgagacacttagagacaaagagcagctcgtcagctcacccgtctgaagtatctcgccagccggcccgtctcaagcagctcgtcagctcacccgtctgaagcatctcgtcagccggtccgtctcaagtagctcatcagctcgcacgtctcaagcagctcgtcagctcacccgtccgaagtatctcgccagccggcccgtctcaagtagcttatcatctcgcccgtctcaagcagctcgtcagctcacccgtccgaagtatcccgccagccggtccgtctcaagcagctcgtcagctcacccgtctcaagcagctcgtcagctctcccctccgaagtatcccgccagccggtccgtatcaagcagctcgtcagctcacccgtctcaagcagctcgtcagctctcccctccgaagtatcccgccagccggtccgtctcaaacagctcgtcagctcacccgtctcaagcagctcgtcagctcacccgtctcaagcagctcgtcagctctcccctccgaagtatcccgccagccggtccgtctcaagcagctcgtcagctcacccgtctcaatcagctcgtcagctctcccctccgaagtatcccgccagccggtccgtctcaaacagctcgtcagctcacccgtccgaagtatcccgccagccggttcgtctcaagcagctcgtcagctcacccgtctcaagcagctcgtcagtcggcccgtctcaagtagctcgcccttctaaagtagctcgtcagctctcccttctcaagtagctcgtcagttcgtccgtctcaagtagctagtcagctctcccttctcaaagtaactcgttagctcgctcctcttcgtcaagcttaactcgttttcaagctcttcccatcactcggcgaccatctcctcgtctagctatcagctcatccctcgactgcaaaagtcatctacctcctcgcctagcggcagttcatccattgactgcatagtccacctatctcgttgcccagctcgtctagaccttcagcagacaactcggtttgtccaattcgcctctctaccacggttcatccagctcgtcgcacatctaccggctcgtcacctacctgccaacctacctccaatgacggcctagctcacttattctaatatgaactacgtgtggcttgatccctttctaagggtacgtaggcaaccttttacaaggttcagctataaaacgaataaaccttattcttcctcggatatcaagatcgtcttccggcctcaagctcgtctttcatctacaatcggctcgttctttttccatttatgcttgttgaagaaatcatcctttgtaatccgtccaattcgcctaagtcgcgggctcgtcattaatagaaagattcttcttccttccctagagatcccattttcgtacttgtgtgattcgtgcatcaacagttggcgcgtcaggtagggggttccgcgaggacacttagagacaaagagcagctcacccgtctgaagcatctcgtcagccggtccgtctcaagtagcttatcagctcgcccgtctcaagcagctcgccagctcacccgtccgaagtatctcgtcagctcgtccgtctcaagtagctcatcagctcgcccttctcaagaagctcatcagctctcccttcttaagaaactcgttagctcgctcctcttcgtcaagcttctcaactcgttctcttcaccaagtccctcagctcgtcttcaagctctccagctcgtcttcaagctctccaactcgtctttaagctcttcagctcgcctttaagctcttcaagctcctcagctcgtcctcaagctcagctcgtctagaagttggtcctcaagctcagctcgtcttcgattttcttaagtccccgaactggatcacttcgaggacttggggggcaaattgtggatgtcgggttccgtccatttcggcccaatccgcattcaatgggtttcaaggtgaattgggcccaattcacagcccagcgtgagcctggccgtttaaagaacgatctgacattaatacagaaacggaaagatcacgacttaaaccgcgcattaaagtctcgagttgaagattcgtaacgtacgacgttaataacacgaaatccgcggcgtgaagtcagcaagtattttaatacgtttgattcgatgtattgaggataaatacgagtcgatgacattggtaaagggggacgattgatgaaatactaaaactatacacaaaattcacaaacacattcttctcttctcgattcgatcattgttcgtttaacaagactaaagatcctcgtaaaaacaaccacaagattctaattgcggattccgacatccacaatttagcgctagaaggaggggacttttagtcttttacttcagagcaacgatcaatccaccatgagcaacaccgacgatcagagttccggcggccaagcctccaccctcgacaacattaagctgctgcttcagcagctatccgagaaaaccgacagacagcagctcgccgtaacgacgctctccgataagttcgtgtccttccaagagcgttgcaatggccagctcgccgctttagctgtaaaccattccgagatcaggtcagcacacaatgcatatgccgagcgggttgattctctttctgcaggaacggcacggactacaggagctcgaacacgactcaattttcagggcgccgcgagcccaagcgtccagaattcgcaggaagcttctggtcagcaatctccttcgcctccggttgacgtcggagcaacgtcgacacaaaatccagtcatccagtctccgtcagcgggtcttgctgcaatctcagatgagacaatagctcgggcgccggctccactagatcccgccatcagactcccgaattctaatcctcgaccagagccgagcacggtcaactcggagctgcagaaccttcaagatcaaatatgcgcaatgaacgcaaaggttcatcaggctaccacgtcggcccccgaagtggaaaaagttattgaagcaacaaggagaacacctttcacttcgagaatctcaaagctccgtattcgcgatttccgagacttcaaactccccggttataacggtaagggagacccaaaagagtatctgacttctttccaggtcatcgcaggtcgagtcccgctcgagccgaacgaagaagatgcggggctctgcaagctattctcaaaaagtttgtcaggtcccgcacttacctggttcacccagttagaagagggttcgatcgataactttaagcaactctccactgctttcattaagcagtacgggtactttatcaaaagtgacgtcactgaggctcagctttggaacctctctcaaggagctgacgatccacttncgacttatatcactgccttcaaagagatcatggtccaagtgccaacctgtctgattcagcagctcagtccgccctcaaaaacggnttgtggcatgaatcgcgtttccgtgagtctctaactgtcaaccgccccgaatc

SEQ ID NO: 34916 - DNA, 2440 bp, Arabidopsis thaliana landsberg
  unsure (1)..(2440): unsure at all n locations
tggttgtaggagtacacatgttcacattacacatgccctgtctgcagcaggtcgcttggagatatgcaggtcagttacaccattttaaagcagagtattgttttccctataaaacattcactaaacaaaaacctttctcacacaggtctactttaagatgttagacgcattgcttgcagaagagaagatgcctgatgaatactccaacaaaactcaggtttagatctttctctatctctcttcataatgtttacatagtacaaagcatctctctgaagaataagccgaatggaaaaatggtttggtgcaggtgatcttgtgtaatgattgcggaagaaaaggaaatgctccttacnnnnnnnnnnnnnnnnnatgcacaacctgtggctcctacaactcagggctcctttagatttttctccaattttccttttccattgacatcattgtagaaccagccgtctatgtagtacatggctggtaagaaaacatttttgtaacatttgatgatgtacaaaaataaaatataaaaaatattccaaatgtaataaattagggtcgtatcaccctcaaagattgaattatataatgttgacatgagaacaaaaatctggagacaaattccagtcatcaataaccttaaacttatgacctacaaaaccaaaccattgagattccgccaaaagatcaaaaaaaaaaagaggccttaaaagaagaaaacaaaacaactaatctacaactaaagcaaatgcatcctctcaacatatgattcaagcaaccaattcttgagaggctctccgcttcctacaaaacagcctgagttcccgttctcagtgaaaaacgggaagttgaatatgttgagcaattcctcaactgcttgtctaaccatcgacgtgcctgtgactctacttcgtcttccccaaccagttactatatcaatccgtgaaggacagtctcctgaaaccaacatctgcttacggaaccatgcaagtgtcctggaaagtgcgatgactgcagttccttccgacattacatggagatttataagccaatagctgtagcttttctccctcaatgcatctggatacacattcttacctgcagccacttcccataccgagccagcctcttcttttagacctgacttgtggagaaaatccactactgcgtccatgagtcctcgcttgctctctctgtcctcactgtgcataaaatcaaggaagttgctgacatgatcacgcactttttggccatcaggacctgcaggtggcattttgagcagaaacatgtgagccggatgacctgagactgccattagctggccacaaaagcccatgtcaaagtttgaacgagcatctgtgcaacaactcaatagcaatgtgtatgtctgcaaagaaggatgtagaccaagcgccagcatgctttgtaataagttataggcttcagacatcctgtggaccctaaggaaagtgctgagaagggaattgcaggtgggaacattaggtcgcagaccggcttgaagcattgcttgataccactgccaagctttatctacattgccagctttgccccacaagtccaccaaaagaccgtaaaccggttcatcaggaacccagttcttacgttgcatctcagcgaaaacaccctctgcttcctcgagaaatccacagtgtccaagtacctccataacaatactgtaggtcactttgtcaggttgaaacccggcattttgcatgtctctgtagagcttcaacgcagtctcataattccgcgccttggcatgcaaagctatcatgatgttgaatgtgaccaaattaggagtacaaccttgaccaaccatttcacaaaagagcctatgggcagcaggtaaatggcccgcttttccaagacagtttattataacactgtaggtgaaggtatcaggagaaagccctgcttcttgcattctttggtacatatccatggcaatgtcaagaaatccagctttagcatggatatctatcagggtacagtaagttacacggtcaggctcacaaccagcctcttgcatctgattaaaaacattcatcgcttctttgaggtaatttgcacgcccgtagctatggatgagtcggttatatgtaacagtatttggcttacacccatccctaaccatctcatcaagaagcttgtttatctcaccgaattgctttgcacgaccaagattacctaccatagtggtatacgtatgcccatcatgcttgaacccaggttgccttttcagccaatagaagaaaccaagcgcattcgcataattatccatctgcttaagaacttgattagcttggtatgcatccatcctgaaaccaaaattgtgaagggcctcttcggcagcatgtccccacttgaatctccgcaatatactagaaacattttctacaacatatccaggttacaatgc

SEQ ID NO: 34917 - DNA, 1870 bp, Arabidopsis thaliana landsberg
aaaaggaattaattcaaaaatgggttggaaagaacccccttttaagcgtttaaggagattcgggtttcggtaaggttccccataaccaaattttttctaagaataggcttaaaaataaatgctaagatcatatgttcgtttttcgcgggtttttccaattgggtcaccactggttgctgatgtatcaagggccatcctaaaagtggcggaatcatccaaagcaaaggatcttgatctcaaatatttcaaaaataaagatgaaacttgcccggatccagtcacaactccagatccaaatccgtcaacatcatctaggcagctcggtgtagacagtttctggcttttgtttgttgttgctttcataatgtgtcttttcaccctcggaaaattcactttcttgttcttcaagaaaaatcaggttgctgatttgtggaaagagtttcatcgaccagatggagattcgtacatcaataacgtggagaaatgttcttgttcgccaacccaacaaacgtctggcaacaatattcaagaaacaaaccaagaggatagtgggaacaacattcaagtaacaaaccaagaggatagtggtaacaacattcaagaaaccaaccaagctgatactgagaacaacattcaagaaacaaaccaagtaaatcattgttaagacacagccaacaaccgacttgataaaagtgtcttttaccttttctattaaacaaaatttaataacatcatactcatttggataacactaagtttagatccaaatatctaatatgtttcagcctcaaactcgtttcttattcgtttggtatgtaccttcagggcctgcttacaggcagtgatggcagtgttagagcaatggatccacattttttcgaatttttctaagtttttaaggtcctaatttgttttattttgtaaacaaaagtccaaaattttaaaacttttcaaacaacgacttaagttttcagaaaataaaaaatttgggcattaggtccaaaacaaatttgagccggccatgtgtaccttgttgttttctgcatacattaaatagtcttcacctttaacgtctcatcacatcatcaaatcaaaggttagtcttaaggtttttcattagatatttgatgttttttcaatgtccaattttttatttaatacgttgacataattcccaaatttttatggttaaaaataattttctttttgagagttttgtttctttttctcatcatataatggttatttataaagtttcatgtttaatgttttctatgtatgcttttctttctgatattgattttaacaaatataatatctaagatctttaataatttttggttgatttcttgcaggaaaataaaattataaaggatcctcttatttcgatttgatctcatcttccaagtttttaaaaacatttgagcaattgatgtctaagtcgatacataaacagataaagtaaactcagaacatcgtatgattttatcattttatatgcaaatcaataagtcaactaatatttataatatctggattatattatataatacataaatttactataagtaataaatcataggttccaatttaaaacattgaatgaaatagatgattattgtcaatttttttataattgtcattactatttttatttttcatctttttactattttttggtatttgattaacttatacttctaattatatgtaatagtttggtattttttggttaaagttaatgaacgttttcaatagattttaaattttaatgtaaactttttttgattaggtggctatgctaggaggagagccaaacctctaactatatttcataatcactcaaatatatctaatggcttttgactaa

SEQ ID NO: 34918 - DNA, 4362 bp, Arabidopsis thaliana landsberg
  unsure (1)..(4362): unsure at all n locations
gagtattgaatcggagctgaataataatgtttgatgttatcgattatcatggtcttcacgtgggggaggattattagaactttcccataaacatttgcttgtcaatgtctaaggtttgattcttatcttgtgtctacaattccttggggattgcattgtaataggtgtgtatgtaagtaaatgtatactatcttgaatcttggagctctatcgcgaagttttattctatgagtaagattgtgacttaacattggatttttttctcagttttgtgtcacgtctcttgcagcttatttcaggaatcggaccaggactagtaatttcaccatgggtctatgtatgactatgcactcaatctaaactttaagccattatggttgagtttgaaataaggccttgtatatcgaattcgtatacatatatactccaactagggaaattaagatgtgctgttacacagtatggggaagtatctcaagataatatacacagagattcaaaggtctcttactcagacagacgctggtgttggtgttgatgtggatgttgaagaagcaacacggttttcaggtgggatttctgtgaattcagataggattgctcggaattcatcgcctgacatagtctctttctcaagaagtatttcaacaatcttgtccatggcttcacgattgtttctaatctggctcaaagctatctcgtacgctttgtctgataatgtcttcaccgctgtatcaatatcatttgcaagcttctcagacattgagtttcttgccatcatcctcataatgacatcgctttgctccgatgaatccattagcgaccatggtccgatttcagacatcccaaatgttgtcaccatctgcaagtaaatgatgatatactgtcaagttcattcactagtttaggataacagaaaaaaatactgaagctgggagtgtagaagagatacctgcttagccaaaccggtgatctgttgcaagtcactaactgcaccagtagtcacctcagactcaccaaagatgacttcttcggcagctctaccaccgagtccaccaacaattcttgcaaagagttgctgtttggagattagagttgggtcatctgagggaatgaaccaagtcagacctctagcctggcctcgtggtatcaacgtgaccttttgaacagcatcatgccctggagtcaatgttctgcaagaacgaacaatgaacttaaatttaggcttttgataacacacacatgcatctaatctgattctgacttacccacatatggcatggccaacttcatggtaagcaaccaagcttttgctcttcccatctgtcatgactgttccttccatgccagctacaattctatcaattgagtcatcaatctcttttgatgatattgcagtctttccacggcggccggccaatatggcagcctcgttcaagaggtttgcaagatcagctccgctaaatccaggtgttctcatggctattacttcaagtgaaacaccgctttcaaatttcttattccccgagtgaaccttgagtatatctgttcttcccttaacgtctggaacgtcaacagatacctgcatcaaacaacaacacacaataagcaaccagcaataaagaggatcaatggaaagtcacagacacacggcatttagtcaaatatatacctgccggtcaaaacgccctggtcttagcaaagcggagtcaagaatgtctgctctgttggttgcagcaactacgataacaccagtgttaccctcaaaaccatccatctcagtcaggagctgattaagggtctgttctctttcatcattacctccaccaattccagttcctctttgcctaccaacagcatctatttcatccacgaaaacaatgcatggagcattttctttggcttttttgaaaagatcgcggacccttgatgcaccaacaccgacaaacatctcaacaaactcagaacccgagatggaaaagaagggcacaccagcttcaccagcaatggcttttgccaacagggttttcccggtaccaggaggaccaacaagaagaacaccttttgggatccgggcaccaaccgcagtgaacctctcaggcttcttcagaaactccaccacttccatgaaatcttgcttggcttcatcaactccagcaacatcatcaaatgttacaccagtgtttttttccatctgaaactttgctttcgactgacgggactgaagtgggttaccaggaccaccaggtccacccattccaccaccagaccgtctcgaaagaaggaacaaaccaccaatcaaaagcgccgggaaagcaagattaccaatcaagttgaataacacagaaccttgatcttcctgagcattatgtgctgcaaaatcaatattcttagccctaagcttctgtagaagctcttgacttaaacccggtagctgaacacgtactctctcaacccggttacccaattcaggagaaacagcttccacaatagctatagtcccattctcatacaaatcaactttattcaccctatccttatccaagtactctagaaacctagaatacgacatcctcgacgaagaaacaccttgttcatcagcatttgctttcccacttgcaaccaaaccgaccccagcatttcctaacaagattttgagaaaatctcttcttccttcttgcttcttcttcccatccaaagaagccttcactacattaaccttagatgtcctaatcactgaagaaaagcttgtctgtctgccggaaaaatgtttacttaacctctgtttggttgttgtgttcactgacaaaccatttcccacaagacaagctgatgaagctgccatctgaaaattcatcaaagaagaaaaattaattagatgatatatcaaatcccatgaacgatgagacagaacaagcaagtttcttacaagtacaagaacctaaccctcagatcaaaggaacagtaaacatacttcgagttcttaattcagtgaattagaaatcaaggaactaaaactaacacaaagcgacgaaatcagaatttgccgaagaaaacccagtcagagttatgcagcgacggagattataaaagaatctaaccaaagagaagaggtagaagacaaacctgtatcgattacagatgagagttgtatagggaaggagaatctcgagctctgcaaatatgnaggatggagagaaagagaggagaatagtgcaagggacttggagtttttttttaaagaacaaaagtggttcgtaaaaattacggtgtcttcatgaaggggttaattaaataaccggaattaaaccaaaaaattaattgggatccaaaccaaaatggtttactcgacgattttcaattactgtacatatgaatttctctgttatgttatgtattctcttgcaatttgtatattacacattttattttatttttgtagtactctcagagcaaccacactgattagtttctaattaaataaggtttttatgtattttttattaataaattttgatagttttgtattttagaggttttgtagagtttttgaaaattttatgatctattggtggaatctttaagtgaatttctaataaaagtaaaatataaacatttgaaaaaaatgtgaaagtgtttgggatacatttgactctcaaaacttgacacagactctacactctcaaaacttgatacactcacaaaatttgacacacaaactcaagtgaatcttcacacgaccatagcctatatacttctacacaaaacagaacaacacttgcatgtacttgctatttatgcttccttgaactcttgcatctcgacatggacttcatccttttaaactctgaaatcgaatttaaattcatttagaacagaacacaaaccaatccatttgaacactaacacaaaccaattagaacagagcacaaccaaaccaatttagaacagaacacaaacaacttaagattcataaccgaactggacaaaaacaagagaagaagcgttaaccgaaacaaaaaagactaacttgcaagacataaaagacaccattcaagcattagacaatatgccagcgataagctcgatctttaaagccatctcaagatcactaagcggcgctgctattcgaagtagagtctccaacaacgtcatctagctaagcttctcgcacaaatcaaatgccttctgcataaatccccacaagctcctaatcactgacagagtccttttagctcccgcggtctgtgccgccttaacacctgaaggacgagacaatgctccatccggaagggcaaccggctgggagctagatgaccgtgcagaagcttgagaaccatagtttgttcaacaacaaaccca

SEQ ID NO: 34919 - DNA, 2463 bp, Arabidopsis thaliana landsberg
  unsure (1)..(2463): unsure at all n locations
ttttttgccaaaaaaaaaaaaaagtacagacggagtttttttggtccaatattatggaaaatttcctaaagtaatttagggaaattgagttgtttgaccacaaaaagaaaaattatggacattgagtttgttacacattttgctagtagccgcataacatcaatagatgaaattgaattagataatcaaatcatagagcccaaaatgactaacaaccaaattagagtggaaaaaaaacagaaccgcaagaacccaaattctagacgaacctgagattttgactgtgtagtttctgggaaatttgatttgaatgcttttgggtccggattcacaggtgaaattcttaccatccactgcaacctcgtaatcacctggagaaatcgaatcaaaacacacgaagattcatttgattgatcggagttttctgaataaaatcaagggctttccgagttcttaccgatagagtacagagaagactgcatcggcgatgctctctttggcgccattgtaataattcagagcgggatttcaaataatttacttttcagaaaactggaaaaaaaaacgaaacgtcgagtgtataaataagtttatcagagggtattttcgtattaacataggtgtcttaaagctctgttctagccaaagcgctgcgttttggagcgtttctgatcgtctgactaatcatttgttcgaatgtcaaatcgacgacttgtggagtcaaaaaaacaaagcttcaagagtcaagacgagagttttcgcatcaaacgaaagaaaagtctcattttccccatttttgatggggaatttactaagtccggtttaaatttggacatgtcttcggtatctcaattccgagcttgaaatgaacttggtgtcgcggcaatgttttgcagttaaaacatgttcgacactccttgcccttttgcgtgtattagcaatatgatgcaatcgccatcctattttcagccaccaaccttgtggagttgtagtctttagagaactgatcattttcagtagctgagacgtgaaaaccttctatatttgagctctgcgatggctttcttttggtcgtaaagccaaagcaacattgatgcaactgcttccggtagccannnnnnnnnnnnnnnnnnnnnnnnnnnnnnnnnatagaattgctcagacaaaggtaggaaataaactctagttctcatttctcttcaaagcttacatttttttttttttatgtttgtacatttttgtgatagcaagtttgagaatgaacatcataaagatacaaagttacagatttttgttgtggaagcaaatactaaaaattacaaaggtacagtggtggctaaagatacacagaccgaactgctctgacttctctgactagttaacaacatatctcttcagcgaggctggtggatgtttctcggagcagcagcaaccctctggtttccccatttcgctggcttttccgcatacttagctggttccacaatcgatctcgggctcctgtttccacttgatttcttaaccatctcaccattctttccaaagcctgatgatatatataaacaacaattagcctccacaaatctactgatcttggatggttctatgtatcaggggaatgaaaccgacttaccaaattcggaaggtgcttggtaatacattcttccatcgaatccttgatcaaactcagcagcatcagtgtcaaagaaatcttccatatcatcaaaatcaaatgattctggaagaagatcagctacatcgatatgacctccaccattctcattctctccgttgtcatagaaaccatccgcgccttgctgctgctgactgatccagtaatcagggtaccaagtcgaagttgtcaccaattgccaccactccggtgagaaatcttccacttgtcgtacagctgccggaataaaaagaggtgcgtcggggtttagagtagatcgtcttcctgataccatcgccattctcaaaactctagatctgcacacacaaacaaacaagctcagttcaaattcaaattcaaatctaacaactcaatcacaacatagcttaatccttagatcaatagatctgtacgatcagtaaacatagcaacaataagtttccgattagatcacttgaagtaggacaagtacaagtttgaaatcgagagaactgaagataaatcaagttttaagatagatcaacaaccatcacagagatctaataccatggaaaccaatcaaatccttcaaaatccacgaacttcaaatatagaaattgatcgagtagagaagaagacaacatcagatctttaccttggccgaggaaaatatctgctgcaacttgctcaagttgatcaagttgataaatatgtcttcttatttttttaaaagctaaacggattaggatcattcaccagaacctacgttgcgagaagatgagaagaagaaggactaatatataaagtaaggt

SEQ ID NO: 34920 - DNA, 4543 bp, Arabidopsis thaliana landsberg
  unsure (1)..(4543): unsure at all n locations
aaaaaccaaccatcaaggaacaaacatcacacattttcttcatatttttgttctacaaatgaaaacgatgggtgttttggtttaagttagaatgattcttttttgcatgcagggtgcaggacataccgttccagaatacaaaccgcgtgaatctttggacttctatagtcgtttcctagcaggagaaaagatatagaattctcaagttccatgcatgttcattaataaaaatatttataacaataaaattccattttttcttcaataaaaacttcaaattttgtaatgtaatttacaaaaatgtgaaggattctatttcgtgtactaaaacaagtttttctccacacaaaaaaaaacatatactgttctgtattttttcaagggaaatttaaattgaaaagttaatactgtatatatttgactataattcaaaccaaaccaattaaaccaaaaatttagaaaaccaaaccggaattgaaccgatatctagattgaaaccacgggatttattgaaatcgtcttccttctcactattccggtgtagctgctcaaaaatgcaaaggcgcttcctttcgtcaatctccgccaccgccggcaatactaaaaccctaaatcaaggaagatggagtgtaaagcaagtgaaaaaatccaactttcatgtaactctcgacgagattcgtacttccatcgattcatcagacttcatagctctctcattacaaaacactggctcatacgccgccgcgtggcaccgtgtctccgccattgacacgccgcaaactagctacttaaaagctaaatacgcagccgaacgttaccagattctccagttcgctctctgccctttctctcttcaaggctctaaactcactgttcatccgtatgactcttaaaacctctctcttattgtcaagtttcttcctttttggtaaattgattgattagggtttatggtctttcgttttttgtagatataactttcatttgtttcctcgtgatgaattgaagtgtggtatgccttctattagcttctcttgtcaagcttcacgtttaacagctatggctagagaaggatttgatttcaacatttgcatctatgaaggttttattattttctgctctatctccatttcgtttctttgaggagtctggtctcttaattgaatcattttacaggaatctcatacttatctagagcacaagaggctgcatcgaagtttctttccgagaatccgatattagctgattctgttactgtatcttcttctccagctactgtagctgatactgtctttgttggaaggattaggtcacgtgtcaagaattggagacagtcttgtatagactcgggttcaaagacaggagatggtgtaatagctagtgttagacactttcatatgaatctcattttgcacttaattttcaggtttttttacatgattcatctgtttgtttaaatttcagatgatttggtgagctctttgagaaggctggtgttggggagtgagcagtatggttcaaggctgtgtttgactattgatgtttgcagtgagcgtcaagtgcaacttatcctagaggtagataagcttagttgatacttaggatgacaaatgcagtctgtgtatcgatggttagtttgataaattttcttcgtgtggttctgaatttgtgaccacagatgttgactgagttctctgatgatgttgtccctctactggtcgcttcaaagagcagaggaacacaagctgttcgtactgtctttatgagttcgaaggaggacaaggatctttttaaggtagggagattattttggatattccttagccggaaatgnnnnnnnnnnnnnnnnnnnnnnnnnnnaataaaacgaatctgaatttatgttcttggacagagagagcttcaagatcttaaaaggaagaaaacaggcgagttcgtggctttcgggaagtggtcgattttatttcttcttcacagaaacctgtcgtttcccagaattatcttagcggtaatctcacttttgtcctccttagtttccacacaaattagagtttccgctcttgctccattgataataatcttatgcttaacttgttgcagattttacttccattcatgctaaattccttggtcctctaccttcaaatgtggatgacttcagcagttcactgagctcagcatttcccaatgttgtggatctcagtcagttcatgaaagaaattagtcccttaagtaatataagtaatctacctgcagctatgtcctccttggataggttctttgcacctgtggatgtagaagtagcaaatcaaggtcacagttctctttcaaagatgttgatttctgcttttatgcggtttggatgaatagatattgacttttgattgcatctcttattaggttgtccggtcaaattagacgaaggccatcagagtcacgggcagaatgctgtgatgatatctcagctctttgcaaaactgtgtaccatacagaaatcagatctatcaactatccaatcaaatgaagatttccaagctttggcttctgatgaacatgcaaattctgtcacctcttgctctaaaaacgcaggcgatgaaaatgttaaagtctggtcaaagaacagccggagagtaagctctgagaacttggtgttcatatgggggttagggaaaaagatgacagctgcaaagctgaagaatatcctacaaaagtcacaccccgtcttcgcgagagagtttaatgttaagtacatagaccggagctctgctattttggtgttttgggagtcaggtccttcagagactttcctcagtgcggtcaacaatgaagagcaacttgatggttcattaagagagatggttgcagaagggctaagagtggcaggttacaagacttacaagagagcttgtagattaggcttctgggaggctgacttggcggaatctttagacaaagcattggaatcttcagataccgatcctgattcggacactaaaccatcagagattgattggtcaaacgaattagctattaattttgatgagctatgaatagttctggttcacttacagaaccaatgtataccgaaattgagaacgttgattcatttttgttcttccatgaattgatttggctaacatctgaagttacaaagctaagtaaggattacagaaattgaaccaaaccgtgacccaaaaacaattgaaccaaaccgaaatattggtttggccttggctaaacccggtttatgaacctgtaattgttgctcctctacgagaagaggcagagtcagttaaacaccatcggcgagaagaaatggggtttctgacggcggcgattagggtttcgacatcagcagcctcaatgcttctatgccgtaaatctcggaagctagggttcctagcctcctcctcgccgcttttttccagcttgaattccatgaatcgccctatcaggtactactaatccatcaaatcattcaaagctcgagcttttgattttgttgatgtgattagattgagattagatgcacagagattaacttataatgaagtagctctgttgatattgtgtgcaaggttttgcataaggaatctcttaatagaccaatgtggaacgttagcttcttaagatcctcttcgtttcattcaactccagctcgtgagactggtgatgacattagcaaatctgtgaacagttcgagtcaagatggagacagttctactaaattaaagaggaagaagctgaaaggtaagcgtgcggttgtgcggtggctaaagtttttccggtggaagaaaaagaaagagtttgaaagaatgacttctgaagaaaagatacttaacaaactaagaaaggttagattgttactgatttagaccagcaaaattgtattatgtttcgtgtttatatcggttattttcgcaggctcgaaagaaagaggaacggcttatggagacgatgaagaagctggaaccttcagagtcagcagaaacgacacatgaccctgagatattgactccagaagagcatttttattatctgaaaatgggtttgaagtgcaagaattatgttcctgtagggagacgtgggatttaccaaggagtgattctgaacatgcatcttcactggaagaagcatcagacgctacaggttgtgatcaaaacgtttacacctgatgaagtgaaggagattgctgttgagttagcgaggttgactggagggattgtgcttgatgtacatgatggaaacacgataattatgtacagagggaagaactatgtgcaacctccgactgaaatcatgtcgccgaggaatactcttccgaggaaaaaggctttggacaagtctaaatgtagggatgcgcttcgtgcggttaggaagtatattccgaggcttgaacaggagctccagttgcttcaagcgcaagctgaaacgaagcgggattacacgaatgtgaaggttgatgatactcaagagaggtcagaagagttgaagaagattatagaaagtagcgaagaagtgtttggaggatgagcaagaagaa

SEQ ID NO: 34921 - DNA, 3491 bp, Arabidopsis thaliana landsberg
ctgaaaactcaataaatttaaaatttaaagtacaatgtaacaagtaacaacatacaaaataatttaaattaacagaatttcccaccaatgatatcaatgaagattatatattttgtatagtttcatcattcatcaaatctcgtaggttctatattatctttatccatgtaatttctttctatattacctcatttgccaacaaatgcatcaaaagacgaattattatggtcactataaaacttaagaaacgaaatatagtgtaaatttagcatgataagtaaaagataaacattctttcaattactatgattagtaaaatgagttataagttactgtttagtacataagatcaataataaatcaaatgtgtacaaataggaataatgtttgtatattaaactataaactaaatgaaagagacgaaaattaaagaagtagccacacattaaaataaaaagtgaatatattaagcaggaccaaccaggaaatatcatatggatccaataaacatttggctatatatgtttatcatttggttgagtactcactgttggtatttttcattgaaaaactaaaataattttaaagattaatatgaattttagcaacttgacataaatattttataaacaacattggtcaacttcaaaacatgaagaataagtagaaaatgaaggtaaaagataccttgtttctcatgtaaaagtgagaaggtaccttagacatttttcatcaagtcatttctaaaggaaatccacctttcacatattcacttatgcatatactctaaaatttgactcaacctctttatttcaaaacctacgaaagtcacataaaattttgtttttaaagatatttagttaaatatatatatatatatatccattaatactatgtttatatcctctattaaaatatcggacatgttcataaaatagcaggttgaagacaccgggttcccatgtcgaaccactaaagtgaagctaaaggcctttgacaccatttactaaactttgaaattttgactatggttgtgactcgaatagttaaaacacaaatagctcgagaaaaaattagaaccatgacattaataattaaataaaatatacatcacagatgagcatcgagcaacagatatatgatttgcctacctattaccttcatcatgaacagaaattctcagtgtaatgattgctaagaaattcttagtgtaataatttttaagccactttgtatctaccattgcacctataaaaggatgtattagcaaaaacacatgaaacatgttataaagaagagaagtaacaaagtgtgaatcagtatcaccacatttggacgatacaaaggctacacaaaacaaatattaaaattataaaaatgagagagagaaacttgattttagttcatttctttggtgaaaatgagaaaaataaaaaacaacgtaatacagaggacgaagcaaacctttgagattaccattctttggtttctccaatccgtcatactcatatggttcgtgctttgtctttttttctctttactttcaatttaattatgtggaaagacttagtagaccacaaaatattatttcgatgtttaaacaatcccgaaagcaacacagaatgatagaaagtttaaaaggagttgtaagaaacaaaccttgaggaaccgatgttgatgttgttcctatgaagaatcctaccatgagcagcgtcaccaccatcgatcaactctctaagccccaaattctccacctcctcttgtttcatctccttcttcttctgcttcttcacacggcggttattaggaagctttacaggcaacctctcgaagtaattcccgaaacttaccatgcacgtttttattatcttcgtatagaaagaatgaagcttcaacctcaagcgttaacaaatgcagagaaaccaacttaaaaaaactgacatgcagcgtcttgcattttataaggtgaagggttacactaaaaatgatattaaatatgatactaaatattgaaatcatggtcataattacataaatgataattatgttagtgtaacgtaactgctttgatttatgaaatagaacagtttagttgactaaaaaaaaaactgcaatagttagacataataaataaaagaaaacgtgatatcacatgtgtcattaaatagaatattaacctcacaacataactgaaacgtattatgagtaattcattgttttttcattcaatttattatattgtaaatgatatttacgacttaagttatatggtcagttatgttgtttattttgtttcaagatatacaaataaacatttaatcgattatgtgagaggccaaattttttttaaacaaataaacaaatgatcatattgtcaacaaacacataccataatctactcatacattttttatattttgaaggtattttagagaaaaaatatttgatctttggtttgaaagataaaactaataatctaatgttatggtaattatatgaaaatattgataaatgatacatttttaggaaaaataattatttagaaaaagggcattgcaaaaatgttataagtttttttttattataaaactgtaattaaactcaaagaatatggaaaatagtatatttaaatttgagaagaatgacacatgtcgaatgaatagagcgccacttgtcagatttttagagcacaagtttgaggaaaccttactttattatataagatgtggttggttacttgttcgtcttcttaatttttcgataattattaaataaaattgtgatgattgaaaactatataataaagacaaagtttgggaaaataaaaataaaataaagaaacgtgcgagagagtataggtggtagattctttttcagcttgttcacttgagtataattttttttttttttttttataaacattatattaataaccgatacaaatgttatgaccaaaagtcacatagtttttttaagtttgatacgcaatatagccatagactaaaagtatatagagataataaccaaatcatccgcttcggttaccttttgagatcagcataatagaaccattagccacgtccacggttcccgcgtccacgatttccgcgtccacggttcccacgcccacggttacctcttcctcgagtagtagaggacgcttgtatctccttagctttgatggatggtttaaccggtctttcgcgcaaaagacgttgtcccgatggagtcataagttccatcaattctgacccactgtctgactcaactgaaacaattgagtcttcatttgaatgaagagaatccccatcagaaaacgaagaacccaaacggctaaacctgttttcagcaaggatgtgtcttatctcaatcactaagaatcacattatcttttgtgcctgcaattttgaaaactgattcaactgtgcaagtttcctcagttacaactttagcttcaacatttgtaaagcaatctgccactccggtgcaat

SEQ ID NO: 34922 - DNA, 5427 bp, Arabidopsis thaliana landsberg
  unsure (1)..(5427): unsure at all n locations
tatgtctaccttgctgtcatctgcgcagcaggtgttgaaagtaaagaatatcaccctgttggtgaagccattatcaaatttggagctgaaatgcaggcttctggttagtactatatttttcgttggatcgtttttaaatacctttatattttcaatgctgtgaaaaggctcaagcagcaatgcttttagttctttagtcatatgcttatttagctaagtaatatcagaccttacaggagcgtttatctttccaggtgaagctgtttacgttgatgatattccatccttaccccattgtctacatggagcattcatttatagcacaaagccattggcttggataaagagcgttggtttctcaggaaatgtgacaccaattggagttttggcagttattactttcaaagatatacctgaagtggggcaaaacattggttacataacgatgtttggcacagggcttctatttgcagatgaagttactatatctgccggacaaataattgctcttgtggtaagtccaatttctaatacattcccaatccatccaccaccgaaataattcctgcatctctatcaactttctcgtctttcttctaactcttagtccattttttatgacctatcaggttgcagacacacaaaagcatgcagatatggcagcacaccttgcagtagttgagtacgattcaaggaatataggaacaccagtattatctgtggaggatgcagtcaaaaggtccagcctttttgaggttcctcccgagtatcagcccgaacctgttggcgatatttcaaaaggaatggctgaagctgatcgcaagatacgctcagtagaggtattaaaattctctttctctctcttaatctttgatatattaaaaaaaaataaaaaaaaatacattcttacactatgtttgctgttgattttggttatgcagttgagacttgggtcacagtacttcttctatatggagacacaaacagcacttgccttgccagatgaagacaactgtttagtggtttacagttcaactcaagcacccgagttcacacaaacagtaattgctacatgtcttggaatcccggagcataacgttcgagtcatcaccagaagagttggaggtggctttggtggaaaagctataaagtctatgcctgtaagtaatagtttcttctctgaataaaagtcctttgtgatttgatactaatgctgctgaagatgatttcaggttgcgacagcatgtgcgcttgctgcaaaaaaaatgcagcgtcctgtaaggatatacgtcaaccgtaagactgatatgataatggctggaggaaggcatcccctgaaaataacttacagtgtagnnnnnnnnnnnnnnnnnaaactcacagcactagacctaaatttgtttatagatgcagggtcagatgtggatgtaagtctagtgatgccacagaatataatgaactccctgaggaaatatgactggggtgcattgtcatttgacatcaaagtgtgtaagacaaaccttccgagcagaacgtctttgagggcacccggtgaagtacaaggttcatacattgctgaatccattattgagaacgtagcatcttccctgaagatggacgtggatgttgtgagaaggataaatcttcatacgtacgaaagcctccgcaagttttataagcaagctgctggtgagcctgatgaatatactttgcctttattgtgggacaaattggaggtatctgcagatttcaggcgaagggctgaatctgtgaaagagtttaaccgatgtaacatatggcgcaaaagggggatttctcgagtaccaatcatccatctagttatacataggccaactccaggaaaagtaagcattttgaatgatggttcagttgcggttgaggttgcagggattgaggtgggacaagggttatggacaaaggtacaacagatggttgcttatggtcttggtatgataaaatgcgagggaagtgatgatctgcttgaaagaatacggcttcttcagactgacacgctcagtatgtctcaaagcagttacactgcgggtagcacaacatcagagaactgttgtgaagcagtgaggctttgctgcggtatcttggtggagaggctgagacctaccatgaatcagattctggagaatgctcgatccgtgacatgggacatgctcattcaacaggtataactaaactggataattctccttatattgatccagatttcaaggaaatatctccatatgtgaaactgcaggcgaatgctcaatctgtggacctatcagctcgaaccttttataagccagagtcctcttctgcagaatatctcaactatggagttggagcgagtgaggtgaatctcatagccaatattttaaaccattccctgagataaaatcagtaaaacttgaatatatatatatatgtaaaaatatgcaggtggaggttgaccttgtgacaggaagaacagaaattataagatcagatattatctatgactgtggaaaaagccttaatcctgctgttgatttaggacaggtaatatatatgaagagagacctcagaaagcaaatgaatcatttttgtaatgtgttttgtgtgtttctgcttcagattgaaggatcttttgttcaaggacttgggtttttcatgcttgaagagtacatagaagatccagaaggactccttctgacggatagcacatggacatacaagattccaacagttgacaccattcctaaacagttcaatgtcgagatactaaatggtggatgtcatgaaaaacgcgtactctcttctaaaggtcagtcactcattcctacgcaaaacatatgcaatcaacatttttgatcatattgtttgtgtaagtgcagcctcgggagagcctccgttgctactggcagcttcggtgcactgcgctaccagacaggctgttaaagaagcacgcaaacagctatgtatgtggaaaggtgagaatggttcctccggttcagcgtttcagttgccagttccagctacaatgccggttgtgaaggagctatgcggtctagatatcattgaaagctatttggagtggaagttacacgacaactcaaacctatgagtaaacaacaaacaatacatgaaagaaggtaatttgtttcctactgttttcttaaacttggagattaatcgctgtgcaggagtatcttctcttttgctctgtttatttctttgaaaacactctgtttctggtgttgatgatatgacttgggattttgccaatttataaagtagataaatttcgagtaagaaaaaatcagccactttcagatgaataaagaatcagtttatataaatgataatagtaatgatccttgataacaaatacaaaattctcttcataataagttaaacaaacataacgaaggaaaatctaagtgacttgggtaaatgaggactgaacaaactacttgtgtaagagaagagaacaaaacaacaagaagctgcaccaaagcccaaatcaaatacaagaggtctagggaagctacctttgatcccagcaaacacaccatcaagcataatagatttcatgctagatagtctccagctttgaccttgatcattgatcatcatataattgatactaccaccgttcatagttccctgcaaactcgctatagcggttagctcttccatgccttggtggtgcaggttcataactgtgattctgaggatgatgatgaagatgatgatgatgctgatgatgctgatgatgatgaagatgatgatgatgctgatgatgctgatgatgatgaagatgatgatgacgaggatgacgatgaggatgatgatgatgatgatgatgccaatgcctatgcgtctgcctctttatcagatggaactttccctaaatgcaagtgttgtcggaaacgtttagaaagggaattctatcattgctccatctgcaaattcagtcttaacgggaattgctcaatgagaccagtacctcccaatactatctcagagttgaaaagtcatgagcaccccctcaccctcttccctatacgactccctttgccatgtgatgtttgtggcttgtctttaagcgacgctgaagatcttgtttactcttgtctcccttgcagccacatggtccacagatcatgtatctatttacctcgtgtcattaaaatcacccgacactctcatcgtctctctctctctccctctcttccttccggaatatacccttgtggcgtctgtcgccttaccattgatgtcaactatgggcaatattcttgcaataggggatgccactatgctgtccattccaaatgtgcaatagaagaaagaatatgggacggaaaagatcttgacggagttccagaagaacctgatgaagacgtcgagccatttgagaggattgatgacaagacaatacaacatttcagccatgagcattatctaagactcaacatcagaaacggagtttttgatgcagacagcttctgtcaggcatgcatcataccaatcttagagtctgaaagtttttatggttgtacgcaatgcagcttccttctccacgaagcatgtgcttcctttcctcgtaaaaaagaccatccgctacacaaacaccggcttatactccatccaattcctcctaagccacttgaggtccacatgagaatgatggggggtaaattgtattcgcgaaatgtcaaaggcatgttcaattgcagtggttgtgaccaattaggttttggtttcatgtacatatgcagcgaaaacggctgccgattccaattagacgcacgatgcgcttcccttccggatccttttatacatggaagccattcacatgagctcttctttaatctcacaaagggagaatgcatggggtgtgagtctagtcattgttcaccttattcccttgagtgtatggaatgcaagtcattcttgggcctaaaatgcgctactttgccaagtatgacacactacaagcacgataaacatccactcgctctttgctacggggaagaagatacaacaaatgctcaatattggtgcgacatatgtgaggcgaaattagatgcagaagagtggttctatacatgcaatgattattgcaatgtcacggttcatgttagttgcttactgggaaacccaatcttcttgaagccaacgtccttctacataaaacaaaaacgttcaacggtctcagttattcgtaacaatgataacactcgagcaatttgctataggtgtgatcgtcgttccacacaaccctttttctttcggtattcagatttggtgtcttcgtgttcttttaattgtttgtgggatagagtacttaaaattatatagtattatagctttccattgttcttttgtacttctaagatgttggtccgcacagtttgtacccaactg

SEQ ID NO: 34923 - DNA, 2671 bp, Arabidopsis thaliana landsberg
attaatatggttatcctgttcactagggttctttattttaaagaattgaaactttaaacagtttcaaaatattataaattgaattttacaaaaaatttaaacatgataaacactataacagatattaatatgggatgatatagtaagagagaaatcctagatatactacgagagaaatcctaaatataacaatcaaaattcaatgatgaagtttggatcaatattaatctttttttaaagtttctaattttataaatatttgaaatttataataaaatgacaaatttgtgtttaatttcacgggacggggttatatggtgtgacgggtttgagtggataataacatgggatagtatgctatggaaaaaacatataataacaatcataatataattatataatcttaaacactaaacaaaattaacaatattaaaaaaaaaacacttaaaactttaatttttttaaaacacattttgattcttttataagaaatttaaacattataaatatttaaactttatactacgggtgaaattttagaattgactgtttgggttgataagaatttgcgatagaactaggagttaaatcctagaatgacaatcaaaatataattatacaattaaatattaccacgagtgaaatcctagaattgacgagtttgaatcgatattaatatgggatggtgtactacgggtgaaatccgataaacaacaatcaaaatacaattatacaatattaaacatttaacaaaataaacaaatacaacttaaaactttaaaatttgagttataaaatttcgtctagcggtgaattatacatttaaatcaaacaatagcataaatttattaaatcatcctaaaaaatattcaattattttttatttaataaaaatataggtccgcggtataccgcgggttaatatctaataaagatataaactcttagtcttagcaaaagaactgggacttgcaagaacaaaattccctgattctcttctatggttaaagaggttttacaaatttgaaatcagtcatgactaattggtcatgaaaagaaagcttagaagttggtgagtttttgtttcaacgcccacttgtgagaagtcccttaaaggatatgtaaagatcattgttttcctttccaaatatttcctctgctttctgtaatgtttcctggcgataaagattagataagaccattttaggattcaaacattatacaaatttcagactaaaagagttggttaaggactatgttatggcttatgaggttattacctcgcggccctgcttccgggcgttaagttccttgatgttagccaggaatgcactgagctgttgtaagacaaacggctcctgaaaattcaaaacaattccttatctatctatcactcattctcatatactagttgctggctctaggaactttagaacttatatatacctggcttgtctaaagaactctttcccatcaatccgcggatgccgagctgtataagatcaagtgagaggataagaacaaagccacaaatcacatgatataaatttagacaacatattagaatgctttaaagttgtgaacctgaaacagaatgcgagcgtggaggagagtttgctactgaagattgctggctagttgaagaccacatacgtatatcataatgtgaagatgttggagatgcagctccagagaatagctttggcgatgaagcagcagagtagcttctcggagaagcagcagtagataagatctttggtgttccgcttggtgtaaacgcgggagagaactgcggagtcatagactgtctttgcctcgcttcacttaaacctgtttcatgaaccattacacattgaaaatgtttttttttgttcttcattatattgaaaacatcaacaagtcttctggactaacgtatgttcttttgttgctacaaactaaattattggataactcagcaatcaataccttcattgtttgagtaggatccatttgaattctcatctacaatgcatacagagtaaataacatcagaacaagcaactcttgaagagactaacacataaagaaaaaggaaagacaatgaagaccaataagctcagaatacttgagatgatgttacaatacctttgcctcgaggaaccattctgacatcagcagtctcagtttgctgtaaaaacaagaggagagtatgtaacatctgattttgttttgtttcatatataaaaggatgtcaaaagaagtatagtgttgagtaacatacagatggattatcatcattcaatgactgcatcaattgtctcttgaatgcttccaactacaagcaaaacactagagcttgagcttgaaatcaaatgattaaatttcaacaaaaatcaataccataacatttgaaaagaaagaacctttgcataatcacgaccgagtctcttcgcagcgattgtcagtgaatctcgttcttgagtcagtttcatcttcaatccaaaaatccaaaaattcaaccaattgagtaaaagacacactttgatgatccaagtcaaaccaaatttaacaaaactgaggagaattcttacattttcattgacaacattcttcaaactcgagtcagcttcatggtgaagtcctttaaaggaagagactctgtctttaagctcatgaaccagccgatcct

SEQ ID NO: 34924 - DNA, 2639 bp, Arabidopsis thaliana landsberg
atctctccgatgtgatcgccattcgtgacgttcgggcttataatctcgagtcagagtttgacctactcagaggaatcgtcgaagattacccattcatctcaatggatacagaatttcccggcgtgatttacaaggcggatctcgacgttctccgccgcggaaaccctaattatctctacaatcttctcaaatccaacgttgacgctttaagtttgatccaagtcggtcttactctttccgacgccgacggaaacctcccagatctcggcggtcaaaaaaaccgtcgatacatctgggaattcaatttccgtgacttcgacgtggagcgtgatccacacgctcctgattcgatcgagctactccgtcgtcacgggatcgatttcgagcggaaccgtcgcgaaggtgttgaatcggagaggttcgcggagctgatgatgtcatcgggttgatctgtaacgagtctgtgagctgggtgacgtttcacagcgcgtatgattttggttaccttgtgaagattctcacgcgccggcagcttccggtggcgttgcgtgagtttttagggttgcttagagctttcttcggtgatagggtttatgatgtgaaacatattatgaggttttgtgagcagagattgtatggtggtttggaccgggttgctcggtctcttgaagttaaccgggcggttgggaaatgtcatcaagccggttcggatagtttgctgacgtggcaggcgtttcagaggatgagggatttgtatttcgttgaggatggggcggagaaacacgccggagttttgtatggtttagaggttttttgagggatttctttttttttataattcaaattcaattaattaactcaatttttttttttttttttggtagtgtcaattaattaactcaattgatccttgtagttaaacgttctttggaaagaagaaattttagaaatttgaaaattcatttgtttagtccacatttaaatcatatacaaatcgatatgaatttaaaaacagattcaaatgaattagttatttataaaaaaaacataaaccaataaaccacgtaagtttttaacaaagattacccaaaacatgtctaaacacttgatgattataattcatgcataatcaacaaacatacgaaaaatgcaaaacaaaatgctcagaacatacgaaatgttcgtatccaaccatatcttattacatatgtaaataatatttttcagcattggctcatttgagttaatctaataaagatatcgacaaaaaaattaaaaatttggaacactagtgaagtgttttctcctatgatttttcagcaaaatatgacaataactttggtaccaaaccagaaaaaaaaaagaagaagaaaggattcttgtttcatataattaattagaatttttaataattgataaatctatactaagatatgatatatccattcatctgatttctaaagaaatctatttcgatatttataaaattgaaaggataattaatctagtaaaagttatatttcccgctcatatccccaaccataatctagctttacaaacaagggagcgattgaattttattgaacgtttgaaacaaacagaagaatatttatacatatagtcgagcaagagactttagttatgaaaaacttataaatctacccaattctgcaagtattttatatctaatatttacaaaaatccgatattattgtaacaataattaggtgaaactttgttggtgacaaaaagaagaagagtaaatgaacttgattttctcaaaaacccaacaacatgtatttatctatgtatccatattttgcgagagtgagttagccaaacacaaagaacaagaaaatgtatatctttccttgtctcctcttactataatacactctctcgttaatcctctttaaaaatcagaattttctttagatcttcgtaatgaaactgatgaaggagtgacacaggtaaaggaaaccatgactcttagtgagacagagaggtaataaatacatctgagagaggtcaacttagctctcctaagtatcaacaaatatctttgagggagccatgcgatactctccaaatataggcaagaatagatctcacaataatgttttgttctccatggtaaataactctactacatcacaacgatcttgctttaactatatattgcgtgctcttgtcaaagtcattttcatcgaggttgtcgtgttgctttcacctcacgccaagcttttagggtagtattagaccattcaagggacaatcccaaaacaatcctaatgtgtttgtaagcctatgtgtgttatttgatcaagaaatataactttgagagttgtttgacttcattaatcaaaatcaatttatctcttggtgacaacctaaagttctttctttttacctttcattgaacttaataaaatttcatcttcaatatcattttctatctagcttaataatgctcattttctatgcatttgattttgtcaaaaccccaattacatgcatttgtctatatggatctatattttgcgtctatgagaatttgtgaacacattcttttctctcacaatgcgatgatttagacccaaccacatgcatttgtctatatggcatatatattgtgtgtc

SEQ ID NO: 34925 - DNA, 6926 bp, Arabidopsis thaliana landsberg
  unsure (1)..(6926): unsure at all n locations
actggtttaacatgataatatgcatttaacaaataatatataaatttattgtgttaatatactagttaacatcttaattaaatagttattcacccaaatactatactatatgtaagtcgttattttttatatgatataacaatgtgttgccatgatatatatgagttatcacataaattataaaattattgcgatataatatgattaacccgatatatttataaataattcactctagtagagatgaaattgttcagtaaataacaacataatgaaaaaaatgacaacatgcatctgaaatattttgatcagtagaccaattttggttactagtagctgtattattttgacaaaccgaaataatatcgcccatatacattctttcttataatcaaaatttttttgtacatttacatatcgtttcttttcaatatctaaggtggcatatctttatacaaacacactcacatatatatatatatatatatatatatatatacatggtaaacaatccatctttgtgaagcttaattcttgtaataagcttagtatctttacaaatacactattacgaaaatccaaactattgatgaatatttaggatatcaagtgattgagtttgttcatcacggcgccctctaccttagatctgaagccttgaagtcaccaaatctctctttttctctcgtaagaattttttaatctttttatatgtttaaaagaaaaattgcaagctgtttggttgtttatgtgaacaacatgatatatgtttatgtgatcttaataatattagttgtaaaagtgaacaacatgatatataaaaaacattaatttaaactatagtctgtgaaaaaattatattttacgatttaattntaaattttagtatcttaaaaatttactaatgattttttttacacttttagtttagttttgaaattgaaaaaactaactattataagaatcaatgtattaaatatatatatgcgatatatatttatctcagttatagaatgtgaaatttgattatacaacaccaaataaaactctatatttttaaatattaaaaaaaatttggtggtacacgccggagtgagtcaaccggttaacctaagattctatgtttatgatgttgaccatatgatactatatacttcaaatatgttgtcatgcaatccatttacgttaggtagttgtggcgcagcgggacttgatagaaaacctaagctcgttgattcgatgtgaatggccgaacaaaggggtgtatgcagttcgttgattcttgtgaataccgaacaaagacgaacttgaaagttgttgattccttggaatagccgagatatcaagagagaagggaagcttaaagctctgtttttaaattcaataataagttaagttctgcaactacaagagagcttttatatagaggcgacaagaagaaataaaccataacatgtttgggaaaaggaaccgactaagacgtagcttaaagctcaagtaagtaaaagaagagaaataaaagaaagccaaagaagaagattaaaaacgcagtataagtataaggattcgctgcatcacacaaaccgacaaaactaaaagggattttgaggtagcagttgttgcgacacattttctgaattcactcgacgagtggaatgatcggtagcttgcttgagctacaaatctctatcatgaacccgacggggtcgtgaaaaaacacatgagttacttgaattcccccatccgctatgctcgttttgaaataagaaacatccatattctctccatttgtatcatattattgcactacattttacacatggtttgttaaattatcgaaacaaaaataattattgtttcggttatataattcattacctggaacaagatatgcttatccttggggtcaatcctagttttttcgggcattcatcttctgaagagcacaataggtgtatcctaatgccatacctggataacctgaagggagaaacacatctataagtttctataataccgttaaactcgaaaatatcagatttataatacgtgagttatgattatcaagagaatttaccaaactcctttggaagtcaatgagcttggtcgatatacgggaatgaatttgagaaccttctcgtagaaatttttggattcttcaaccgaatgacaattgagacatacatgatttagtgatacaatgtttaaaggagttggcctcttcttcttagcttcaacaaatcgtcgactacctccagaatgacattttcatgtgtccccatgatgcgagaatgtttgttgtcactttggaggttctttaaaaagtgatgattatatatgaatagattttacttagtttttatatcggcatccaaaacagagtagtgtaaaaataaatcacaaaactatttcagtttaatgttttactacttactgtagcgctacattcttatttaacttgatacaataaaattggattgagtatttttttttttttaattcctatggtgattgttgggggttggatttggcccaatacgtaatgagcctaaaaccaagcccattgaacattagcaaacctaggagcgatctacgactcacgatcggcggccaaaagagtgaagaatgaaggacaagtgtacgatacagaaaaataaaggagggtaaaaacgtaaaccaatagcaaaaatgccctaaggagaatgtccaataaatacggaaataaaaagaatggtaggacatccgcattcctcgttgacacgcagaaaggacgcaagtacaacatccgatctagcctcgttttcaagacctcgcctcgtcttactccaacgtcactctaatttacctaatcattcccatctagtcgtcggcctgttaaccgagacggattctttacctattcctagagaaacatcgtacttgtgtgattcctacatcaacagtgatattataaaatgtaactcaccttggctagtagactgtactattgtttcaaaactaatttgatatgtaaatcagtttgccttatgcatcattattagtctatatatgttatatacttgtatttgaccctttttgtaatttataatttttgtaagaaaacactaatgaaacaagatagatagctttacaataccaatatatatgattttgtccaaaaaaaattgacactcttatcaatttaaaaatatataaattactcggcaaatagaagaaaatggacaacagaaagtgaaaatgaatttgagtaacatcatacatgaaaaatagtttacaattttaaactttttaaaagattatttccggtaaaatattaaagaatgagtatattttgcgaaacaaaaaaaaaagactgatgattgtctcaactttcaatcgtaaaaattgatctccattaagaatgtgattggtactctagtagtaaacattaacaaaaaactggaaaaaatagatgcaggtgaatttaacccgataccattagctttcaactaaaattcagcttacctgacaacaactattttaacacccattgacacatatagttgttttctcaaactgagtaaaagagatctactaacacatatgtacgttcatttagagttataacaagttgatgagtttttaatttcaaagctctatttttaatttactggtacattctgtttatacattctcacactgtcacacatatgtacattcattgcatgtatatataaaaaattgcataataaagaaaattaagatatcgaaaaggatagtcatacgctgatatagtgacttaaacaaatactggtcagaggctgatatagtgatttaattaaataattgtgtctctgagtagattgtgtaaccctaccatgtgtcagtgccatacacctttagtactgtaaaagcttaaaatttcgattgtgtcttatttaccatgttgttattattcccccagctttcaactttttcggacaatagaaagttgaaaacgcagttgaaaaaaactattgtttacataagaaaaatgttcacatttataggccttgaatgaaatggtttttaattgatggtttgtacgcttaatggggttgaacccaaaattattttcattcataaaagtttgtcaaacacaagcgtttcttgattttatagtaataaaataataaaaagaagaaagtagaacacatgcggttcaaatgaaggaagaaaattgagatctattataaactgtaaaaacacacctattacttataaaaccgatggatctcctacttttcttcttcttccttttctttttttctactttttttggataaataattttgtaaaaatacagaaattaattacttaaattcagtcaactatctgcattatctttcttatatttatnttctcgattttgtcaagtatatttggtattcataatttatataattatattgcnattagagagatttgcaaaactaccctttttttactactcttttgcaacaatacccttttatattgttcatttttaaaaatattcattcccttgaacagaatgaccaaattaccctcatctaataagaacatataattggaaactgaaagtttcccgccaaatttttggcgccaaaatttatttttcccgcaaaaaaaaaatttccgccaaactttttttcccgccaaaaaaaaaattcccgccaaaaacaattttccaccaaaaaagtttctcgtaaattttttttcctagccaaaaaatgcttttaaaaatccttgtaaattttttaaaaactcttttaaaaaaccttgtaaagtttttaaaaagctttggtagttactaaaaacccttgtaaatcattttaaaacctcttaaaatctttataaagtctttaaaaacataggtatatactttaaaacccctttttaaacctttgtaaatcattttaaaactttttataatagttttgcaagatttacaatcgttttttaggcataagtaagtggcattgaatgatttacaatggattttaaaagcttataaaagggtgaaacatgatttacaatcgttttaaagcataagtaagtggcatagaatgatttacaaggtatttaaaaagggttagcatggtttacaatcgttttttaagcataagtaagtggcattgaatgatttacaagagattttaaaagcttataaaagggtaaaacatgatttataaccgtttttaaagcataggtaagtggcatagaatgatttacaaggatttttaaaaagggttcgcatggtttacaatgttttttaagcataagtaagtggcattggaatgatttacaagggattttaaaagcttataaaagggtaaaacatgatttacaatcgtttttaaagcataagtaagtgacatagaatgatttacaagggattttaaaagtgtttgtatggtttacaatcgttttaaaacataagtaagtgggattgaatgatttacaagggattttaaaaggagttaacatgatttacaatcgtttttaaagcattagtaagtgtcaaagaatgatttataagggattttaaacctttgtaaatccttttaaaactcttataaagtctttacaagcattttttaactcttagaaaaagaattgtaagtatttaaaacatttgcaactttttttgaaccattttaaaactcttctgaacctttacaaaaggttttaaaaagatttacaagaggttttaaagggttttcttataatttcttttaaaatcttttaaaaactcttgtacatcttttaaaaccctttaaaaatcccttgtaaatcttttaaaacactttcaaacccattaaaaatctttaataaacttttgtaagtcttttaaaaccccttttaaaatcccttgtaaatcttttaaaacccttttaaaatcccttgtaaatctatttcccacccaaaaaaaaaaatgcgggaaagaaatttttgaaaaaaaattttggcgggaatttttttttcgaaaaagttttgcgggaaaattttggcgggaaatttattttagaatattttagacgaaaaaaatattaatattttattttgttaacctaaaataattttcaaataggggtaaaatggtcattaaaaatttaaagagggtagaaatgaaattggataaaacaaaatggtaaagttgaaaaagggcatcatgaaaagggcattagaaaaaaaaattcttaaagggataataattaatatattaaactattaagttgattatactgattttttttgtgttaatatattatcaaaacaaaacttgttttatttattgatttttgtaaataactgtttttcttagcttttattacttcttatgttggatgttcgtgtttggtctgagaattacctccttaagcacaagttgttcctttataaatgagctccatttaggcataatgatgtgaaccctttagtttttgttggtgtagactcaaattagagagaggagccgctgagattgataagctagcaaacagaatcttccatatcgacaagcttgggaatcaacctgaattgtgatagaagagagaaaacattttctagaaaactaaattgtctcttttgaatttgaaatactttatttggagcttgtttgcttagcgcatatctcgaatttgattatatctcgcaagataattatgtgacgtttttgaattatgtaaacatctcaataagtgatataggaaaatttaacttacaaacataaaaataagcgattttttcaatacattctaatagttgaatacattaataagaattaggagggatacaataatagataattacaattcattcgtcatgttctaaaaatagagagcaataagtacgacggacactaccgtcactacttggcgtcatggtagataggtaggtggatctgctagatatatgagaacggg

SEQ ID NO: 34926 - DNA, 3645 bp, Arabidopsis thaliana landsberg
  unsure (1)..(3645): unsure at all n locations
actaaacattatttgattaacatccaaagatatatatgagtttatacagtttcttagtttttaaatcggtggattcttttttaacaaaaaaggtttaagatcttgtagattgatttttgttcgtcaaaaaactttattatagatggatttttggtgagtacagataggccacaaaaagtgaatttaactaatttcttaatcagttatttaaaatcgtcaagtatatatggattatcattttataatgatttgagttacaaaatatcaaagaacagccaacaacaaaaaaagaaatcgaagaacaagatcatctatagaaaaaaagacaaatattactgaaaaagaaagaccaaagaccaaaagtccaaacaaaaataaataactaatatttttgtcgctgttctattttaagaacgaggcaaaaaaagaacagaaaaaaagaagaaaacgaatcttctaagaacgtaacaactatcatcaaatcaaaacctcaaagaaccttccatggactttctctcattccatacctttataaactcatacacaactacttatctcttcacttcattagtctccaagaagaaaacatctctcactctctaaaatacacactctcatcaaaaaccttctcttcggttcagaagcattcaagaatccattatgagctcatctgattccgttaataacggcgttaactcacggatgtacttccgtaacccgagtttcagcaacgttatcttaaacgataactggagcgacttgccgttaagtgtcgacgattctcaagacatggctatttacaacactctccgtgatgccgttagctccggctggacaccctccgttcctcccgttacctctccggcggaggaagataagcctccggcgagcgaaggcgagtggctcacacgcgccgaggcagaaggggatgcagtacagaggagtgaggaggaggccgtgggggaaattcgcggcggagattagggatccgaagaagaacggagctagggtttggctcgggacttacgagacgccggagacgcggcggtggcgtacgaccgagcggcgtttcagctcagaggatcgaaagctaagctgaattttccgcatttgattggttcttgtaagtatgagccggttaggattaggcctcgccgtcgctcgccggaaccgtcagtctccgatcagttaacgtcggagcagaagagggaaagccacgtggatgacggcgagtctagtttggttgtaccggagttggatttcacggtggatcagttttacttcgatggtagtttattaatggaccaatcagaatgttcttattctgataatcggatataattagttttaagattaagcaaaatttgtccaacgagttttgctgtatgaaatatctatcgatgactcaacaggttttgatcatgatcatatgtaatgtgatggaaattaaatattgacgtttgtttttttcttctaaattcggttccatagtaaaacttctataataatctattttcttatataactaggaaaaaaaagatttcaaatagagcaagtaacaatcaatgtgggatgtattatatttctactaatcatgggcttactagtctatttagagcatgcccattagttaagaattaagatagtgngatgtatcatgtagggatacataggattngtgtttttattatcgctttgtcacggctagtctttttccatttgtggaatctgctgagtgtttgaattgtcagcattggaagattttaggaagttggataggcttatcttgagacatttatatagttagttattccggtttcggtttgaaacaaagtcattacatgatgtggaagtcgaagttgatgggttgtcatgatggtatgtaatgtgatggaaacacaaagtctgctcttggtgtgaaactaataatgatatcacgaagtaccatcatagaatccagaacacgtctttctttccctatataagaatatttagattatcacccaaaacaatattccaaaatacaacatattgtgggaagagttggtaaagatggttgtggcaacgtcgatggcaatggaggtagtcccattgttgggataggcagatttgggatttgaggaagaggttgttgttggagaaggcggcgtgaggctgagcaagtgttgatcatcattgaggaagagacgctcactaagaaagcaatgagaaagagcttgtatgatgccattttggatgtgttgataaatctctaactatggttaagtgggcctagtgatgttaaaatgggtttcactgcccatttaattaaatgggtatgttgttaaataaatagtccatttagacccatttataaaaaattgttttaattggttaaatgggttaacccagttaagcccacttcctaaatgggttttctcttaaataaatggatagcccatttatttctaacctaaagaacaatttgcagagacacagtgaacaatttgttgcgtcgctaatcgaatcaatttgctgagattttgctgagaaaaaaactctctctccaattcactcaggtaaaggaacaagacccatctttcttcttccatcaattttgttccagacccaattttgttccaaactgggaagtgacgttttgttttattaatgagtaccaccaattcttcttccatcgttttaccttttttcttaattagtgaagttttgttttggacttttgggctacatgaggctttcttattagtacttctcaaatgattggtcgtatttagcatgattttattagtatttcttatatttcaaactcaaaatgttatttattggttttgtttgtttggtttcttttggtttcttgatagaaacaggtttgttgtgtttaagtgttttatatgaattgaaaactaaagtaaagtggtttcttgatagaaacatgttcgtgttttttgagtcttgagtcttagttttgtaaactaacgttagtgcttttgtttctctttttttcagaatggatttagagtctctacaaacaattgcatttctcaatgcacaaaatgacttaatagacatgaatgaggaagatgcagaagtgcaagcaccggagcaaagtgaaacacaaattcagccgactcaaactcaacaaactccacgtaagagacgcaaaacttcaaatgtttgggatgatttcatttcagtagggttagagagtgatgaaaaagaaagagctaagtgcaaacattgtggtacaaagttggtgataggttctagtagtagaccacatggaaattatggaacaaatcacttaagtcgccatttagagaagtgtcctaannnnnnnnnnnnnnnnnnnnnnnnnnnnnnnnnnnnnnnnnnnnnnnnnnnnnnnnnnnnnnnnnnnnttatctatcatgatttaccgttttgatacgtagaatatgagaaagttcgagcgagagacaaatatttaaatccggattatcagtctattttgaggcaaactgctgctgctgatgtttttgtgagatatgaagtagaaaaagaaaaggtaaaagagctttttgcaaagcatcgcggtagagtatttttaccttcgacttgtggtcagtttaagctgtttgacaagttttttgtgtaactgggcttttt

SEQ ID NO: 34927 - DNA, 864 bp, Arabidopsis thaliana landsberg
atttattggtctgagtgaatactaatgtgtcttggtgttaaagctattgcaacaggttcctttgtacagagttgcagcagctttatgttttcgtatgtgtaaatatctatcgtgtctgtctttctggcacttcatttcaggaaaataggtgctcttcatgctcttcctcaatgaagtttccaaaaatattgtgtgtggtctgtaataaaaaaaaatgaaagaaaaaaagagaggaaaaaagaaaagcccaaaagattgaacaaatgaaagttcaaaagaaaaaacgaaataacaaaaaaaacaggaaaatgtgtgttggcaggaaagggattggtattctttcttatctttggggcatatatgtatctatgagtaccccctcaaaacatctttgttcattataggctctaccaatcccccttgccgttttgaccacacacatcatgaggttacttcgatcgagagtatgacgagtgtagactaacctgctatgatcagtgtgtatggttcatctcactgggccagaaagctgctattttctccatactaaaagtaagttatgcacctctgtactttggaatctgtccttctcgcttggatgcatttcgcatgtgggttccttgcctagtaggagtctctttaagctatatagtatatatgtctatatcttaagattatgctacgttttatcattcagaggattatttgatgagatctcacattcagtttgaatcacagttcttgaatgacagtggctgttaatttcaagtgttgatttggttaaatttgtggttctatatggtttagtcctaccttatgttgcaatcatattatgtacatatgttggttgtctactacgtctct

SEQ ID NO: 34928 - DNA, 7541 bp, Arabidopsis thaliana landsberg
  unsure (1)..(7541): unsure at all n locations
tcattaggattgaggcagttctagagataaccattttattatcgtgtttggtttattcattctctgaaactttatgcttaagttacaaataactggctttgctattcaaggatgttggcgttgtctatcttccggttggagtcccctcacgagaattaacatgaaacgacaggctgaagttgaaacattatgtctgcatctctcagtcttcgtggctagtcagaagattatatgcatttgtgttgatagtcatactgtcttcttggtgatattgtcaagtacagactcatgcttcagcaatttccgtgcggctttgaggtcatctgacacgcacgctcatggccgacgacatgctgctgcaaactccaaagcaacagacatgaagaatacaagatttatgttaaagtagtgttgattgtaaaataatataatccgtgtttagtgtttcattcattttacttgtacatatccttatctaataaatcacaactcacttctttaacaaccgcaacattaactttctgccactggcttaattctaaacttatgcatttttaatttttctacggattaaaattaaaatacgacaaaaatattgtcaaattaacttcccactaacattcttcaaattatatacctctgtagtttaatcgacaaaaatatttgttgataaatcctgcgatttttagtttctattacataggatactcaattactttctttacttcaatttgattgttcgtgattttgagcatgttgttaatttgaaggcgattacattactcatgtgtttaagttaattcaaaagtgagcaatcaaccatactttagcaaatcccaccatattccttttttatcaattaattattgtagtgtttgttggagctggattcccctccaggaatccacctgcgaaaataccaggccagccaacaaaagcccaccaagcccatcaagtagaggacctacgtagctaacgagcccacatacgaactagatatttgggccttatgagctcaatcagctgatgaagagagataagcggataatgacctaggaactgacgaggagatattcgcggagcggacctgatatctcggaactgacctgccgaatatccaggaagatctccgcaaatcccgaacggagctaccacatgcgtagacctatataagggaacaaggacgacttggaagtcacattcaattcagcttccattcaaacacatacttttacacttgtaatctcctttcacattgtaaaagctttgtcataatcaatacaaaaagtccattcgttcttagcaatataactctcaaggtttcagtgaagttctagccctcctttctcataatctcaattacaaatctctagtctggatttcagaacccacatttggcgccgtctgtggggacggaaatagatcattccaacaccgaaactaacacatcaattgtgaccaacgatcatggattccaattcatccaattcaactggatctggcttaccagttcagatcccaaacgacgacgttacggacgggcgccttccaatggatctccctcccggaaccaaggttgatgctgtccataacgctgatgcggagaacatctcccaaaactcgaattcttctggatctgaccaaatcattcctactccgcaaacaaggggcggagaacaaaacgtcacgatacagccaaatcattccgaccaacccgtttaattaagaccctccacgatctgccagtgaattggccgagctccgcgtaatgatcatgaacttgatcaacataagcaaaaaccaagaaattgcgcatcgcaacctcgccgcaatggtgggtcagcagagacgggactccactcgcatggcactcggagcatagacacaaaggcgcagactttgcagcaccttcttactcgatccccaaggtcgagtattcgcccaaaccgcctcaagtctcttgtcttctagtgaatctagggtttccaacattttagtataattgggatttatccaaaggatctatgctttatctttcagtttttctttgtgtttatgaatcttgaaactttaattactcttaatctattttgtttttgaatttgattgtttaagtaaagttgtttagcttgtttacatctacattttggtatgatttcagtaatttctgggtttgtattcttgagaatgttgcatgagtagtgattagggttcttgaggatagattagattaggctaatctctaggttagttaggtggttagtgtttaggtttatacccttctggattcgcttggtccctatgcggttttcgctggctaatgtgtagattcgatcatagacgtccagcgtccaaaaaaagttcaaatggatgtctgacctacgaattctagagatttgtagactcgaccaagggattggcttgtctgcctattggctttggtaaattatttcttaaactcctgctcttctatgtttcatcaacgagggttgagattaggaagtggtagagttatggggatctctgtcacgagagtggattgacccggtttttgaatctatcgacatgggtatatacctttcgcctattaaccatttgatgaaccctagagttacccttatcaatgaatctatccttagaacttctattaggtttatgtgtatcccctgttgattgcacttttatttacctgttatttgtatcccctatttgtatcccctgttgattgcatttaggtttcttaattttgtcacctgttagttctactcgacccaatgatcgagtagggcttttaagttcttatttttacttgtttgaatcctgacctaggattgttactagaaacccaccatctttataatctggcttgacttagttgtttctgtacacatcttgattgctagcaatccagtggactggattgacaccctctataactacatcgacatgtttgtgttttaggggaattgaactgaatctcacacacattcaccataagtagacctgaaaaacctgcttatcaatttggcgccgttgccaattttttttgcattgttacatgaagatatcagaaacttttaagatcaagttcttttacatttatcaagttactaactcatattttcgcctgcttgtttttgtggtataggtactaatctttgtgcatgcaaactcgatccgaaggttttgcacacctattaccattcaaagacagaattgacaaaatagcttgtgagttatcagaaaccaaagcaaaggcagcctgtgatcagccaaggccagctactatggatcaacagaacaggccagttgatgttcaagacccacctaatgttgatcaaccaagaaacattggtgctggtgatgccccaaagaatcatcaccaaagacaagggataatgcctccaccagttcagaacagcaattttgagatcaagagaggtctcatctcaatgatccaaggaaacaagtttcatggcttacctatggaagaaccccctggaccatcttgaaagttttaataggctctatagccttaccaagatcaatgggtgctacaatgaagactatgatcgctcagtgagaggaactggaggaactgaggacaaacagagcaaagatatcaagactctgaatgaaaagctagacaagctgttgctggctcagtagaagcagatacactacatcactgatgaatagcacttctaaatgcaagaaggggggaatgatcaaactgaagagttgtgctacattcagaaccaaggagggttcaacaaggggtacaacaatcacaagcccaacgcgatcctctcctacagaagcactaatgtagctaacccccaagatcaagtgtatccaccacaacagaatcagtctaagccatttgttcagtacaaccaaggttatgtcccaaagctgctgtttaatggaggctaccaacagcagaatccaccactagggttcactgaacaaccataacaagccccagcagctcaagatcctgaaattaagcaactcattcaacaaatcattcaaggacaagctactagcgctatggcttttgacaagaagatagctgaattacacaacaagatcgattgttcttacaacgatctaaatgtcaagttcgaagctttgtattccaaaatcaagtatgtggagagtcaatttgcatcaacatctgctccgaagcatcctcagcaacttcctgggaaagcagtccagaatcctaaggattatgctactgcaaatgctatcacaatccaccaagaagatgagtctccatcaagtcattagactctcaatactgaggacattatgattcaagaaggggggattcaactcaaattgctgcacctgccacccaacaattcatccggactatagagcacacacctttgctgaatactcaccattctggaaaaagttcaaaattgaaaaactcaagaaggaccagaatcaagagatgattagcagtgcctccacccaagaaacatacaagaagaaagtcatccaagaaaagcttgatgatcccggttcattcactctgccatgctctctaggaccattgacattcaatacgtgcctttgtgattgggtgcatctgttaatcttatgcctctctctactgccaaaaggctagggatcatggaatacaagttctgcaacttagctttactcttagttgatgattctgttgcacatccacatggtctaatagaaaatctgcctgtcaagattggaaatgttaagatacctacagattttgtggtattggacgtaaatgaagaaggcaaggatcccctgatcctaggcagaccattcttagcttcagctggagcaatcatagatgtcaggaatggaaaaattaatctgaaccttgaaaaaggcatcaagatgaagtttgacatcagaaaagcttcagggaaatcaacaacaggaggttagaattttgggattcaggacatggatgttgatgaagaaacagaagctggaacctcaccaagagttaactatacttctcaactcagcaagctgaagagaacttttgaccacaagaagagagcaatataagggttagctcagactgaagatcctacagaagatgactggtatgagatgagaaaaaaatttaaatggcaaagcagagtcatagagggattatcttcaagggtgatgaagctgaaagatcaactatggatgtttgacaaaatagtcaataaattttcaatgagtattaatccagagaagatggaaactgcattagctatcaaagaggacgaagatttcacaacagaatggtttgcaccagaagatcagaaaggagttcacttagaggaaagaaacttggagagccagttgttgagtgaggagtgcctaaacaacccaccaacccctctgctgaagaagaacacttgattcatgattttgttgctgaagaactcctagagctctggattggatataaagctcaggaggatacaattggaaagttaactcacaagatgaaagagttaaacagcaccattctggaacttcaagaaatggttaaaggctacccaatttttaaattgaggattggtcaaaggagcctggttcagaagaagaagactactctgctgatcagaaaaaagcttattttgaagaaaaatcaaatgagtactcatcctaccatatgtcaagagaggatgcagaatatgattcaaaaactgaaaattcaaccagtgaagatgaggacttctctgttcctctcttcaaccttttttctgactaagctctgtaagagtcaagcttagtgacttaaaacaagctcacttgggaggaagtcccatgactatccatgtatataatttgattctatttgtgtgtttttgtgtgcttttggtttgattaagtttcaaggaagtatttggaaaatttcatatcaagacgtacaagcaaaaccatttctgggcaagtgaatcgaccgcatgatcgattggacggtcgactcattcatgtccgcaaatccgtcaaatttataatcgagcactcaatagagcagtcaatagacgagttagtcgattggacggtcgactcatacatgtccgcaaatccgtcagatttctaatctagcactcaatagagcaatcaatagacgagttggtcgattggacggtctactgattcatgtccgcaaatccgtacattnnnnnnnnnnnnnnnnnnttgatcgattggttttcaaagcataggtaagtcatttcttgacttcgtcggttcactagaaatcatgcggtttagtcccttaacctaccaaaaccgaaaaaaaaaaaaatcccttcgtctttcttctctcgcgattctcttcttcccactttctctcttctttcatacacacttgcatgttcttagtgattcaaagctcttgctcccctgtttttctccatagaacccgaatttagtatctccattctcagatcgacaaggtaaaatcttctgctctcaacttttcagatttctgtaaggtccgcaaaatcctgaagtttcatatctaagtcgatctagtgcttaatttgcatggtttgtgcttgttcagactttctacactttggataaagattttcggtgcttattttgcatgttttagtttgagaatttgatttttgatgatttagggttcatgtgtgaaaaaagtgacgaaaattcctaaatttgttgaaatttgagatttttaatctttttgtcttgcttacttgttgctttaaacattggtttacttaatggtttggacccaattcatcatatcttgcgaaattttctataaactgagactcttgaatgcttttgaggatgttaatgtgagtttgaatttaattgttgtttggagtagacattgcatgtgttaacttcattgtgccttattaaaaagatgttagtaacaatttgagacttgttctttataatttactatgatttttctcttgttacttgcttggttttgagtttcttataggcacaatggtagaaggcataaagagaacaaaccccaaacgttctaagacaatgacctcaactgaatcgcaaagtgaacccgttgctcattggactaaggaagataagaaagctctcaaagtcatctctccacttccttcatttccaacgcgttttgcaaatcgcgagatcttagagaagatgggtttgcacgagactattgacgagttgttcacaaagatgggacttggcgccttcacctccatggatcaccctacattcagtgagcctacagttgatttctttagcaccatggagtacacatttaagaacccaaagataccactagctaaaaaaggaatcatcaacttcaaggtcaaaacaaaggctttctccatatcaattcccgacctttgtgaagcctatggatttgagaacaaaagcgagatgagcttcccgaagtataatggaatccacttcctttggggcgagatagcaggcgggaaattcagttgtaacgcaagtatcaagagcgtccgccattcggtaattcgttacgccttgaagct

SEQ ID NO: 34929 - DNA, 2220 bp, Arabidopsis thaliana landsberg
tgtgtcgttttttcgattagggttttggaacatttcgctataagtagcttgtactttatatttttgaaaactaagtttttttccgcagacactgtgttcttgacatttttgtaatccggatttctcttaatctattcagtatttgcttttcatttcgtttactaagttgttcatcctgttatcatcttgctattactctgttgctatcatgttttcattcttatcatcgtttatgctttctacaatgatgtcttggtagtgactaggtttatgaggatgggttagagtagtttagaattttcagtatgctaggtggttgagtttgatttatagatcccttctggattagtcgttcttaatgcatattcctttctgatcaactggaatttgagcccaaacatttccgcacccaaaaggtattcgatgaaatgtctgaaccactaattcaagagatttgtggctatgtaccaaggtattggttacagggagcgttttggctttaacttgttcattcgtattgcctgttaggttagctctcgtcaatggtgattgagtctgggacttgtttaacttgagggtctctgttgcggtggcacttaaatttggttattgaacttgttgtttaggaataatttattgagcatctcaatcacatgtaaactgaggaaacgaaactactcaattaccccatcctcgggaatttctcatctaattgatttcttgtttactctgctattgtttactgcatcttgttacatgttgcttagtttctgcaattctttactgttactcgatctgatactcgaccacccagttgtctggcaatagactgtgcagtcgagtatccctgttacattttctgtcggttactcgacctgtcactcgaccacaccaagtgcttggcaacaagctgtgttggtcgagtgttttattgtttccgtttgattttctgttttctgcatgttcacttaggactgctaaaacacaccaaaacctgttattgcatggcttaactttgtgacttctgatcacatcttgattgttagcatcacactcatttggattgacaacctaaaatactacaacgatatgattggtgttttaggataattgactaaaaaacctattataagtttcgtgtctaaaaccccggaaattatgcaagcaagcagaccaatgtcttctttggcgtggagaatctctcaaatatgtatctgtcgatagaattaaaggtttagtgttggatacatgccttatctttctaggcagactagcacatgtttcatgtagaataaagtcgcattgctcacaaccataaaacggatcgttattgattttgaaggcacatgcttcacaaaatttgctttcgtggttaccatccttgttgagtcttaaattatggccatggatgaagtgcttgatcagattctcatcgaccacctcgaatggcgcaatttcctcctcttccggtgttccttctagttcaactttgtcccatacatcctttctcgtcgcgcatcttgcatgaacagcatagctaggacatttcgagcaagaataagccccataaaacccatctactttcttatgacaaactccacatgtccaattcccgtgtccaagaagactagtgtaagagatgcgatgattatgacgattgatatttatcacgaggggtaaatcaatacaagctcgatggatcatgaaattgcattgaagacaaaaataaggacttcgatcaccagccgtcccacaagcgttgcaaataaaattgactagtcttggaacaaggtggagttgatgctcatgggtcgttggactcacaacagaaacttgcggtggtttcgccatacagtaatcctcgcaaatggtgacattacaaacatcgcagtggtaaactcgatcatagttgttagataactttttgaacttcttctcgcaaagaaggcatttctcgtgagcatactctggtgctccgtattggagaaacttgagagggtgtttggatgagaagtgtggtatacgtctggaatgagcccgacacattccaaatggaaaaagatattgcacagacgacattcataaagttgtttttcattgattttgatattcgtgttgcacatgttccaattgcgcccttctttagtaagaacgtctccacgttcttggagatcgtagaagtgaatgctgatgcactttggaattgtcaacactagtagg

SEQ ID NO: 34930 - DNA, 4453 bp, Arabidopsis thaliana landsberg
ggtatcagatactctcatgtcatcaaatgtcgcctagatagagcaattgccaattctgtttggactgatctgtttccctctggacgcttggagtatctaagatttaagggatcggaccatcgccctattgtgacctactttgcaaagaagaaaaagaaaacacgtggggtttttcgttatgatagaagactgaagaacaatgctcaagtcactcagctcataaaggagtgttggaacagagagccttccttctcagtcagtcagagaatagcaatctgcaggaaagagattgtggcatggagcagggaaaaacaaaggaatagccagaaacttattgagcaaaagaagatggagatagaaaaggcaatggtaagtttctgaaaataattttttatttgctagccaagatcaatctagatgggaccaaatcttataagctgggggaaggttactggaagcaaaggagtagaatcatgtggctatgtttgggagatcggaactcgggtttctttcacgctgtcactaaaaagaggagagcacgaaatcgcctttcagttatagaagatgaatctgggaaccctgtctttgtagaccacaagattactgaagttatttctgcctacttccataagatgtttcactcatacgattaggatgagtcttatacacgagcaactgtgacagaagatctgtctccctgggtatcggaggagaccaatttggcattgattgcagatccatccctaaaggaaattcatgatgctctaatgggaattcatgcggataaggcgcctggacctgacgacttcatccacgctaagctcttgtccaatctcactgggattctatcgggcatgctatcatctctaaggaccaaggcttttatcgaaggggaaccatgcctgcttcaatcaatgagactgtcatcagtctgattccaaagatcactggagccaagaaagtctcttaatatagacctattgctctctataatgcctattataagattgtgtctaaaatcttaactcaaagacttcagccgctccttccaagcctagtgtctgagaaccaatatgcttttatcaagaatagagcaatctctgataatgtcttgataacccatgaagtgccaccaagtattgcttgatggcgggaaagatagatatttctaaagcctatgacaggcgaatggaatttcatcaaagaggtccttcagtggtttggttttcacagcatttggatcaattggattatgcagtccgtcacaactgtctcctattcctttctcatcaatggttcacctcggggaaaggttgttccatcaaggggaataagacagggagatccgctctcctcatatatgtttatcctttgtggagaggtgctatcaggtttgtgccactcggcttagaagaaggggctcctacggggactaaatgttgctagaggcagtccttgcgtgaatcatttgctgtttgcagatgatacaatgttgttctgcaaaacaagtgacaaagcttgccaggagctgatgagaatcctgaaacgctatgaagaggcttcaggtcagatgatcaatggggataaatcttctatcttcttctcaaggaaaaccccagtttctaagcgggatagagttaaggagctgctgcttatctctaaagagggtggagtggggaaataccttggtttaccgaagctctttggcagaagttaaaatgatattttctcttccattgttgatagaatcagacataacgctttgtgttggtccaacagatttctccctggggcaggaaaaatggtaatgctaaaatgagttcttgcctacatgcccacatatgctatgccttgtttcagtttacccatctccctatgcaaaagaatccaaactgcgttaaccaggttttgctgggatagtattcctcagaaaagaaagatgacttggattgcttgggagaagctcacaagacctaagcagaaaagagggttgggttttagagatctacagcagttcaatgtggctttgttcgcaaaaaatcagctggaggttattaaaaaaccctagtagtctcttggcaagggtcctgttggggaagtattgtcctaatactgacttgctaaaagttaaagtttccaagacggcttctcatggctggagaagtatcctgagtggcagagatttgcttgttaaaaacattggctggtcaacaggtgatggtggatccactctaatatgggatgattcgtggatcctttctccggattttatccaacccacgggtcccgctcctctcctttcaaaaggatggagagttaaagatttgttttttcctaatttgattgactggaatgaagcacttgtgaaggatctgttccctgctttgtcagagaatatcttttctattacacctagccggttgtctgcaccatataagaggatctggattcatacccaaaatggtgagtatacggtcaagtcgggttacttcattgctagagaatgtcagtctccctctagtgttggccccctgtttaactggaagaaagaaatctggaacatttgcacttcctagaagattaaagtttttatgtggaaagctctccaaggcggccctctctactggatgtcagcttgctagcggaggcattgaggttgatccggcctataagaagtgtaaggaacctgaaaccattgaccacttgttgttcaattgcagttttgcaaagcaagtctggcttttggctcctttcgccaagggtttgtttctagctagttcagcggatttggaaagtcttgtctctcaagggaacaagctcatctgcctccctcggtgggcctagccagaagtcccctattcccctggctctgctggaacctttggattgctaggaatcaagaagtcttcaatcaaaggtgtttctctgctgaagaggcggtacaaaaagcgatcaaggcaaagagcccaatctgttactcttcccccacctggttcaatcttctcggggcaaagagcagttaatcgtaccccgcgccacagggattgtgacttttttataatctacagaacggacgcagcttggagacccggtgctcctgttgcaggtttgagctggatttttggggactgagttttagatattcccagaagtcactctttggtatgctctcatgtggcctcgcccctcatggctgaagccatagctgttcgtgcagctctctcaaatgctaggatgctcaagctcccacgcctagctttggagtcggattgtagtaccttggtcacaacgatcaatactaaatccaccctcccggaaattcatggcgtgttagctgatatccttctcagctctctatcttttaatctctttgtctgtaatcttattcttttagctgcaaattcggaagcagatgctctagcaaattcggaagcagctgcaagtttcttgatcaaaaaaaaaaaaacatattgtcttatctcattaataaaaataaattaaaatgaataatacattttgtataatattttactcaacagttctaaaccatgaaccggtttgtatgaaggaatatctattgaaatatccacattgacatatccatgtgtagaaatatttatatttaattcaatgaatttgaaatcacagtggaaaattagccagcaatacgaaggtaggttaaagatattggattagtgaagtctatatataggatataaactgtaacataacctaatattgcctttaaaaatttcttttttaaaatggaagactctaaagaaagcctaactatgtgagctgtagtagaaagttatgaagaaagcgagagttcaaatgtcatagatgtattttaaaatttttattaggaataaagctaatgatagaatgatatgttttaaaaaatctgtttttattttgtaggtgattccgatgagggaattttacattcctcagccattgatggagatcattgtaagtaaggttggtgaagatggtgttgatgctttaaagaactagttgctcgctaggagagaggggaaggatactgttccgtcaaagaaaacattagcatccgtacgaattgacaaagaccatcatttcatgtggtggtcaatgactcattcaaagtattacacattcttcaaaaagtgtcttgccgcaaataatccgtatgcgaagtttgtagagaatcacaaaggactggcttatgagttgactatagggtacttccagatgagattccgttggaaggtgtgccatggtaaacgcattggtggtttactcaacttgaatgacatgaaagtatgcgtagtacagccaccttatcagccgaaaagagttggtaggccaaggtgatgtaagtgtaagaaagttgagtacaagttgagcacgtgtaaggattaaggatttgaggatgttgtcaggggatcctctagagtcgacctgcaggcaa

SEQ ID NO: 34931 - DNA, 1874 bp, Arabidopsis thaliana landsberg
atggtttaactaattatcggtttagtagaattttggtttgaccattttacaccaaatagctctaattctttcttcttataagttgacgtcatcttcttcttttctcatttgtcatgatgaaatatgtcgtaaaagcttgtttattccaatagcacaagagaagtatttatacaagaagatttgtgatatacgagataaggtcgtatcttagtaaatctaagattcacatataccttagtctaataccccccctcacgttggtggtatgtaattagtaacacctaacgtggacaataaccgttcaaacgtcggtcttggcaacgacttggtaaaaagatcagcaacttgctctgttgtagaaatgtgctccgtagtaatgagtttatcgagaactgcatcgcggaccttatggcaatcggattctatgtgtttggtgcgttcatggaagacatgattagctgcaatgaaaagtgctgcttgactgtcacaatgaagacttattgattctggatgaggaacttgaaaaatgagaagcagctccttgagccatatgagttcttgataagaataagccaagcttcaatattcaggttcagctaaagagagtgatacccgttctgtttctttgttttccaacatataggggatttgccgagtaagacaacatagccggacagcgaacgacgcgtttttggacatgtttgaaaaatctgaatcacaataggcatctagatgaagatcatcatcgttgcttagtaataagccttgtccgcaagtccctttaagatatcgtactaggcgaactgctgcatcccaatgacgtttacgtggttgtccgagaaattgcgctagaagatgaaccggatagcaaaggtctggtcgggtgataaaaagataaaccaaccggccaactaacctgcggtatttggttggttcaggatagaattcaccgtcttctttggctagagtatgattctgttcaataggaatgtcaacgggtttagctccaagaagtccgcattcagagatgatatccaaagtatatttgcgttgcgagatataaatcccttgctttcctctggagacttcgatcccaagaaagaattttagaggacctaaatctttcatgtgaaagcattcgctcatatatgccttaaactctgcagttagcttggaatcattaccacccacaatgaaatcatccacgtaaaccaaaacatacaaacacgagccccccttgaaatatgtgaataacgagtaatccgtgtaattattcgtaaatccaaactctatgagtgcattggagagttttgaaaaccagcatctcggagcttgtttaagtccgtaaagcgactttttaagtttgcaaacttttgaagaatccacattttcaacacccggtggaaccgtcatataaatttcttcctctagatctccatgtaaaaaggcgttatgaacgtccatttgaaataattcccaattacgagcggaagcaactttcaacagagtacgaatcgttgtcatcttcacaactggtgcaaacgtttcagtgtaatctgtcccttcctcttgtctattcccaagagctacaagacgagctttgaacctttcgatagatccatcagagttatacttaatgcgaaaaacccatttgcagcctatcgcatgttttccttctggcaatgttgttatatcccaagtttcattctcttcccaacttctcctttaaccgcatgagtccatcttggatcactcattgcttgtttaaatgaaacgggctctgaaccagcgctaatagcggccaaaaacatctgttgaggaggagagaaccgatcaagtgagacataatcagttaagggatagatacacttact

SEQ ID NO: 34932 - DNA, 2962 bp, Arabidopsis thaliana landsberg
  unsure (1)..(2962): unsure at all n locations
accaatctggatagagtaggccctttctttgtatttcccatttccaactttccaaggcaaatacccccattttccagctggtctaacaggttattaaaataaaaataaaaaattccccccaaaaaaatcatgtgtcaattgaaccttcttttaggcatgaccgtatgcccaaagtttggttcggagtttaaaagatcaagatttgacaattctataaaaaaaaaatttgggtgtaaatgtcatttgtctagagtatggttaagatactagaacctttttctttacaagttcaaaattcagaattaaaaaaatgtaagattttcagagtttgtggacatcaaattatcaggtaatatggatagtttgtgaaaattgcaatatctatctatacaactaatcattgtgaaacatacatttaggactagggagttagatactgttgtgttgccgagactcaaactcaagaactggtcagatgtaccgagtaaagttgtatatagtcaactagtacatatttgaacattatacaattaattcagatatcctctacgtaaaatgcgcaatgtattttcatgtaataaataaatatatatgcaaattgatgaatttgacatatatattcaactaaatacgtcaattatccgattgcttgtctcctataaaaaaatctctaaaatactcctaagacaaagacatattttttgttgtaaaaaatgtgtaaattaaagtaagaatccacagaaaaaaaaaccatataaaaatgaccaaatccaagtccccaagcattaaaaaaacaaatatcaatccaagcaaagcataaaagcaaacacattacagcatcgtaagccaaccactcttaaactaaaagttgtctttctaatcaaaagccaaataatagaaagagtatggaagaagatgatggagacgcgtctacgccgttttggcttcaatcacgccgcaataacacttacttccgccgcactgcaagtctcggtggccgtacaaccaccatcgccactcaaatattcttcgccggaacagctgcaatcctcatagtcgtcttcattatccctcctttcttctcctctgtttctcagattttccgacctcatttagtccgtaaaagctgggattatctcaacttcgttctcgtccttttcgccgtcctttgcggcttcctcagccgcaacaccaataatgacgaatccaatcatcacaaagaagaagacattcgtaacaaattctcgagttcaccatcgatcattgatcgaggaggtcgtgcatctaacagtggtacaacgccgcgttattggatcgatgatcgcggtggtggcggcggtgatcaaacggtgtacaagaggtttagtagattacgaagtgttagctcgtatccagatctgaggctccgggaatacgaagccgatgaacggtggagattctacgatgatacacgtgtaagtcaatgccgttatgaagatgtagatccgatctatccaaatcaaagttacagaaactggcatgaggaacgtaaaccaccgccggaagatgtagatcaaacagaggacggtgataatggagaaggaagtaaggtccgtaacggcggttcggaaactgagaaagttgaggtggttgcgacgcaggaagctgcagtagtcgacgagctcaaaatgccttcgtgtccgccgtatattccgtctcctccgccgtctccgccacgtcctccaccagcgaagcaagcgaagagaaagactaatagagtgtaccaagatgtttctccacaggaagagaagaaagaaagagatgattttgtagcgacgacgacgccgattccacctccggcgactgtgtatcaaaagagcaataaacaggagaagaagaaaggaggagcaacgaaagactttctgattgcgttacggagaaagaagaagaagcagagacaacagagcatcgatggcctcgatctcctcttcggctccgatcctccattggtctattcaccaccaccgccgccgcctcctccaccacctttcttccaagggcttttctcatccaaaaaaggtaaaagcaaaaaaaacaattcaaatccaccgcctcctcctcctccaccaccacctgaacggagatatgaatcacgcgcatcaacctcgaagctccgaaaagctccggtggaatcacggacatccaaaccaaatccgccagctaaagtaactcaatacgtaggcacaggaagcgaatcaccactaatgccgatcccgccgttttctcctcctccgccgcttaaaaagccggcttggaaattcgtgaagcgtggcgattacgtcaggatggctagtgacatcagcataagctccgacgaacctgatgatccggatgtagctcaatcagctggaagtaaggaggccgtcgggagtatgttctgtccgagccccgacgtagataccaaagccgatgatttcatcgcaagattcagagccggactcaaattggagaagatgaactctgtgaaaagagggagatccaatttaggacccgaacccggacttcatgaatccggatcttcaacgggttataggcccagcccaagcgtatagaggctatttcttttagattttggatttttggattactactgtgttggttttttttaccttacttttgtttagactttcttatacgtaattttgtggtgtatacaattcctagtatccgtttttacagtttttagcccatcttgggatgaaccaaaaaaaatctctatacaactagtttttcttgtaatactctccatttttattttattttgaactatgtttggatggagaacttatagctttgaaaaatatattcaatatttttagaaataaaagaaaaaaatactatagctntaattntatatncatcaacaagaaacacattgataggtatttataaatatttaatttgattaactcaacgtttaata

SEQ ID NO: 34933 - DNA, 3062 bp, Arabidopsis thaliana landsberg
ctcgacctctctccttctgctacagccagcaccgcggtcgcgtaaactacgagactgcagaagtcgtccgctcctagtgctagatcgagtgagtgtggtcctcctcgtcctccctgtttcacgaggctcgaatgatgaatgcctcgcagggacatgcggaatctcctgctctctaggctcaggcctgcgccgacttggctcgagcgcgtcatatctcctcgaaggcatgtcctgagggagatgtccctgcgaaatagctatagtagaagaggagcagctaagcttgttcttcataaacttgatagccctgaggcacttggcgagtaattgtcttgtttcttgcaccacttctgcagcttgctgttgttcctgtgagctttgctcaaactcttgctttccctcgcaggaggtatatgctcactgaaatgatacatgctcgtgtcaaactccgcctcatctatatcatccgtctcatcaacatcttctgttgtagctccttcggtatgactgatctcctcagttggtggacggccctcgaaataaagatctttaagcgcaggcttgaagtcaatgttcctgccctcgagaatcctagtagcgtcaatgcaggggagaagaatgttggcgaaagtcgcgagccatgtcaaactccaagaactcacatctacgcaaatgatccaagtccatcatcctcggtgctaaccctggttccttgagcggtactccacaagcttccagaattggcgtcacaacgccacccacgcatagtgctcctctcaccttcttctttccgttcgtcaacgcccatttcctgtatccacacagatggatcaacagagacattactggtggtgcgttgttgagatcgcctctcaagacattctttcccttcgtctgacggagaatccctgtaagtgcataatctatcatctccatgtccatgttagacacggtgcctgtagattccctggagtaaaagacgttggcaaccgatcgctgaaagtagcggatcacaggactccgaatttggttgttcttggaccgcgccgagtttagcggtagattgttccctatagtggcccacaaatccttaagctcttctctgtcaaatttgggtttggttccctttccactagggaaaccaaacagtttttccaacttcttgatcgaaagctgataccgctgttcatccactgagaacgtcaagaaacctaatcccatggtatccagctcaaagtctgtgagtccctcatacatctccacttgcagcgtggaaagaaactcgattgtctcctccttataggcagggtaagggtaagacatgagtgtctccagataatacttctcgaacagatgttgtacgtcctccagtaaccccaactgggctaaagtctcatagcacggatacctcgttccctagaagtcattcaactcgaagaatctgatatactcctccactgtaacctcgtcgggtttgttcagcagcttcgtctccttgcgccatgactctggctcatactcagtctcgatatcctcatcaatcagctcatatctacttgacatcgccctctttcctctggcgatttcagctcttctctgattacgtcgggctgcagagcgttcgaattcatccctgaaactctggtaaacatattgctctctcggtctagcggaccaggactcagcttcatccacattgtaatcagggtccatagaggattctccgctgtagttactcattacggaacctgaaaacaaaattaaactcaaagatagacgttaatacgttagtcccaacaaaaccaaaaacacaaaccaacagagtaaaccgatcgagtgtaccaaaatttttttttttttttttttttttttttcggtttggtgaactcgcggtcgagtgattccttggttgtgcttggcgatcgagtgaccttgagaggcgagagatggtgaagcggtttgaaagaggtcgagtttggttgcttaatcgagtgaaccggcgatgacgagctttcgtggggatgagagcagcggcgatgaaaacgatggagaggcgttgagaagcggcgagatcgagtgactacgcaaggtcgagtatgttgagagatggcggtgagagcgatgaagctgtgaaggagcagcggtcgagtgaacttgagctcgcggaagagatggctggacttgagagatgagagaacgatggcaccttggtcgagtgatgtcgtagaagtggtgaaggcggcttggtgacggaggtcaagtgaacggaatggcgaggtcgagttgttattttggagagagggggcaagcggtgatgatggagaggtgaagagagctgtggccgagtgtgatgaggcgatgaagaagatgatgataaggagtcgagtgacgttgttgatgttgggaaatgacgaagtcgagtgaacgaaatgaatgagaggtggtgaggaggagatgacgaggtcgagtaaagaagaaaagggagcgttgatttaagaaggatggggttgagtttattgggttatggaggagaaaacaaggtcgagtgatggaggagaaatcgagtgaagatggggttgcgtggagatcgagtgggagtgaagagattccatgtctcttggtctcttgcatggaagacatgggcgtcagcctctggtccctccatgtctacttgtctttcttttgagctctctatcgactgtaaaatccgcaggaaatccctcaaacttctttaaacttagatttcttcttaacatatctttcatgtcgaaatatattgtgatccagcaacctgatcgctcggtgaatctttgtacaactcataatcttcttgactactacaatcaaatatatgatcatcgtattcctctgacctatctgtatacaggagatgacataaaagtagcacaccttaaacaattttaaattgattatataaaagttagcatctaaataattatgattaacgttatacaactatcggaatatattacttcagaatgaacactttcttcaccattgagggtattggcaagtacaatacttgcagtattctctattga

SEQ ID NO: 34934 - DNA, 3359 bp, Arabidopsis thaliana landsberg
ttatcagaatattcaaagtagacaacatttgaagtatcaaataatacactctttggatttctgctactgtggcacaaacatagcgttatctcttgaggttttggaagacacagagcaagaatcccaacgatcccacgcaagattaagcaaagataattcctcgagcacgggacaaccagaaagaagctttgcaaaaccaatcttaccctcttcaaacacaactgaatcaagatttagagtcttaagctttggtagacagacatttctcagtttaactctaggaccatctttaggtcctattttcagcctaaccagtgtcttacttgcaaaaacctttgaaggcaaccaataaaccaaagagggagagacatgtagagaaagatctgatacaccatgtctcaaggtatttaatatccaagggaagacatcttcatcctcaataccatctccacatttcagagagaacttgttaatatgatctttccctcgcaatttcaatactctatccacaaaatctataaaactcgtttgatcctggtcctgcatcgcaacctcgggatgcagagagggaaggacatcaaaatcaagatttggtacaagagcaaacaaataccgccatctttttgagagaagtgatgtcaaagcagcttctttcgtggacaagttggacaagatttggcaaagaagattgtctggtaaacaattgattatatctttggaacaatcatccatggtttctttgagacagatcagcctctataaatctaaacaacacatccaacaagaagatttcagaagctgaagtcaagatacaaaatacagggttctctaaactccaaaccggtatcatcaaggtctaatccttcacacaatcggaatcataagcttcggttctcgaggaaagaaaaaacaagaaccacaaaacaattatcagatcttataggaacacaaggtctaaagcagaaattataaaacttacttgtgttgagtgtaaaagcagagcccattaaaatcaccctacagcttcaaacaaacggtgagggttcatacgacttgaaaaggagaattataattttttatgcaaagcaacttctggacgaaaagtgatagaagcaatttggtattaaaaatgtcttggaaacatgaagaagcaagtaagtttatccgtcattcattattggtctacattgttattcaattatttatctcatatatcggccaagtcatacgattcttgaaggaccagtaaagatattttgcgttcacactatagaaagattattcaaaccacgtgtatgcgtgggaacaacagtttaaacaccacagaataaggggaaataaacacaccataaagttcaacattctctcagttacaaaaaggacaaaagccagagtacaaaagtaaactacaacgacagaaacagaggaaatatttgaattgctttgagtttagatcaaagcctagtacaaccaggaatcatcatcttctggaggagaaccatactctaacatgggatctattatttggggaggaggagagtcaacccatggatatgcttcttcaggaggaagagaagaccatctcgttgtcaagaaagaaggcacggtagatgacaaactaagattctcagagattacctggatcttgcactttggtgaagctatcttaggaatcttctgaagcttcttggatagttctaacacagcagggtcatatgctgtattgtagtatactaccaactcttctagacggggcattttctccaagaaatacttgatctgcctcatttccgacccgtcttcttcatcgttgtcatcaaacagaaatatcttaagaaccttcaccggagaagatgaaaggcaagaaggctgcttcggacgcttacaacagcacacgttcccacatgccttgttatacttgtggagaagacgctgaagaagtagcataaaggaaaggtttcatagttaagttgtatttgttttcatgtcactgataaacaaagatgctttagtggttttgttttatacctttaaaacaagggtttctagatttggacagttcttgagtagacccggcagtgaatcccatcttatttctgagttattctcgatcgttaactggatcaggttgttgaaaaccggtattggctcacagcagaaagtaagtacctgaaacaaaaaccaaaccaactatatcatcactttcttatgaccaccaactaaaggaattgatagacaaacctcaatagcttgggcagataggtaaaggatctgaacagtgcttattcccttaagaaaatccgttgcattaccgaccatctgtttttcctcatcaccttctgagaaatagtcttcttctgaaaagtctgcatctccactctgatcttctgtcagtcgaagaccgatatgagcttcaacgagcgaattaaagttcactttcggatacttgctcgcaatagcgtcagaatactctaggtaaacaaggtttggagtatcaaatgacacgctctttggattctcataagtctcctcacagaaaaacgtcagcctcttgagggttttgacagacacagagcaaaacttccaatggtcccacgcgatattcatcagaactaactcctcgagcacgggacagccagaaagaagctttacaaacccaaaaccacgctcttgaacatcaacacaatcaatatagagagtcttgagctttggaagaaaaacatctttcctatcaagggtgagagtaagatcatttgccggtcctaatttcagcctaaccagtgtcttactcacaaagatctccgaaggcagacgaaccccattcacattaacttgcaagtcaagatccaataccccacgctctaacacattgagtatccaagatgtgacatagtctggaataacaccatgtccacactttagagagaactagtttatagtagatttccctagcaaatccagtactctacctacaaaatccataaaactactaaatgtcacatgcttttctctggtactaactggtggacgtagacataccgagtcatcgaaaacaaggtttggtctgaaagcaaagagatagcgccatctctttgagagaactgaggtcaaagcagaatcttctatgggaaggaatgacaatatgtggcaaatcagagcttctggtagattgctgattttatcttttggaccaatatccatctttttgataaatgagagtacaaaatgctattcaaacaatatactagtccataatttcctttttgataaattggcaacattcaaaaattagatttatgataatttggtaacatgcgctacaaacaaccgattatggaaactagaatcgtataaactaa

SEQ ID NO: 34935 - DNA, 3322 bp, Arabidopsis thaliana landsberg
  unsure (1)..(3322): unsure at all n locations
ccggcgacaaccgctctcagaagagatgaagagacgcgaagctatgaaaaggtatgaacgcaaatagaatcgcctctctctcatgtatagtaagtttacattgccatggtttactattttttctataactaatttactattaaaaaaaaattttgtcaaagattttacacatacaaaataacaacagtccaaaaatatatctaatttggaagatagtgtatgttatttgttatgttgtaatatgaattaaaacaaatttgtctcaaatagtttgtattcaaccgcaatatattacctaagtaaacaactcttctcactttctcaacattagctcatttcagctttattaattgaagttgttagcaaaagaaaaaatgactcaaaacatccaaatttgaacttgttaacttcagcttcagtagtacaatttttttttaattttttttcacatcggattcacctttttggccaaattttatcatcactaaaaataatgaagcatgtttgtacatatcatctgttatgatcataatcatctactagtactatgagaagcataaacatatataccttttgcaagactctcaaacatttttgattacatggagacgtaaataacagtgatgttatagtggaccaaaaaatgaagaagatacatttacatagtgagtctcttgagtcttgacaattgccgaatttttcctaaatagtttcattattgtgatatatcttgaggttaaagtaactctaattatagagaactccatcgaaagaattagtgcttgaactatttgtggagatatcctgcaaatttgacaattctttagtagccaacagctggcaaaagagcctaccataaagacctaactattgcttggacaacttgtggatatatccatccaaattcaagacaaagttggtaatgattattacatgagcagtagcaatcaccaagtaacataagaaatacttaagtgcaataatagcttgtggctcaaagcctaatatagtctcctagtatcaactaatttaacgaccaaaagatcaaccttgaccaaaaaaaagaaaacgaaatgttcaaccatatttctttttaggaatgaaagaacaatggatttgacatgtgctagagcatattggcatcgtaaggactttttgaaggaaggcacacttggcttttttggtagagtaagtatgaagcctaaatttcttcaaaaattttgaattcttcaagaagtatcttagtagctccatttctcctgcataccctgagagcgcacgtgtccattccacaaacttgtgcgatgataccaaacattgaggcactttagaaaacatcacctttggttctttcttcttcttaccacgaatgcaatactacttaaccaatttctgcaaaaacagaagaaaacaaattgcatagagaaatatacataaaagattttcacaaacaatatgcataaattagaggcttaaagtcattcattatcaatatgagagattctagttttgggcagctttcaagaagggttggcaatattttcatatcagttccagaaaatttagcatccaagctggataggtaacgaaactgatgcaccggttctgatttcgagtattaaaagattagaagtaaacaagtaaaaagggaatgttatggtgagaaacttttgtagaacaatattcatatatatacatatcagcacaaaatttgaggtgtataccttccaaatatcattactaataactagctccctaaccctggatatgtcgctgagaatgtcaggaatcgtgttattgtatgtcgcatggctattatagaaaccaatatctagtttggcagaggaacccaaattgatgatctgaaagttctttggtaaagagacattagccctcaaacactggagtagaggtgcataaatcacaactttagactcatcgatgtagactctctttagagtacgagagcgcacttgtaaaacatttgtcttatcatcattcgaagatctgaggatggttaaatctttcagaagtggagagcctgagataagtttctgcaacgtgatcttgttggggtacctaatatatcgtaaatgcatgatctttagacaaggtaaggaaacaaagtcagcattacacaaggtgacctcacagagtcataagtgtaccagtgtctcacaggtatataaacacgagggtatctcaccacatcaaaaatattcaacatcaagatgctgaatcctacgcctagccgcaacattaatccatgacgagatatcacatctatcttgacggtaaaaacttaaccgtactttgcgtatcgatgactctatgtgggaattaagaaaccttttaacaaagatgtctccatctttagaagatgtgtaacggactaagtccaattcaagagcaaattgccaaagatgtctccatattgtggacaaaacacttgttttgacagcatccttagtacaaaggtgaaatagtatttcagatatcaaaggttccggtaactggcttatcctaacttcctcatgtgacactttgtcacatattttttgtttcttctttctgccaaccattcttcacacaattaatctgcattatagaaatctaaatccgtttggtagagttcagaaaatttccagttaagccatacattaatactcgccggaatattcaaattttctcatcaattgttaggtttaggggttttcaaggtttctgaagaagactatacgataaacaattaaaaaattaaataaagtagaagaataactcattaatatagagtttaattagcacggcagatcaaaccctccacgcccatgtagcagatgaaccctaacgcaccatcaatccaagtgtcaccactgtgcttgaatttgccttttcgactccttttgacacgatttcaagtgtaaaacgccttgccgtttttcacttccttggtgttgatgaaatggtgtgacgtgttcgtgattcagttttgacttttggtatataactaaatnnnnnnnnnnnnnnnnnnnnntgtctgaacatattaaaccaacaaacaaagaaccaaaaatcctattggactaaaccggacatccccgtttcactgagattgtaaaaaattgttttaatcctgcttttttttttggactcaagttaagtttaatctcgacaagaagttagttcgagagggttgtttgactcttgttgtatagggccgaatcaagcctttgatattggacattcgattagacttatataaggtctttgattataggctttcttaggtttaagttatgtgtttagggttaataacctaact

SEQ ID NO: 34936 - DNA, 3255 bp, Arabidopsis thaliana landsberg
cgttgacaggggcaattatttgaacatgtcatctcttcattcacataggctatagcgtatatatatctatgtagtcacccactcaagattaatcaatcttatatccatactatgaattgggagttattgataataagcaaccttatgaagggtacaatattacatagaatgccattgattatcagtatttttaaataaattcattaaggatacaatagtaatcacaaaattaatagatttaaattaaaaattgtaatattttttaaagtaattattagtttcccaaaattaaaataactttctctttcctattaattatggacgaaaaattaaactctatttcttaaaatttattaaccaataagaattgcaaaactaagatttgatatccaattatactattttattaaactaacatttttgaagctaatttttatttttattactatattaatattaaaaattttaaaaatcataacacttgcttgataccatgaataaaaaatcataatttgtgatagataaataaattcaattttagaattttgggttaaatattttgaaatataaaacaaaactttatttcaaaatttctaaaaacgagattagatgttacaaagatttatatttactatgaattaaacaaaatattaatttaaaataattatcattatgccttacatttagaaatatctaaacaataaattgtacatactaatttcgaaatattttagattttatttttttatttttttaaataaatccataatatattattgaacaaacttttgaaataatgtaaactaattatacatttttcattcaaaacaaattatccagcagtaataaattgtttttttaggtgtatttcaaaattttaattatattccaaaaatccaattaattatgattaaacaagggaaagaagaatattaaaaatgtagctaaggaaatcaacattattacatttgttaaaatatatttttttgacaaaattatttgttaaaatgctcttcatatctttgaatttgaagaaggaaaaaaatcaagaaagggtatttgtgtgttttaatttatgatatatttgtaaactttaacatcctatatgttaatccgcaaaactcagtcatatataacatggtatttaaaggtaagcaaataagaattttggaacgtacttttaatggaatgaaatgaaaacaagaattatgagacacaaactacatgaaaagaaacggaagcactatataaaataaattgaaaacaaactggacatcaaattaaatatccacctggtatgagtttgggttatgacttatgagcactatataaaataaatttgtttacacacataaccctgcatgtacgtattttgtgatggttacaggttggtagtatttttatttcacatatatagacggggtatgggacgaagaatttatgatagatacatcacaggttttctattccaagaaatataatacattccaaaaaatttatattttgtacgtatatgagagttcagatatctaatacattgtactataatatatatcacaaaataaaaaaataatctacattgaattaaaaatatgaaattccgcacgtacgtgcggatcaggatgtagtattttatataacagtttactcttcaattattagcgtagataggtaatgggaaacttgaatatagtattagggaagcataaaatctttttttgttcaaacccgtcgggcccttttagcgggcaccgactgtttttgcattgaaaaagattccaacaaatgttttcttttagagggaatatatgcttccaattttcatattttattgaaaaccactaagaagtaaagaagtgtggttagttcatttttttttttggtacaagaaacatagaatctgagccacatgtaaagttggaaagagggtttgagtatctatcttgtaatacaaaaatacaacaaattcgattctcttggagtgaaagtgttttgagtaacaacttaatatggtttatgcagctaatatagttagttagcaacataaactatactacattatgaccaaaactaatcaacacaacaaacaaagtgctgtcatacattggtttggcaaacgaaaatcaatgaaattttatactcagaaatgtgaaatggggagtgtggcgtttgcattgcctcaaacaagaagcatagtaaaaaaatgagaaaagaatggaacacttctatggtattgatgactcagtatctttggcaggtccgatgtaaactgtgtagcctaccgataggagaatgagcaaacacccaacaagccggctaaacaaacctggcgatcctgtttttcccgtgctgactaaccataactgcgataaaaccacctaatacgagaaagacactaattaaaaactaggtctttctgatttatcactatgctctaatcctgttcaaaccatctttaatcttaaccaaacccaaaccaaaaaaatcaaagagagaaatgaacttactaaacaaaaaagagtgtttttattgcatagcttaagagtaaaaagagaaataaaccgataaaaaaactgtcttctatggaagtggaagtctacctcgatgtacaatacgttagcagctttgctgattttctcaagctgaagaccacgtgccaaaagtaccttaagacaaaggaaaaatattctcagcagtcgagctatgcgagttacctacacaaatgtgtagaagcagaatgttaccgaatgcctcacctctgcgcaaaacgctagcaaccctagcacaatcatgctaacgagcgtgtcaaatgctggcagcacgaagctctgtatgagaaaattcaaagttatggatcatgagtatgagtaatgatcaaacaatagatcagtgactgcgttatacatttggtgcagataatgcatttcttggtttcctacatccatatcatattccctttgaacatacacaatatatatttacaaaacatacctcgaaggaaaacatgcaaattgctgtagcggggcaagctaccaagccaaaagagaggacagtaatcctgtgaaaatgcacatcatttgtttatccttcctaacaatagaattttcgctaaagaagtaaaacatgtgggttgatgacacatctgaatcttaaatctcacactggctgttccgatgctttagcggctgcctttatgagacaataggtgattcctccagtgattgatgaaaataaacccaacaagaacgcataaat

SEQ ID NO: 34937 - DNA, 2847 bp, Arabidopsis thaliana landsberg
  unsure (1)..(2847): unsure at all n locations
attttacataataaaataaataaaggttttttttatgtatgaagaaaatgagagcaggcgattttgtcgtccagtaatgttggcaatggcaggggtctcaagtggaaagaagaaacaaagatgcgggaccatttgtcttaaatgggtcccacgtaaaatgggtattccaacgaatcggagccgcacactttcttaacctgactgcaatcagacggtgctagatggaccacgtaaagctgcctcctcccgttatcctattccacaagtaaccaaacgaaatggccaatttgtccatacattctgtaattcttttttcctttccgaagtaatgtatttatcgtttcactcgtaaatttttgtaaatatattattcatatgttgaatattatgtaactttcattctttagaaatgataatctctatacgaaattttagcatgaaactagattataatttggttgaccataaaaatgaacaatgaaatggattaatagatttttccgaaaacaggttaatcttacgatcatgaagagtgataaggtttaacattatcttccactccgatcaatcttacggaagaagagatgaatttggggattagcattctctcaggtggttgttgataaaaaagagatgaaagtactctagggttacttgtagtatatataaacgcaagctcaatatgttggtctgctttatacaggagcgggacttaaaaaaaggaaacactgaaaaccgacatacgaaagagacgttgatattataccgaacaaaaccaaaaggaaacattggttggtttgctttgatttctcaaggaagaagagagaatgagtgagatgttgttggagattagcattctccctcaggttttcattattaggttcttccaaaataaaaaggaaactttcgattgtttccttttcttgttagggttgacaaaaaataagaaaatctgagaacgttcgagaaatctggaccgtctattttcatcatattgcaactgtgagatctgatggtgattatctaatctaaacggtaagtttgttagattatgtgggaccgggacgatctatttcttaaacctctgttacaaacaaacactcatgtctattagtattaggaaataagagatggatatgatgatgattccgaaccaattctcaataaactgtttataatggaacaaaagcagaagtgattgatggtctaacagacattgacattaggctaccaatgctagtcttcctgtgggagatagagatagaagcggcctggttatgagaatgctggagccatctaatgctttggttatcatgccatttgtcctcaaatcttgattctgcccactacatgatctacaactccatggctttgaggtttgaaccaaatgatcgttatgcaaaccacaacactttcttctttgatgcatgttagtatgaactagtctgtaagtcttgtctctgcagggaagagccactatattgaagaaaggaagatatatatagggtgtatttggcggtaatgtctcctgttgcagagcccaccggtgtttatagccattatattggtgggaaggaagctacttttctttgaacaaatctccaaaaatttcagacaaagataaagccggaaacaagaaagttgttgcagataaaatctaacaaaagaaagaaagaacaatataaaaacgtaactcttcttctccttgtaatttgctcacaacaaaacctcttcttcttcacagccacttaaagtggctttccacttgtcttgatatcatttctgattgctccttgaatcatcttaacgatcaaattctgaaaggactttcacttgtttaccaaattcgaacaagactataaatcaaactgtctctctttcttacctgataagggggatgagttaccgcaacttgcagaatcctacaagccagtagaaaaatgaaactgattcttgctacaatgaaccaaacatacattggtattacaatcattttctaatacaagaaactttaattggtaaaataattaaaatcgccaatatctgagaacggtgtcgtttaaatagttaaccgaaccacatcgaagtttataaatcaggtacgggaaacgcctaggactataactctttctctccctctaccggcgccggagaaattcccgatcaacacaatctcgagacaactgagacgagttcaaattatcgactcaaataggattctagatggagagacgcgccccaaacgcattccctggtgctccaccaccagttccctactatcataacaactacaacaaccctcctcatcatcagattcatccgccgccgccgccgnnnnnnnnnnnnnnnnnnnnnngattccacaaatacccccaaaacgacaacagggatcagcgtttcaatcaaccgcattactccggccaacagcagaacatgatcgttgatcagagtaataacgctcctccgccgtttccgccgagtccttgcggtggcagcagcttaaggaagagacggtctcaatcagctacaggttatctccaattttgaatttttctgctacgtatccacaaaaggtgtagactttgtctttaactccctttggtactttcgtttgtatacatgaagataatgctgatggtagtattgccaagttatatgttgcgcccatctcaaagacagctactgaatatgatgtgagtttcttggttcactctttatggtttttatgacatgtttccttgatgagtttctgtgtgacttgtgacaatctgtgttatacatcagatccgtcaggtctttgaaaaatatggtaatgtcactgagatcattctacccaaagataagatg

SEQ ID NO: 34938 - DNA, 3547 bp, Arabidopsis thaliana landsberg
  unsure (1)..(3547): unsure at all n locations
gcctattcaaaactaccaattgtgtaaaatgtcttggaggactaagtcaatttatataaagaaatgaccaatttcaatatttaaagaccaaaatcttaaatttaatattggcacttgcctggaagaacaataaaacaaattcgaactaaagagattatgtaacaaatctgcttcagccaaaagagattaaagagacccatttccaaaaatctcacacttttaaggttttcttctcaaagagatgggttgcttcagcagtaaggagctacaacaatcgaaaagaaccattcttgagaaacctttagttgacatcacaaagatttatatcctgggggaggaattgggtagaggtaatttcggtctaacccgaaagtgcgttgagaaatctacaggtaagactttcgcctgcaaaaccattctcaagacaaagctaaaggacgaagaatgtgaagaagacgtgaagagagagattcggattatgaagcaattgtctggagaaccaaacattgtcgagttcaagaatgcttacgaggacagagattctgtacatattgttatggaatattgtggtggtggagagttatacgacaagatcctagctttgtacgatgttggcaagtcttactcggagaaagaagctgctggaatcattaggtcgattgtgaatgttgtgaagaattgccattacatgggtgtgatgcatcgtgatctaaagcctgagaatttcttgcttacgagtaacgatgacaatgctacggtcaaagttattgactttgggtgttctgtgttcattgaagaaggtcagctccgagagattcctttctttgactgcgtttgatagggctttagtcatgactcatgaacaaaatttggtgacttttgttcctatgcatagagattgggactcaaagaggttgatctttgatagaatcatcttaggagtttggtagttttggatttgttatgtaactctttgctttagtcatggacaaaatttggtgacttttgttccaatgcttagagatgaaaccaaaactgagtttaaaggttgattttttgacagaatcaccttagtagttggtagttttggatttggtatgtaacatttttgaatctataagatttgtcttgcacacgtctctttagtttgcaacagtcaagagcaaaatttgtttacttttgtaccaatgcgttgaaatttggatttggtgactgtgaagtatcaagaatcgggttttacattgtcttttgttgttacagattgttttcaagtataccatatttagttagttttgttcttggtttcatatgattgatttgatgcattgttttctgaaaccaacaaatacaggaaaagtataccaggatttagctgggagtgattactacattgctcctgaagtgttacagggaaattacggtaaagaagcggacatttggagtgcagggattatattatacatcctactctgtggcaaatctccctttgtgaaaggttcaaacttaaaaagctaactggattcttcttcttcttgggggttgattttttatttatatgtaatctattgtatgtagaacctgagggacagatgttcaatgagattaagagtttggaaatcgactacagcgaggaaccatggcctcttagagattcaagggcaatacatcttgtcaagaggatgcttggtagaaacccgaaggaacgaatctctgctgcagatgttcttggtaagccctaactgatttttgaaacatttaaattgaaaacatgattgttagtgtttaccaaatgaagcttctagtgtattgtttaggccttagagtgacactatgtgaatcttgaagtcttaaatgttacagtctgaaatgttagtgcgagtttatggttgtgtctaactaaaaaatccttgtggtttgtagaacatccatggatgaaaagcgaagctccagataagcctattgataatgttgtcttatcacgtatgaagcaattccgagcaatgaacaagcttaagaagctagctcttannnnnnnnnnnnnnnnnnnnnnnnnnnnnnnnnnnnnntggattgtgatttgtgcgtttggtttgaaggttattgcggagggtctatcggaagaggagatcaaaggtcttaaaaccatgtttgagaatatggataccaatagaagcgggacaatcacttatgaacaactccaaactgggctaagtagacttagatctagactctctgaaactgaagttcagcaactcgttgaagcggtaagttatcttcagcatcttgctttctcttttccgcaattaagatcttgaaaaagacagtttgaaacacatgatgataacttttcagtctgatgtggatggtaatggaacaattgactactatgagtttatctctgcgacaatgcatagatacaaattacatcaagatgagcacgtacacaaagcattccaacacttagataaagacaaaaatgggtaagtttcttacattttcagtgtacgaatcaatcatttctttttttttgtcaagaggattaagattcaaatgtgtgtaactattatgaggcaccaatgttaatgctatttggtaatccaataggcacataactagggatgagttggaaagtgccatgaaggaatatggaatgggagatgaagctagcatcaaagaagttatatccgaagttgacaccgacaatgtaagtcgcactctctaacataatccaacatctcaaacagtaaaccggtgcttgtaatgaaaccttgaaaggaactctgttacaggatggaaaaataaactttgaggaattccgcacaatgatgagaactgagagcagcttgcagccagaaggggaacttcttccgatcatcaattgaataatacatatttgcatgctttaaggtattgaataatacatatttgtatggtttagtttgatctgtttaatccacattttttgtttgtcaaggttgtaaaatccaattaaaaagaattcattcttttggtatatttgtgattccttataaagtgtgttgtagttttatagatacttgacctaaggatttgagaaatacaaacatcaaaaatattcagagaattcaatagaatatttcggacgctctacgttttagggtttctttcacaatttgccttggcgtttaaggtaacctaactgagaaaggtttcttgttattcaataaaccatctctctgctacagcgagtgtcaatggctctcatcttccattagcgacgatgcatagacacagattggaacgagatgaacattttcagaaagcattgttgataaagacaacaacggtttgcagccccaagggaaccttcttcgtatccattgatcattaagctctgtaattgtttcactaaatagtggtttgccggttttggtaaacccaaagattcatagctaaaccggagaaaacagagcccttttctcttgtaaatttcttgatcattgcaaaacaaatagctgaaacaaagtttttcttttgaccgaaccgaatgtaccggtccgggatatct

SEQ ID NO: 34939 - DNA, 4682 bp, Arabidopsis thaliana landsberg
tagggtttttaatagacctcttctccgattcctatcttgcacattgtttttcaagcatttatcgtacttgagaggaaatgaaaacacaactagagctaaagtatgtttgatatcaaaatgaggggaagcttacaaaacattcgaaaagggtgtgcatcaagcaaagtttccacttctgcagagtttggtgttggagtacatgcctcatgtgttccattagagtcttctgcagagtttggtgtcggagtaaatgcctcatgtgttccattagagtcctacacaataattactcagcagagatgctgccttggagagtgcatagaacaaaacattcccctagaactgggaaattgcgcatccctcacttcataacaaaaaaaaagaattgactttgaacgtcaaataataacaaaagaagaagcatccttttacggcaataccacaagtcttacaacagaatatcagatcgtaaaagagatccagcgcaagtaaagatatgagtttcaacagttaatatcttggaaagaccttctcaacttacagcaacaatcaaaaagcataatgtcatggttacatttcatactgcagcttttttttttaagtctagaagaccagaaaaagtatttgaaccagatggcataaacaacaagggcgtttggtctagtggtatgattctcgctttgggtgcgagaggtcccgagttcgattctcggaatgccccattgacttttttagatgtctgattctcggaatactagctaagagctatcatggcgaaataagttctttagtgcattttctcacaattttcagcaaggttaaattagaaaacaatttcccattacgcctgttcggtactgaagtttaacaaatagaatgagaatcgcattgtaccttggctttgacttccactgactcgcattatgcagcaagaaaacagttttctcggtaacggaatgagcagagaacgtcacttgctgaatgctacctagttttcaagagacacctgcaagaagtgaaaaaaaaacacagccttaaactggtatccaagtatcaacaacagttgtgcattgaatgatttatatcaacaacagggcatttggtctagtggtatgattctcgctttgggtgcgagaggtcccgagttcgattctcggaatgccccattgactttttgaaaagatatgttttgatcctagctgaagtttattatgtgaaaaaatttgttctcaagtaaatgaatttaagaggtcacgtctaagtcaacaagcaaacatgacctaaaacttcgttcaaagtgataataaccttctttaaaattgaacatggtcccaaacctgtctttatgcctgatgatatggatttaccgcaaaagcatacaaaagaacagaggcaatcaaatctcaagatgattctaactttcatgtgagaggtcctaagttcaatcctcagaatcataaactattttataattctattatcttattcgaaaactcaacaaaacaatataggaatactaatacataacttatagcgttaatcagatcctgagtaagagttacaagcctacaacaagtcaacaattcaatagacacaaaccttgaactcttataagttattaccaaagaaaaaaccttgaactctacagaagcaaagtttactgatcagaatatttcacttcccaaacatccaaaggcagtaacctcggcttacattcagaaattatacattagctacgactttcaaaattgattattttgttaaaagtcaactacgaaaacaagatccaaattgtatactggtcatcagatccgatggcttagattactaaaatattctatcattaagacaagtaagggaactagatgcgacattgacttcacaagcttttcttttagcttcttaaactatatttctcaacaacagggcatttggtctagtggtatgattctcgctttgggtgcgagaggtcccgagttcgattctcggaatgcccctttgactttttgtaaaacaaatgttttaaccagctaacatttcatctattaaagtacagtgtccacctttactattaagccctgaaagtcaactgatagaactagatctaaaacgtcagatttttcaaacaagagaacattcagcattctaacgtcagattccaatataaatatagaaaattttgaacttattgcatgttgctagcttcatcaagaatagaacaaccaaaagtagatttccctaaaaatagagtaaagtgtgaattctcttatccacaagatcaaacaataaaatgcttcaatgcttcaatgtaactaaatcaacaacagggcatttggtctagtggtatgattctcgctttgggtgcgagaggtcccgagttcgattctcggaatgccccttttatattttgcaaggtatgtggtctgaatgacagctaagaatttttccatatagaattttctctaatacagcaattcaacaatgattgccttacatttcaacaatatttgaattatagacaatctgcctccagtatttgacagtcaacttaacgatctagatctaaaatgtagctttatttttagattatctaaacaagtaaatattttctcatcagattcatgaatcagttagaagagtttgagcttacactaactatatgttgccagcgatgtcaagaataaatcctcaagaggaaaagtaaggcgggtaaatttcctgtaaaagatggaaccatatattatttctcacacaaaggatcaaagaacaatgaaatatttgaatagaactaaatcaacaacagggcatttggtctagtggtatgattctcgctttgggtgcgagaggtcccgagttcgattctcggaatgcccccttgaccttttctatagtgtatgatttagatgcaagctgaaaatggcttatgatattattatttttttagtatttagattttccacagacctcgttcaaggatcgaggaccatatatttccatttcattttcagtaagagaaaatcaaaaacaaaaccctccccacagtttcattattaagtgtttaatgcaatagaagagaagagcataccgctggtttacatccagatccaatcaataaactttttaactagtacacttcatgtagggaagaccgtcatgttttgtaagctgttggattcacaaagaatagctgcagaaacagcaaacgaattgtgattaagtatgtaatggaaatgcagagggaagcaacaaatctctaagagaaaggagagaatgctaatagaatgcattaactgaacaattataataagcagggcatttggtctagtggtatgattctcgctttgggtgcgagaggtcccgagttcgattcttggaatgcccctttgactttttggaaaccaaagttctaaacgccagctaacatttcatcaattctaaatttccagactatccacctttactaataagccctgatggctgaaagtcaactgatatagcccagatctaaaaagtaatttctgtcttagatgatctaaacaagaaaacattctaatatcatattcaaaaataaattaaagaaaaatttgaacttactgcatcttgcctgcttcatcacgaatagaactctcaaaggtaaaaaaaaaggcatcaagagtgaatttcctgtaatacaaaagtcaagcatgaattctcttttccacaggattacaacaatgcaatgcttcaatgggatttaaacaaacaacagggcatttggtctagtggtatgattctcgctttgggtgcgagaggtcccgagttcgattctcggaatgccccactatctttttaagtagttgatctaaattcaagtagataattgcttagaaaaatctgatctttgtttagtcatagttatgtcacagatcttgataaaccatatattactcttttatttcagcaagagaataagtgcataatgcaaaggaaaagaagaacataccgctctttcacatccgatcaataaatatcttaaccagtgctcttcacatctggaggaccaacgaaggagctgcagcaacagaaatgaattttgattaagtacctaccagaaaagcaaacgaaacaacaaaaactctgaatgaaaagaaagaatgcaactaggaggcattaactgaagagcaaaataaaaccagggcatttggtctagtggtatgattctcgctttgggtgcgagaggtcccgagttcgattctcggaatgccccctttctttcttattttgtgttttcaaatcatatataaacaaagtttacaaatattcatacaatgcaatctagtaaaattcaatattccttcttggaataaaaccaaatacggtttgaggcaatccggttttgatagttctccccacagcaacaggcgctaagtcagcgcaatatctctctgaaagatgatgatagggagtttctgtaagacctctctgctactgtaacagagcctacaaagaccacacagagaactctcagacacagaaacgatagctactatctttttcttttagtacgtcacacatacatttggcgattagtgaaagtaagcttactttcttagtttggtctgttgattttggtctctgtttgtagaaatttggaagtggcttcgctttgaagcatagcctttgccttagtttactctcttccg

SEQ ID NO: 34940 - DNA, 2669 bp, Arabidopsis thaliana landsberg
gtaaaagggagttaagatcggaaagaacttaacaccggtgaaaatgaaagaggacgatgaagccatcgtcggctattgaggacaaaggagaggtggaggagaaaaagagagacggaaactattaaagaacaaaaaaaaaagaagagggagatgaggttagctacgtttattgtcttctccttcctgatttttattttgttaaactctttttatatgagtatattaatgtttctttcttttttaatacaaactatatattttaattccaaaatcaaaccttctatttgtagcaaagggtttgaagtcaaaatctcaatattttggaaagattttcacccagaagttttaaccggttgatcatgcggtagttaatggcaagttttttctggatttttctggttatattggtagatttaagactaaggatgtgaatggtaacctaaaccgcatccaaaaccgcaccgcaacagtgttgtaacagtatcaaaatctctatgtatacatatgtatctatgtattttcgttactatttgaaccgcaacgcacttctcccgtaacgcaaaacgcagtcaccattcggagcctaaacttccttgaaagcgtcataacctaggatcgtgcgtgataaaaataatagagtagaaacgtcgaattcaccaaaattcttggttctcttaatttttctaaaataatactatctaaccatagtacagtcaacattcaatcctgacacacttctcaggatacattgccggtcgtatgagcccatcttattttcaaacaagtcctctttaaatattagtaatttagtactttcgaaaataaaataaaatatgttgtggtttttagtcaaactcagatcctttgaagttttattaaaaacagccgccaaaatggcatggcagctcgagaaagtgaaagagaaagaagtaaacgataatcaaattgttcctttataaatagtcacccaaactcaatcaaattaacagaaacaaacacaaactcttcagtccagatgttaaaaaacaagaaatcagacaactccttgtctcgagacacattacaaatcaaaaaaagaaaaaaaaccacgatggctcaaaatggttcgaatactactgtgaagctgatagggacatgggcaagcccattcgctataagggctcaagtggctctacacctcaagtcagtagagcacgagtatgtcgaagaaactgatgttctgaaagcaaagagcgatctccttattaaatccaaccctatacacaagaaagtccctgtcctcatccatggtgatgtatcaatctgtgaatctctcaacatcgtccaatacgtcgatgaatcttggccgtctgatctttccatcctcccaacacttccctcggaacgtgcctttgcccgtttttgggctcacttcgttgacggaaaggtaacaaaaaacttagatatattatttttaattagtgaatttgtttttagcaatgttgaattttggtcaatgaagaatcctgaaatcagaaccgaaacaattatgttaatatctgttaagttttaacttttaagggataattatcgaaaatgatggaactatgaaatatcccttcaacgaaaaagaaagaaaaaaagattagtgtaattatgtcaattttaagagattgatacttttttacatagtgagtagtttgattaacgttggtctacttcagccaaaacttatttttctaaaaaatggttgatgagaattaataagcataattttttattttttttaacaaaaatagtctaatatattaatgacgattgtaacagttgtttgaatcgatcgatgcggtggcgggagcaaaagacgacgccgccaggatgacattggcggggaatctgatggagaatctagcggcacttgaagaggcgttttcaaaagagtagcaaaggcggggacttttttggaggggggaacattgggtttgtcgatataactgttggggccatagtaggtccaatctctgtcattgaagctttttcaggtgttaagtttttgcgtccagacacaacaccgggcctgattcagtgggctgagaaattcagggcccatgaagctgtaaaaccttacatgcctaccgttgccgagttcatcgagtttgccaaaaagaaattcagtgtttagtgattgattacatctcttatgattttcttcaaaagaaatcttatttatgtaccgataaatgtgtggaaatctaatttatgcttttttgctttcttaaaattgatgtatgtgaggtgttagaaacgtaataaatcgaaaccaattgaacattctctgatgttagtatccactaggcccataaaaacgatacttgcagaaatcagtattataatattattaatgtttagtcatctcctcaggacttcatgaatccacaactgatttgaaaaaaaacaaatgtgaaagatgaacatgtttaatactttttaaaatcaaatattaaatgatagtttaaaagtatttttttaactgaaacatcctatattttaatagaaaaagagtaatagtttttcaacaagtctccataaagtgattcaaaaactgatttctagatgtgatttgttgaataataaatcaaagcaaatcaatgttcatatatctttattaaaacaacaattgttacagaata

SEQ ID NO: 34941 - DNA, 3825 bp, Arabidopsis thaliana landsberg
  unsure (1)..(3825): unsure at all n locations
ggggaagtaaataacttaaggggctaaaagagttttctaagaaaattgcggacccaaagtggaaaagcttcataagaagtttttagtagtggcaggaagaagatgaggagagatgttgatttcacttaatgatctgaaaaactatagtcttaatttcgatgacggcggcgacggtgaagattcttcaccggagaggtttgtagctccggttgtcatcaaagtttaatttttattttatacttaatctttttttttgtataatttttttttatcattattggtcttttatgttaataaaaacatatactccataagggaacacaattaatttcacaccaaaaaaaaaaacatatactccataagggaatacaattaatttcgtattaaattgttcgattgcccactaattagagtaatgtttgattagtataaaactagaacattgcttaatttgttgttttactgattcacttggtttgtatgtttatcttgaatatattggtacttatcccgaatatacgtgtgcttatctaactaaaatacatatatattaaaaataaaataaaatgaaatacaaagctaaagtgtttgcagagtgatcatgtgttgttgaaatgagttgtgatatgaatggcaaaatttgtagcccacgtataaaagtttggattagtcatatagtattacaaagcctctttactataagcgataactcaaaatcagaacatttcgtggagctccaaaatccgaaagtaatacttccatccacttgaaacttgcataagttgtatcaagaggacactcaagtacatcgttgtgttgccaaaaagattatgaaacgaacgcagatgctaatatgctatataaggactgagtctatatctaaaccagtaaaaagtaaaaaagctgtatcatgtgcataactaagcagtaattaaaccaaaaaaaacaaaaaaaactaagcagtaagacatcataacctagttcagtttccaatagtccaatttatgattggttagttgtcacttccattaccataattgaattcgcttacaatttacaaaaatttatgaacatttcccgtaaactgtttgcgagtcatgtgtgagtgtgaccatgtggactgtgcatggagttcattaaaatctctcaactttaaacgtaaatttgacacatcaattacaaaactgagccggattttcttgttctcctttcacatatatagagaagagaagatactactactagtcctgaatcacgatttatatgaaaaaagtgcagagatcatcaaatcatctgcagatggagatcgcctgtttgctgggcaagctctaccatcatcgcttcatcaaagaatttatttccgctgacgtcttcgctcattccctgcataaccaacaaattatacatatcgtgagagtctgaaactgatgatccaaacacccaacgagtcatacaatataactagcctaggatgtatccagcaaattatagctggtgttacttggttaaagagtaattagcaagggccgggtttgtaaacagtagtttcggggatcctttggtttgtgagggtttactggggtcatttaaccaaacactagagtaacaaatcagtttatggtttcattcgtatctttaaccgcataaaacccactaagttttgggatgtgcattgaaacaaaggaaatcataatacctttctacggcgggtcttgaccatgaattcccgagctagatgctgaataggggcgggctcaagtgggcgcaactggatggctttgtctagagggtctcctggcacaatggcccagtgatcaaacacagataggcaaaaggcttgtccctgagtgtggtacctcagatctgtctcaaacccaaaggactctaccacaggcagaaaggcctgcatcaacaccaaagaatatactcaatgaatcatcactcactcaaataacaggaacaaagtaaggaaggagaaagacacaaaccaaactaaccttcacgatataagcaggagtaccgggttgaggaacatcagatgtgacatacccacgtctacaaatttaagaaagcgagaggaaacaaacaaatcttagtaatcagttgcacaacgaaatcacagtcatagagccaaattagagatacctttacttggacctctgaatagagttccctgaggtccttgatgatggaatccaagtacaactcacctgtgcctagaatagtatgttccccagactcctcaactttggtaatcgcaaggggatagcttttgctaattttcctaagcccttccaccattttaggcagctcactaggattcaaaggctcagttgcagtcttgactactgggagggtattaaatttgagagcccggaatatgtagacatcttcatcataacttgcattacacagagttgcagttttcatgatggatgcatctacaccttcaattaaaacccaggaaccgggaggggcactgcttactggtattctatacctagcttgatatatccatagcttcgtgacttcttttatagtcatgtcctcctcatcctcaggtgaatacccttctcctagtacacgtacgctttgccctgtttgaagcctaccactataaactcttccatacacatcaaaaacactagtatctgatttggggtacaactttgtcacattaaccatgagaggtccagatggatcacattctaccattgattcataaatgggagaatctttggttccagtgtatgaatggtccactttcctagctgcagcctctctgggtgaaggaatgtgctttaccaacatatcagtgaaccctgatgccgaaccaaacactgaactacaggctaacctaagtaaaggtctgacgttcagcttatatgcactattactcagagtcactcctaattctgcaagggtggtctctacactcttcttatgttcacctatcacttggctgtatatcttgtatagaggctccagaataaactgaacaaatgctctttctccaccacctactggaggacttgtcttgaataccctagtatcagggtgataatatacatctccccaaagtctagatgcaaacttatccacgtccatggccacaccatgaagcttggcatacattctagcaaaagattgcaatgtgaaggaccatccggctnnnnnnnnnnnnnnnnnnnnnnnnnnnnnnnnaggatctataagaggtaagtctccagcatttgttgaagcagcagatatatggttattaatgacttcaattgtatacctcagcttgtagtaagcatcccttggtggtagtttgagctcagttatgagcctatcaacctgttgggcagacaaaaagcaaaggtcaagcaaatgtatgaaaatataaaatttcacactttaggcatgatgtaccttattgatcacaacaacaatagggagatgatcctggattgcatgccgcatagctctctctgtgtttacctgaaaaaagattaatagcgttagtactacaaatagtatacttgaaaaaagagagagtaaagactagttaccatgactccttgagcagcatcaacaatgaaaacagcaccatcagcaagtcttaaagaagcagtcatttcgtcagagaaattgacatgtccaggtgtatccatgatattgcacaggtatgatttggatctactgtcctcaaggacaagagacattggaaccgccttgatagatatatttctctcctgctcatcgactcttgtgtacgtatatctcatatgcttgtcgtttcagaataaaagtagacatacgatgcgtctgcttaccaacata

SEQ ID NO: 34942 - DNA, 2711 bp, Arabidopsis thaliana landsberg
  unsure (1)..(2711): unsure at all n locations
ggagaacaagaaaagagaagactttaagaatccaggtaatattttaaaatacgcaaaacgtgattcattatattagattaacgtgaaaacgtaaatcattattcttttgtttcaaaacctaacaaagtttttctatttattattaataaacacgtgcagatctgaaacttacactggctgaaattaggaactacactctgcaagaaattgagaagattatgttacgtaacggtgcaacactcaaagaaattcaggattttccacagccttctagagaaggtattgataactccaaccgtttagttgttgatgagctgagatataacatagattctaacttgcaagaaaagcatgacgagtggtttcaaatgctaaatacggagcagagaggcatatatgatgagataaccggtgctgttttcaatgatttggaaggtgtttttggtttttatggattttatggttttagagggactgggaaaatttttatgtggaagacattagcagctgctattagatgtagaggacagattgtgcttaatgtcgcctcgattggcattgcgtctttgttgttagaaggtggtaggacagcacattgaaggtttgcgatcccttagaatcttgacgagtttttggtttgcaagatcaccacctaaaattgatcttgctaatttgattaaagaagcatctcttattatctgggatgaagcgccaatgatgagcaagttctgttttgagtctttagataaaaccttctgcgatatactcaacaacaaagacaacaaagtttttggtggaaaagtagttgttttttgcggtgattttatacaagtacttccggttattaatggcactgggagggcatagattgtgatgtcttcactcaatgcttcatacatttgggaccactgcaaggttctcaaattaacaaagaacatgtgactcctttcaggcggtttaagtgttgaggaagctaaagatatacaactgttttatgattggctattggttgttggtgatggtaggattaatgatcctaatgatggagaggcacttattgatattccagaggaattgttggtgaaaggggtaagatacccaatagaagctatcaataaggaaatttatggggatccgtcagaactacatatgataaatgatcctaagttgttccaaaggagagctattttagcaccaaccaatgaagacgtcaatactataaaccagtatatgctggaacatttgaaaagtaagtcagccaactaccttagatttttacggtttaaactaattgaaaactttaacggtttatgcttattacacgttgcttttgtttttttgtatgtgaagaacggatctatttaagtgctgattccatagatcctacagattctgattcacttaacaatcctgttatcactccatattttttaaacagtatcaagttaccaggtttgcctaaccattctttgcgtttaaaggtcggtgctcctgttatgttactacgaaatttggatcctaaaggtggtctatgcaatggcactaggcttcagattacgcagctatgtactcagattgttgaagctaaagttattacaggagacagaattggtaacatagttttgattcctacagtgaatcttacacatacagacactaaacttccattcaagatgcgtaaaagacagtttccactctctgttgcattcgctatgactataaataagagtcaaggtcaatctctagaacatgtaggactttacttgcccaaaccaatgttctcccatggtcagctttatgttgctttgtctagggttacctctacaaaaggtttgaaaattctaatactagacaaagatggtaaacttcagaagcaaacaaccaacgttgttttcaaggaagttttccaaaacatagactgattacattgctgccagtctatgttccaatcttttgagaaaggtattcttcatcaacatttattcactttatatactttcatttatggttgttaaacccccacacagtaactaacaagtagtatttgatctataatgtcacaggattatttacattatactgctgaagcaaacaaagaagcaacacattcaacatgttccggttagatactgatttaaaattactacaactgaacctctatttcaaattgtttttatttctctacacttttaatcatgttctcatatgttcnnnnnnnnnnnnnnnnnnnnnnnnnncttatatgttcagttctccatttagaagttttggtacgaacctgtgttttagtcgaaaaagtgatnttccagttccatgaaactataatacagctatgattgcattttgcgttgcatgagaacctgtggtagcagtaattgaaatattgtgttaataaacatataagatagcggatcaaacactaccaatctatttacatatctttactgatttgcctaccttaacaattcatgttcttcgttgtcgaatccacacgttattgtttcaaatacactaaatgatctgtctctgtcagtataatcaactttcgcagctagatatagaatagcacaaatgaacatttaattctgttggagaaagccctttcaaaactaaaatcggattatcgattaccataattgatttcatgtacagtttaattgatctataaaacatatgtcagagattgtttacacaaatacataatgaatcga

SEQ ID NO: 34943 - DNA, 6898 bp, Arabidopsis thaliana landsberg
  unsure (1)..(6898): unsure at all n locations
tacatatttggtctattattggggtaacctgtcataggagtgtccagtccagtttaaccaatttaaaccgaactaaaaccattaaaaattgatccgcaaatgaaagaaaaaataataccgatctagatttttccatctctgagctgagcttacgataacccaacacaaactgtagaagtaaacctctaatgtattttctcaataaccgaagccataccaaaccggaccaaaatatggtatactttacttgctgtctagctacatgtcatttgtgtcttcattttcttttgacttgaccgagtgtgttttgaagcttgattcttgaataacaatggaagctacttttttttttttgtaaaccaacaatggaagctcctatagttctatagttggttagtacttagtatgaaatgctttcgtgtaattctctaggaaagcttaattatgaataacagagcagttaatggagcctttcttaggtacttggcatcgtgttcttgtaggaatttaaatcttgagaatcttaacatgttcttgtttgtttatacagaactaattaacgcggatgcagaggatgcgagttgtagtagcacgcctagttggagaatcaagaaaagtctaacatgtgtttgctttaaccgcaagagagcttatgaacgcatttgctctaacttgacaccattgcaggttaacacaaatagaaacaacagctccattaactcgtttttgtatgacagcattcaattttctaagtctgattttttttttcatacgaagaaagactgaagaggttgaggaaaagaatgaagaattactatgatgcatcacgacccgatcatcaggatgcattgagagcactgtgatcagctacgtatgttgatgaaaagcttcaagatttgatctcagaccagtggaaaaatatggaatggcaaagaaaagatccatccactgatttcaggttaacctctctcttgcttgagtaaccatttttttttgctaagaatgtaaatatcattagaaatgaaatgtttggtattacaagagacgcattacctaaattaaattaaccttggcaaaaagaaataaaaacaaggttaagataaagagtagttaatcaggagagattaatggatccaaagtagcataagttgtttccaatgctttctatgtcttcgagaagtaatggtattgcgcacctcacgatctatgctatcatggttggtgcgtttatgacatgctgctgctggtgacgattcaaaagtgtttatcagttgttcattatgatgccattgtgatgtaccattactaatttcttacttaaataaggtgttgttttttgttttgctccaaataataaggtgttgtttaaaaggggctctttcgttttggagtaaaagtctctctgagtagctgtatatatttaagtagcatagtccaattatttgacaatgaaaaaaagtgtatagtccaatgaataccaaatgaattgacgtcaccgctagttgagacctgagacaagcaagtgatcgttaaatcaaggagaacgcaagtggacgaggccgacatgatcctaactattggactcccacttgtgaaacttacttgatccatttcccacttcataatttcgtaaaaaaattaagacaatgagaatgaatttatttatttatttttcggtagaacaatgatttttattttgtccaaataaaacaatcgtgaaaaattatgttttggacattatcaactttgtgagtaaaacaaattttgtagtttcttttaaccaatattttcgaagtcaacttttttctacgtgtgagtgtattgagtaaatgatagatatgtcaataataacataactcatcaatcaatctggcttcaatagaactagagaagttataacgtttttttttttttacacaagagggttttataactctagactagtttcatagtccatgaaaaaaacatcaaatctcctaaatggctggacataattcagatgattttgtatgaaataaaacataaaacatatattttcttgcatatctggagatttttgtttctttattacaatgactaattaatttaccttgttcctttttatttttgcaaaatgattactgttatctattttgtccgtttctaataaaataaaataacaatctgagctgtggaaagaaaaaaaaaggaaaagcgaggagagctaatctgagtcgttgcctctgtccactggctcggaccgacctcgtacctctttcatttgtcctcgagcttataatagaggctacgccgtcgccgccacctccgctccatccattcacggccaagcgacgactccaccgcttaggcttggcttctgaggtatactgatcaacgctttctgttttcggaggagcgaggcggagatcagcttctcttatgtctactcaaacatatcattcttctttagccactcgatttcttctctagcggctccagaggtttcgtcgctacagagtcaagttcctcttttcaggttttgtggtaagtaatcgttaaaccctaagtatcggaccttgttgtttaatctgttcgtgtttactctcaattacatatgcattcttctgcttaatcgtttcttttagtttaatttctagggtttacatcccaaaggtctgatctttttgcatatttgtgtgaatcttagttttttttttttttttttggaattgaatgtgatgagttgggtttgatactgttaaagatcaaatctttagcttcgttgaagcttcatatttatgtcaacaatgcaaggtttatttttcttccacctttgatttgatatttataattgtttctttgaaggtgaacaagattttagttacaaaaaaatggtgggactggaagatgatactgagagagagaggtcaccagtcgtagagaatggtttttccaatgggtctcggtcttcttcttctagcgcaggtgttttgtctccatcacgaaaggtcactcaggggaacgatacactttcttatgccaatattcttcgggcaagaaacaagtttgctgatgcgcttgctctctatgaggctatgctggagaaagatagcaagaatgttgaagctcacattggaaaagggatatgcttgcagacgcagaacaaagggaatctagctttcgattgtttttctgaagcgatcaggttggatccgcataatgcttgtgcccttacacactgtggtatactttataaagaagaaggacgcctcgtagaagctgctgaggtgcaacattacattaccttctatctgtgatgatttgcattagagggtgctgcattagttagaccattgaacttgttaaattggtgatatgcaattatgcattaggttttttgctaggtaatcagtttctaacgattaatcatcatattttgcacagtcctaccagaaagcattgatggcagatgcatcatacaagccagcagcagagtgtttagccattgttttgaccgaccttggaactagcctgaagctggctgggaatactcaggaaggaattcaaaagtattacgaagcccttaagattgacccacactatgctgtaattttctgttcctctaccatttcacactcttggtaccatttaactgattctctaattcagtatgttataatatatttatgcagcctgcatattacaacttaggtgttgtatactccgaaatgatgcaatatgacaatgccttgagctgctacgagaaggctgcacttgagaggcctatgtatgctgaagcatattgtaacatgggtgtcatttataagaaccgtggtgacttggagatggcaatcacttgttatgagaggtagcatatctgttaattcatctctaactggtgactggtttcttgctactttgttgaacgtgcaagtatggcgctgatttttttctcttcttcttctgcctttagatgtctagctgtgtctccaaactttgagattgcgaagaacaatatggccatagctctgacagatttaggaacaaaggtaagaatccttaaattttatcacaatttataactcaagtatactttttgtaaggggcgccttctggaaaattcgttataaaacttcgttttgtttagctcccctttgtgctgtgtgtgctttgtacttatgtcacggcaatggcattggaatctgtttatgttctttactagtgaacttttgcgctgaataattttgatttgcagtttcttaatccttcttttccattggcgagaagctgttcagctgtgagtacatctgacttgtcaaatgtcaatgatatttcaggttaaacttgaaggcgatgtaacccaaggagtggcatattacaagaaggctctctattataactggcactatgcagatgctatgtacaatcttggggtggcttatggagaaatgctaaagttcgacatggtatttaatttgtgatttgttcatttctgtaagtcagtaatggtgtggttgttatcgcgtgtttatcctttcctcgccactttactcgcttgataaaatgatatatatcttgactagtatatctacctagattttgatcctgctccacatgctctcgtaatgtaatccaaaactctggatgtcgaactctataatataatggaacatttgagccaaannnnnnnnnnnnnnnnnnnnnnnnnnnnnattctcaatgtgcaggcaattgtctactaatgagcccgctttccactttaatcccattgtgctgaggcttgcaacaatttgggagtactttacaaagaccgtgacaaccttgataaagctgtggagtgttatcaggtaatatttttgcagatatctgtagcgtttcatgagaatttcattgtgtttggtggcttattatatctcccaacctatgtagatggctctatcaatcaaaccaaattttgcacagtcgcttaataaccttggtgtcgtctatacagtccaggtttgatatatattaagggcggcttaatgttttcttaattgaatctcctaagtcgatagaatgccaattcctctgatattacaggggaaaatggatgctgctgccagcatgattgagaaggctatacttgctaatcccacatatgcagaagcttttaacaacctaggtctgttttctcatcttctgttctttacgagcttcctcacgtgttacaactgcttagaaactatattcctttgaaatttagattttatgtttgtccttttgtttctacctccctggcgctaagagtcttgtagtgtctgtgataaccagtttcatggtgcgattcaaatgtaggtgttctttacagagatgctggaaatataactatggctatcgatgcttatgaggaatgccttaagatagatccagattctcgcaatgctggccaggtatctatactttagcgtggtcttcttgttatgaggttgaaagatatatgtgtttaaaaccttcttgtccccttttgtagaaccgattgcttgccatgaattacataaatgaaggactcgatgacaaactatttgaggctcacaggtaagcacatatattattaatgtagatttgtattatgttgcttttatgggtcttacagtgaaaaaatcttctgaacacagagactggggttggcgcttcacaagattacaccctcaatacacttcatgggataatctgaaagatccagagcgacctatcaccattggatatatctcaccagatttcttcactcattcagtatcttatttcattgaagctccccttacgcatcatgattatacaaagtacaaagtggtggtttattcagcggtagttaaggtaggatttttacctatataacttatatagatacattttccctctaagcaattcatttcctggttctcgtggcatttttcccttttgagcaatcattggtctctcatggctttgcaggcagatgcaaaaacatacaggtttagggataaagtgttgaagaaaggtggagtttggaaggatatatacgggatagatgagaaaaagatagcaagtatggtcagagaggacacaatcgacattttggtagaactcactggtcatacggcaaacaacaagttgggaacaatggcctgcagaccagcaccggttcaggtgagaggatatattaaacctatctcattttgttgtttcgggttttgcctttgactttccatttcaagtgtacttatattggctaagataccaggttacttggatcggctatccaaatactacgggtttgcccactgttgattacagaattacagattcgttggctgatccaccagataccaaacaaaagtacgttttggttcaagatgcaattttgggtttcggaagtgctccaaataaaaatcttaatttttatttatttattttgtgatatttgattgcaggcaggtcgaggagctggttaggcttccggactgttttctttgttatacaccttccccagaggctggtcctgtttgtccaacacctgcgctttctaatggctttgtcacatttggtagtttcaacaacctcgcaaaggttaaaaaatttgtgtccttggattatgcacaccaatctcccctagtatctctttcaatgttttgacaggtttatctctgtttgtgcaaatcagataactcctaaggtgctgcaagtgtgggctaggatactgtgtgcagttcccaattctcgtctagtggtaaaatgcaaacctttcatgctgcgatagcattaggcagaggtttctcaccacgctggagcagcttgggttacaatcaaagcgtgttgatctcttgcctttaaatcttaacaatcacgaccatatgcaagcctattccttgatggatattaggtaatagttgacaaatag

SEQ ID NO: 34944 - DNA, 2883 bp, Arabidopsis thaliana landsberg
acgcagaataataatgagagcacatctcgagacaccggggagtcctttatggccttcgacagtaccctccgcaacataaaaccaaaattcattccaactgccccacttgttgcgggcgcacggaaccaactccactactggcattgtggtcttgccggtcttcggcgtgaatgtgcatgacccgaactgggcaactccgttcccaaccatcctcttctgccaatgcaaacaataattcttcgcaaaaacttcaacagacggctgcccgccatacgaagtcgtcgcccagacatacttcgccagcgccaccatggcattcggtgtcagctgatgtatctgaacattgaatctacgcaggacttcgccgacaaaccggtgcgcaggcaagcggagaccggcggcgaagaacgcctcgaaaacaaccaactcaccctccggctcggggacttcctccgtccccggagcacgagcaactccgccgccaaagtaacccaaccgctgcatatcctgcacgcggaccgacgacatccgtgacacgccaaaatcaacagaatcgccggcgcgcaaatcctccgccatcaaactacccagcgtctcctcagacgaggcggcgccgacggcgagggatcggccggcggcgtagcggcagcggaagaagacgaggacggcatcgctacgtaccgtcgacggcggcgagcggtctgcttcactcgagccagatctccggcgaacaagagcacggcaggtagacgagcagcaaggcggcgaaaagggcggctagggttttcacggagcgcggaaagtgaagttcaaaaagcaccgacccccgcccccttttatagacaggggcgacgcttcgggaaacccgcaatccaacagtacgccgtcaatcaacggtcacgtcaaaaacccccgcggaaccacttcgagcgagggcaacgactccgccatctagcgatgtcttcggcaccaggtgacttagtcgaactggtccctcggagggcaaatgttggggcgaaggcaaagacgccacccttcgctcgaggccttcgctgcagccgccggtctgacagagacaagacgggcagggacacccttcgctggattcggcacgttgacgaaggcctgcggcgacgtcttcccgcggcgcgctgtcacacccggttttagaaggcaaaccgaatgcaaactatgtacgtgccaggatcagaactcacgtacacagcgattacataaatgaacatcatcacacaatgctcgaataataacataaaagagtacttattacatcatagagtcatagacatcaacgtagtcatcgtcttaacaggtaaatcaaagtgctaagcgaaacgcagtaaagataaggccttcacaggcagctgactgggggttgccgccaacccacacctagaattcatcgtagtcttggaactcttggaagtctccttccacgacttcgccttctcctgagcagtggttacaatgctgacaacctggggatggggggggttttgtgtgtagagcaaggatgagtacacatcaacgtactcagcaagtatcctgtttggctgaagtggactagctttatgtggggttaggctcaagcagttgcttttagttggtcagattatttatcattagtagaaagccagattttagcatttacccaagttattaacccgatgtaccctttccaaacggaaagaataccacttaccagcaccatagtcataaccaaaaccatcaatctcattgccacctgtaaaccaaaaggtctcttatcaagtaccactaatcactggagctcccttggccgctcataaccgcgagcacggctgatatatcagtttcataacactctgcagaggttgtgcactttacccacaagccgtgattccctcttgcctcgggccgatcaaacccttaaacactaccaaggtgaataggcagggtttcactacgtagcctttacaaagattccccggggctgtagccacccgttaggtttcctaaatgcaccgcactcctccccaaggggcgaacccaaacttggcagagcgagccgcatacaccgagccccattgacggcacgacggctaagtgaactacatcccggatcctctaattattcagctaagggcaccccattccaccctcatggttgcactgttttcccgggcggtcatccatagaacaggtccttacggagaggcactcgagaaaccgctcgagcccccttgaataccacaagtacaacatcataataagggaagggaaaacagtgtatcatagataatctcatcatgttcattgattagagttgagcaatagcataaagctaaataataataatccaacccagataggtaaacaaggacatggataacaaaagctagtcaatccttaggtatagatgtgtaatgcgggaggtgaattaaataatgaataggacagagataggtcaaaggacacttgcctccaccaaccgactgctgctcaagggcttctcctgcgaattcctcgggctcttcgaccggatcgttctctatgcgagcgcaaacatacatacatccatccacatttaatacaaaagaacagtacaccatacaagggaacaaataaagtgagtatgcatcaagtatgacattcgatatcgcatttgttatggttagaaagaaacgggaaagggtctcgcagggggttaaatcttatgcactaacgatcaattacaattggttcttaacaaaagaattctgttacatatacactaatggaaacctaatcattttaagttgatcaacattgcacgaggtaaacaattaactacatgaatccactagcataacggaattttaaattaaacttcctatttcaatggca

SEQ ID NO: 34945 - DNA, 3597 bp, Arabidopsis thaliana landsberg
  unsure (1)..(3597): unsure at all n locations
tgtagattttccaaaaatcaattccaaagcctggtttgactcccctttagcaacatctgaagataatgcatcctttaaagctgctgttgagtcttgcggagaatcactcggcactaaagatccaccttgatttccttccacatattcagacgagagttttgtctgtgcctgcagcatcatgctcaatacaagaagcaaagcactaatgcattttggagccagaatgtcagtttcagattcactcttaaggttgaaatccgtcaagataccaattgctacggtcacaataccatcctgtgcagcaatttctcgtgtgttatcatcttctgagagtactaatgctaaaatgtgtggtatcatagtcaaagcaccagtatccttggagaaatcaagttgtacaagcttcagttgctgaataagatacgacacgatttttggccgatcttcccctttgtttcggttacatagtgtcacaaacaaatccattaacgggaaagccatagaatcatcactctgaaataactttaccgatgcagcaatgacttcatcaacaggaggttcttttggttctgcttcttcctgcggaacatctacaggcttttctgtatcctcaagttttggagtttcagatgaatttccaagagatagtgcaagtgcttgagccaattcgtcatcttcctgcacaggatcctcaggattggtaaacaaccagtccatagccatctcaacactgttcgttcccactcttcgtaatgcgtcttcagcccttgaccttgaaaatcccatttcaacaatcgtaccaacaatggcttcgtcaggctgtagaggcaaggctctttggtttgtaccccgggtagcaccacttcgattttccctagtatccacaacaccagagtaaatatgtgtaacaagggaggtaactgaagcaacaaaattaggattgcaatctggaaacatagggtggttccatataggtagtatgacttccagaacctgagactgcagatttcgcacaaaagtctcaggttcccttggtacaggaaaagtccaatcgacaaatcaactgaagctggctgtacaagaagctgcgtttgagaggttggagataaaagatacgtagagttaacaaaatagtccagtgctcggcaatagttttgaagagtatctaccagccacttactgtgagaccatatatttctctcacctgacttctcattctcagtactagatgcacgaatagaaaacggcactttccaaagcaactggcttgtagcttcaaaggtggtgagaagttccttaaatgttccatggacataaaaactattcaccatagctgtaaaacagaccctccttcgagtatcaaatgtcaggaaagttatgtcatctaccacttttccaaggtaccggcacttcagtgacagagatgtatcaggcccagcagcagcaccgtacccctggaagttaagagcttcaagaaatactttagctagggcagtaccaagagtcttagatgctgaactcaatgatggcccatcaatcctgcgacgattagcagaggtaaatcctttcacaagggatgtgaaaaaaaaacgtagtgtacaattcagcttgtttaaaatttcagcaataagaacttcggtgcttttctttttcagctcatgggaagatgaggttactggcagatccgctggaatttcagaatcaaaattaaaagactccaggtgccgacgagttctcccacccctcattcgggctattgcgtggcgggtatgaccatgaacacctctgccagaacgcacaacagacagaaattcgcgatgcccaccccaaatagactgagagctactgcttctaatggatacagggtttgtgtatctaactgctaaagcattgcttgaatcctcatcactctctctttcagcagtactggatgatgctgaaactgaattatcagatgctcgatcaacactctttttttcatcttccttagtatcattacacaaggccatctgccaaatcgtttgcttgtatgttataccaagttctttcagtannnnnnnnnnnnnnnnnnnnaattctgagataactgaagctgatcctttcaacaaaaagttggagagggacaacatgccttctaggcaagaaagagatctcaaaatctttgtctggaccgcagactctaatttaagaagctgagtaccttcaatggaaaccaaaaggttgtttgtcttcttcagatgttctcttaagtaggagcacactattcgggcaagaccagctgaatgctgaggggagaagttcttaaaagcgacagaaaaactttgaccaagagaggttgatagaggcataagaggtaaagagaatagctgcaaaactgcatcaattcctttcttctcaacaaacagggaacatacttccgcattctgaagaactgtttcaaagagacgagcaacattacacacacaatctggaagaaacagctcaatgtttgctggagaagtgtcagaagatggttccgcctcatccgaaactgccaagctcttctcatcaacgtcaatttccataggaacaggtgcagcactagtaggcacatcagctgacttagaggtggtggcctccatcccagatccaataatcaacatggaattgaggatttcaatgaacatatcaactccataagtgcgcaacgaagattgatgtctcaagagttcatcaagcccacttgacaaagaaccaggtgtatcacctgtaagagccctcagataagagggagaagtaaatattttcacaaaacacctcaaggcatttcggtccttcacagcttgaagaccgctattgttgagacacagagcatccagacactgcggtatgcatgttatggcttctgcagagcagatgacctcatcagatatagcatcaagaaaggtagaagttaaaccagctgaatctaaagcattgaaacaagtgggatctttatgaatgagatcactcatgacagtggcagcaagcgagaatactccacccccgaaatcttttgctcttcggaagataatgcataagcattcaggcaacaagctctcctcggaaccatagaggttagtgttaccaggagcataagttccaagggatattgcacgtaacaacgcttttaacaacaatctcctgtgatacgaaattaatgcttcagaatagggaagttgttcagtatcgtcttcaggcccattactaccagaacagcaaacaatttctttcacatcgtcttcagttcgagagacttcctgttttaaccgaaagatagtatcatctaagccacccaaatctctgaacaaagcagcagctggattgctgtaatccatgaagacttctaatatatgcacagcagtactgaccaaatgcaagtgctggggatctgtatctttgatgagaggcactagggtcggaataagaccagcttctcgcatggctgaacatccagacgatgatgaaaccaggactgtaacaagggataacaaggcttctgcaaaagcaagagaccacttggaagtattacaaataacagaatcaattgctttctgcattaagccagattgcaaacca

SEQ ID NO: 34946 - DNA, 4859 bp, Arabidopsis thaliana landsberg
  unsure (1)..(4859): unsure at all n locations
gatatcagctaattggtgtaaagacacatcagcactctcggtacaaggttctttggatttttcagtatccatttgatcaaccaaaatggatggcccgggctggatatcagctaattggtgtaaagacacatcagcactctcggtaccaggttctttggatttttcagtatccatttgatcaaccaaaatggatggcccgggctggatatcagctaattggtgtaaagacacatcagcactctcggtaccaggttctttggattcttcaatatccatttgatcaaccaaattggatggctcggcctggatatcagctaattggtgtaaagacacatcagcactctcgataccaggttctttggattcttcaatatccttttgatcaaccaaaatggattgcgggggctggatatcagctgatctattttccagtatagcagagctgatctctacttgagattccacagaccctatgcaaacttgatctcttgaatccctttgttcaactacttctgacggttcacagtgtgataagctatttctgttctcatcctcaggctgggtagaagatgaaggctgacatgtcttacctgaagttatgccaatatcaatagaggtattgttctgcatggtatccattttctcacagttgccatcgtctggttgtcctggtacatcgtcgggcaaaatacttggagattgaatttcctcagactgggaaacaacaacgtctggcactactccatgaggtgatgcaggtacatccacaatctcttgcaaattttcaggcactatcccaccaactgggggaatgtcagtttgatcctgagacactttcaaatcatgtgatacatctgggacctgctcagatgaaatattcgttttttcgtcattagacatgctttctagttgtcctgccacatcgtccggtaagatacttggagacagatgtccctcagactggaaaatcacaatgtttggcgctgctccgtgaggtgatgcaggtacatccacaatgtctcgcattttatgacgtactataccaccaactgggggaagctctcatctcattgagattagctttgtattgtgtatcactgtaactccatgctagattccatacaaacttcttcagcaaatctaatgaaccatgtcgttttttcagattctccattatatgcttcacacaaggtctgtgttcagcatttggcaatgcattcttgacagcactaataatcccctgtcaaatacaaacacattagcatctataaagcactatcatctatacataattaaacaatcagacataagataatactaaccttgcaacgatctgatatgaccacatagccactgccatcctttagttccaagtcatgcttcagctgattcaaaaaccagagccaattgtctgcattctcagactgaacagttgcccacgccactggatagatttggttgttcgcatcatgagctatagcagtgaacagacatcccctaaccgcatgcttaaaaatgttccatctatcccaatgagaggcctacagaagtaaaacgcattcttcattgctccaagacaaacataaatccggttgaagacatcattctcgtttgcatccctaatggtatcaacaattgcagttgatcctttgtttgtactcaagatatctgccacatagcctcgaaggtgtgcaaactgttgggcatattcttctttcagccacttaagagctagaagtcttccatcttgcacttgtccaatagtactaactagcttccattgctccttgatatgcctctgaatgtcaagaggcatgaaattaggctgcaaccttagcttatccataaacaatctaccaatcactttcctcttcaacagcttgcattttccattagaagtacaagaatgatccagacatttggtcttcaaaacccacaattgcctctcgtgagagtatgaggcatagacataccattcacactccttcctttgagcacatctaaagctaattttatccttttcccacctattttgtttagcatttatcctatgcttcattgcataatgcaagacaacctctttgaattcaaaaccagtgaagaatattctgcctatagctaacctatcatccgaagctaatctaatcttcctatctctagtgatcacaggatcttcttcttcattatcactttctggtatttcgttccttctaatctttaactcatcataccacatagctactgcttcctctatctcgaactcaaacctctcggccaaatcttcttccggctcatccttcttctgttttctcttcttcttttgaccttcttcagcctcttcctcctttcttttctcttctctcgtcctcttcttttgactttcatctctgtctccatcgtcttctagattgacgtctccatcagacgctatgtcaccatcgtcttctctattctcctctccatcagattctctgtctccatctatcccaacgtcgtctccctcaactccggtggcttcgtcctcctcgactccgctatcaccactatcacttccatcgtcggcttcaatgtcactctctggaggttcgaaatcggggtcatctggatcgctttggtaaatcaatccttcctcccaccaattcttcatttctccctattcgaaacccaaatcgagacccagaaattcgaatcgaagaagaaaaccccaaatccccttttgtctttctctctcaagaaccctaatttcacagtgtcgagattaaagaagaacgaccaaatcgatttgagagttaaagaagaatgaaaacgacgtcgtttttttcctctttttgatgagttaaacgaaatgaaaacgacgtcgttttcttaacgggtctgggtattagtcgggttaatcacaatcgcggtacagtaaacgcggatttgtggttaatcccggttaaatgaatggttcaattgaaaatgtatgtttaagcatgaatccgaaagtagatgatgtaattttgggaatatgaaagttgatggtggaaatttaagggcccaaaagtccgggggtgaaagctgagaatcgaaatagtttatggctcgaaaatcagccaacccaaataattatgtaaatatctttttgtcaaaaccataaatatctatatttgctgaaatgaaagccaacaataatttattttttaatcgtctcacaatatgtctttgctctgtcctataaaaacactcgacctcctctgcttcaaaaattcaaaaccattccttggactccactgttttattatccaccatgaaaacttgtttgatcttcttcctctacacaacaattctccaatactattcccacttctctgtgtcatcattatcaacacctcttctcctccatctctcccactctctctcaacctcaaaacactcttcatctcctctccaccttctcaaatcatcctcctcccgttcctccgcccgcttccgccgccaccaccacaaacaacaacaacaacaactttcactccctatctcctccggcagcgattatctcatctccctctccgtcggctcctcctcctcagccgtctccttgtacttggacaccggaagcgacctcgtttggttcccttgccgtcctttcacttgcatcctctgtgaatccaaaccactccctccttctcctccttcatctctctcctcctccgccaccaccgtctcctgctcctccccttcttgctccgccgctcactcttcccttccctcctccgacctctgcgctatctccaactgtcctcttgatttcatcgaaaccggagattgcaacacttcttcttacccttgtcctcctttctactacgcttacggtgacggctctctcgtcgcaaaactctactccgactcactctctctcccttccgtctccgtctctaacttcaccttcggctgcgctcacaccactctcgctgaacctatcggcgtcgctggattcggccgtggacgtctctctcttcccgctcagctcgctgttcactctcctcatctcggtaatagcttctcttattgtctcgtctctcactcttttgactcggaccgagtccgccgtccgagtccgctcatcctcggtcgcttcgtcgataaaaaagagaaacgnnnnnnnnnnnnnnnnnnnnnnnnnnnnnntgatgatgagaagaagaagaaaaatgagttcgtcttcacagagatgcttgaaaaccaaagcatcctacttctactctgtttcactcaaggaatctaatcggggaacggaatattctggtcggcgatgccagaagaattgacaaaaacggtggcggaggagttgttgttttctcaaggacaacgttcacgatgcttccggcgaaattctacgattcggtggttgaagaattcgatagtcgggtcgggcgggttcacgaacgggctgatcgggtcgatccgagttcgggtatgagtccttgttactatttaaaccagacggttaaagttccagctctggttttgcattttgccgggaacagatccagtgtgacgctccccaggagaaattatttttacgaatttatggacggtggagatggtaaagaagagaagaggaaaattggatgtttgatgttgatgaacggtggagatgaatcagaacttcgaggtggtactggggctattctggggaattaccagcaacaagggtttgaggtggtttatgatctgttgaacagaagagttgggtttgctaagaggaagtgcgcatctttatgggattcgcttaaataagcctaacatgcgctgaagccaataaatctttaaaataagcctaacatgagcctctccggtttgaccggtggaccgga

SEQ ID NO: 34947 - DNA, 2708 bp, Arabidopsis thaliana landsberg
tactctacaaactttggattcacatatatatatatatgtattgtaaggtaatgtataatatatttctgaatttctctttgtttaataaccattggcacatttatttattttcaaagtatgtcattagattattcatattaatacatatatatatgagtcgtttgacacaattgggacatcaagaatcatcactgcagaacgtaaatcggatcgcacggtttgtttttcctgaacaccagccgatgtggatttcaaacttcggttgaggcattattttgtcaagtttagtgctgatttcagacatcttggccttgagttctttgatatcagccaattgattaacttgaacatccacacctaccacccatcgtaatttagcttcgaactctttgatatctctcatgtacctaaagataaacaacacaaatataatacacatgttattgacttaattcatagtaaatgttaggttttgatagatttagtactgttgggagtttatggaaatcacatataggaactatttagcacaaacctgaacttcttgcgtacgtttctgcgtctctgctccgcattctcctcaacaagagaaacagcgttcacaaggagaagcttaagacgttcattgaatttcctcgatgatgaatcttccattttttcactcaacttatcaattttaacaatcaacggagtgatagtatcgattgtagcttcgagacggtgtaagatgaatcttgtggttacagatctatcttttgctcttttgacggcctcttgaaggacactgagagcaagtccaagagcaccccctgcggcaacctcagcaatcattttcttgaaattagtttggtagctctctgaggtgaagagtttttgatgagttatattgatgatattattttgtttggtaagaaaaatataagaccatctattatattatatagaggtgaatatttataattcctttttcttctcaaatatttggtaaagtgttgctctattaattcacataatgttagtatttatacacaaatattataagggtgaatgcaatgagaaatctatgaacatggcagtcttttgcttaacaattaagccgtgtagtttgtacagtcaaacggatgttctttgttaccgtaacttcctacgaaagagtgtgaataagagatgtgtgggccgcttggtaacgaagtaccatgcaattagatgcatgtacgcggtagccaaacgtctagaaatgtgaaagcgaattttttaataaaaaatttaataaacggtatgtgttggaaacggatatatattaataaatagttaaatattatatcatatcaaaagtaaaattaatatcacaaactatacatgattattaataattcaactaaaagtaacaaaattaaatagtcttttacttttttgtagctaattaaatcaaatagtttaaagtcaattttagatcattgtcagtaaaaacatcattaaactcaagtctttcaaagttaatttaattcaatttatgcaaaaaaaaaaaaaaatcatgaaacatagatctcaaaagaaacgaaataaaaagattattgttagttattattttgataaaattactcatagattgagattagagtttttcaattattatggggaagaagagagagagagagattgagaaaaaaaaaatatagatttccgaaattgattacaagaagaaataatttcaacaaagtctctgtttttttttttatcaagttcttatcttactacaagcagaaataacttcagcaagtttagtgtccatttcagatatcttggccttgatttctttgatatcgtcccattgatcaacttgaaaatccacaactattatgcttcttaatgcaagttctatcgtttcgattgctttgatgtacctaaagataaacagaacaaacataatacacgtgttatttttccacaacatgataggttttgtacgtttagtgtttggagattatcgaaatcatgtaaaaaaaattgttacaaagaagaagatatttttctctaaaccattaaactaagaaattaggcgacctcatatatataaaaaaaaccaatagaaatacatggattttcatgtaatatatacaaacctgaacttcttgcgtacgtttctgcgtctcagctccgcattctcctcaacaagagaaacagcgttctcaaggagaagcttaagacgttcattgactttcctcgatgatgaatcttccatttcttcactgaacttatcaatttgaaccaccaacgcagtgatactatcgattgtagcttcgagacggtgtaagatgaatcttgtggttacagatctatcttttgctgttttgacggcctcgtgaaggacaccgagagcaagtccaagagcaccccctgccacaacctcagcaatcatcttcttgaaattagtttgttagctctctgaggtgaatgtaaggagaaatttatgaacatggaactattgaagagtcttttgcttaacaattaaaccgtgtagtttgtacagtcaagggatgttatttgttaccgtaacttcctacgaaagagtgtgaataagagatgtgtgggccgcttggtaacgaagtaccatgcaattagatgcatgtacgcggtagcaaacgtctagaaatgtgaaagcgaattttttaataaaaatttaataacggtatgtgttggaagcgata

SEQ ID NO: 34948 - DNA, 4779 bp, Arabidopsis thaliana landsberg
  unsure (1)..(4779): unsure at all n locations
agtgtccgttccaggatatctagcatctggttacatctcctgttagtgttcatcaacacagtctcttgaatgtggagaaacacatctatgatgttgtagaagtggttatctgcagtgacttttggtctcaggagtctccaagaaggtcatacggatggtataacactcggtgcttgatatggatactccttggggaacggaggtcgaagaagtacaaattatgattctgataacaatctgttacagtgacagcaactctcatcagctcttttctctctttgtaagttctcacgaagaagctgacgccttccttctctctggaggctagacccctctctagaatcccccacaatctatccacagtactactcgcgcagacgcataaataagaggagtaacagcaacggtagttgtagaagtgatgatctcgcggagcgcctccatcaacagcttcgaactttttgaatctcttgtagtttaaatccactttgtctcctaactccatgatctctttctcgaagatatcaataacgaagtaactgtctttaccaaaacgaacgatgtcacccactttttcaccttccgatcccggtttagactccggtacaaggttttgggattcatcttcttcctgctcagtagaagaacctgcgaaaactttctcctcacgtctcatatattgattagcagattttgacctaaattcgtctgcaagtaatactctaggtttacctgctcgatcatcatcagagtcgctgctgcttgcaccaatacctttatccctaccttcgaagagattagtaatattagaactatcattactcatgattttgcttttctcgtgagctctgtttctgcctctcctaagtattttattgtggatctttaagcgagttgttaagctaatgtcatttaggattaggaaaagcttaaaccctaagaattaaaggataagttatatnnnnnnnnnnnnnnnnnnnnnnnnnnnnnnnnnnnnnnntgttttcttatttggtaactgttttaacaaacttcttatgattcatttccttaatatgattatttttctaatcctaaatatactgcttatttgttattattagttataaatataataatctttcaatcttaatttattttttcattcaataggactaaagaattattaatacattgtttgccctaaaaaaaaaaaatcaaatcgctccccgggccttaaaaggcttgtgttggtagagaattaggagaatgggcccaagtcacaaaaaatatttacaagcttttcaaataaatcaaacatattccgagaaaacatgtaattcaaacattgatatgtgaatagtgtgctactatttaaaatgatggagataacaaaactaatagtaaggaagacagagtaataaccatgtcggaagcatcttgtcttgcttctcctttgctctacagaaagaagaactctcttgttacttatgtccaattcaatcccaaaaccaccaaagtgaaatgttttttttttttttggtgcagccaattctggaatccattctgattctttctacgcttcgcttattgatagtgccactcataaagctcagctgaagcaaatccacgcacgtttacttgttttaggtttgcagttcagtggtttcttgatcaccaagctcattcacgctagctcttcctttggtgacattacttttgcacgccaagtgttcgacgatttacctcgtcctcaaatattcccttggaatgctataatcaggggttattcaaggaacaatcacttccaagatgctcttctcatgtattccaatatgcaactcgctcgtgtttctcctgattctttcactttccctcatcttcttaaagcttgcagcggtttgtctcatcttcagatgggtagattcgttcatgctcaggtgttcaggcttggatttgatgcggatgtgtttgttcagaacggtctcattgccttgtatgcgaaatgtaggcgtttgggatctgcgagaactgtgtttgaaggactgccattgccagagaggacgatagtctcatggactgctatcgtttcagcttatgctcagaacggtgagcctatggaggctcttgagatttttagtcagatgaggaagatggatgtgaagcctgactgggtagctcttgtcagcgttctcaatgctttcacttgcttgcaggatttgaagcaagggagatctattcatgcttctgttgtgaagatgggtcttgaaatagagcctgacttactcatctctctcaacaccatgtatgcaaaatgtggccaagttgcaactgccaagattctgtttgataagatgaagtcacctaacctgattttgtggaacgccatgatctctggctatgcgaagaacggttatgccagggaagctattgatatgtttcatgagatgatcaataaagatgttagacccgacaccatctctataacatctgccatttcggcttgcgctcaagtaggttctcttgagcaggctcgcagtatgtatgaatatgtaggcagaagtgactacagggatgacgttttcataagcagcgcattaatcgatatgtttgctaaatgtggaagtgtagaaggcgcaaggttggtttttgaccgaacacttgacagggatgttgtggtgtggagtgctatgattgttgggtatggattgcacgggcgggcaagagaagcaatcagtctgtaccgtgcaatggagcgtggtggagtacatcccaatgacgtcacttttctggggcttctcatggcctgtaaccattcaggcatggtaagagaaggctgggtggtttttcaaccggatggcggatcacaaaataaatccacaacagcaacattatgcatgtgtcattgatcttctcgggcgtgctggtcatctggatcaagcttatgaagtgatcaaatgcatgccggtccagcccggtgtaacggtttggggagcactcctaagcgcttgcaagaagcatcgccacgttgaactgggagaatatgcagctcaacagcttttctcaatagacccatccaacacaggccactatgtacagctctctaatctgtatgctgcagcacgtttgtgggaccgtgttgcagaggtgcgagtgagaatgaaggagaaaggattgaacaaagacgttggatgtagctgggttgaagtaaggggaaggttggaggctttccgagtgggtgataagtcacatccgagatatgaagagatagagagacaagtagagtggatagagagtagattgaaggaaggtggatttgtggctaacaaggatgcttcattgcacgatctcaacgatgaagaagctgaagagactttgtgcagccacagcgagaggatcgcgattgcgtatgggcttataagtacaccccaaggcacaccactgcggatcacaaagaatctgagagcatgcgtaaactgtcatgctgctacaaagcttatctcgaagctagtggacagagagattgttgtgagagatacaaataggttccaccattttaaggatggagtttgttcctgtggtgattattggtaacagagagaagagcaattgttggtatcattatactaaaaactagattagtcttaaggttgaaaagcttacttatttaatcatcaatttaaagattctgacaaacacaatagaaaaatctgtgagataagcaagtctatttaaaataatgagaagaaaggaacattgtcaaatagagttgattacttctcccagttggctggtcacttctcaacgacattcttgtcatacaaatactcaacgaattcatcaatcaggtaaggccatgctccttctgcatcgtaattcgacagcactgggtcgaccatctgcatcacaaaatattgtctcaatccatatatcaacgctaagcccatagttgcaatcaatgtaagctcaatagcacaactgtatctagtttttcttttacccttgaaaattccagtagctgtgcccatgtgtccttagatatggccttgttatgacgatcctgattttgggaaacaaaattgtatcagaagtaacaaatatgatagaacatgccttgatgatattattatactcgagagtttacctgcaagaaatcacaccagtgagttaccaaaggccactctctttctgcaaagagcaactgccacatcccaatcgctgtgtctaaggcaagagatttctgcccctgaaacattttacagttacactatttgtcaccgaccaagaaaaaacagctatcttctaaaagcaactacttcaaatcaagttttgtcaccttctctttcgcccacccaaaagcaaagttgtatatctcatggaacttttctgaaaaagataaatgcacaagaaaaacattacacatatgtcagctaacatgggacaatccatcaatcaaatcgtaaaccagataaaagaatggcgactcaattttctccttacgttcatctttaagctcagaacgcataaatggcagcttttcctgcaacttcccnnnnnnnnnnnnnnnnnnnnnnnnnnnnnnnnnnnnagtactccacatcaaaagacccttgatcaggtcacaacataaaagaaaactggaaagacccttgatcatttcactcaccctaatgcctgtaatccactgataaattcttgcctggaaaactcacacgctgttgcagcattcatatgccacgaaagaaccaactgaaagaagatgagcaagaaaaccaacgagtttaactcagcatatgtagt

SEQ ID NO: 34949 - DNA, 3413 bp, Arabidopsis thaliana landsberg
  unsure (1)..(3413): unsure at all n locations
atgggaacatagtacttcagtggtggatttggtcgaatttgcgctgatgattggagacagatgttggagaaaaattttaggacaacgaggtgtccggaggagtttaagaaggatcttgcagtgcattacttgaggggggaagcagatcattggtggaaattttttgagaggggcttgcctgttagatatgtgtctatggagcttcgttagggcacgaagattgttcgagagtatgatgaggagttcaatcgtttaaggaggttctctatgaagaattttggagagcaggatatgattcagagattcatgagagggctcagggatgatattcgtactcgtacctccattcgagggtgcactagcctggttgagttagttgaggaggctgctaggttggagagatgacttgtggaggaagctatggatctcaagagggctccagcaaaggtaacaaaagctgttgaatctcagaagcgcacttgggataatcgtggtgcgggaccaggccagaatggtcagcagtgtgccacatgtggtaagaggcacagcggggcttgttggagtaatactgggatatgctacaattgtagacaaaatggtcatacatggtcgaattgtccagggaaagacaataattgcaagagatgtgaaaagcctggccattatgcaagggagtgcactacgtttctagttgaagggaatcagtagaacgaaaatgagggggaccaaccactccctaagatacaagctttaagacctcgtgtgtacgctataggagaccaaaggattgatgttgagaaagataaagtttgaaattcaaattccaaggtcgtacaagttcatgttggagtaggcggtctaatcgttttaagtgacgatttcttttaggaattcattctattttttttatattagagtttcagttgttggcttatgcttaaacatttttattcatttttttaatggtcaattgaattgttttaaatttgtgttgggaattaacaaagtttttctaaatgcatgagtggagaatatagtcgaataagaagtattgaattcggggacgatttcactttcagtgggggagaattgtgagacccatctctctaatgaggcccaataacagcccaatttctctaatatcaaaaacctaatcgtgaaagtgtgtgtgcatacgtatgtatatatataggtgcttatatcctcttcttcgttatgccatcacatccttgtatccatatcaaaacctgagagaagcaacaacaatcgttccttgttgtggatcacttgtgagtcagcagcactcgttcatttttgttgtcatgttgtgagccatcactcatcaccatcgatctctacgttcaccggagtcgtgattcgttctcattgtttttgggtaaggaaaggaaaccttaccttatgttgatctcttttcatgacaggccgtgtatgatacaggaaaagggaagagtagctgacgtggaagaatgaaggaagatgattggtggagacgtgaatgatgcgttggcagctgacgtggagatagagagttggagctatatagagtattatcgatcatttgcagaaaataaccagaaaaaaattgtaaacgtttgttatcgtcttctttggatcgcttgttgttgctaggtttctctcatgtcgagagctagcgtttgatcgtttgggtgtttcatgaacatcgattcgattgggtcggttacggattgttaattggagaagtttgtgttaatcggaatagatccttggtttttaatgtattatatttgtgaaatatatgtatttaagctgctatatggtcctaattccaggatatcattcaatatcattcttttttgaacgacgctactcttttcttttctcaagaagcgtttcaatgatctctcataggaagaacactatacacagttgaatatactttcattaataaaaatagatgaaagatacatattaaaaatagaataagccataagaggtctaggtccgtctgtgtagagaatttaggaactttggcttacgacttttttttttgtaattaaagtatcaagctcttaatttagttagtaatgtgaagtttcattagtcattatattgattattcatttctcttatctattgaatatgatatattataatattctataataacaaagaagaagaagacacagagttataaaagtgattctcttattcatatttttcttctttacaaatgcaacgtatatataggggtgggtagagctctttcgataagtcataccaaagacttggacaacaagtcacatgggcttcaagggataaatggataaacacaataattgataattatctaactttaacactctcccttagttactattattgtgttatacctcgttacaaaacttatcatgaaaaaatctattggataaaaaccatgacaaggaaaaaagagtacagtagcacaatctctccctaaaaaaaatatatcatctattcttatcttcagagatctcgtagatagcgcattccgatacggtgaatatgctttctgaatgtcgatgtaggaagcgcctttgtgaacagatcagctgtgttgtcacttgagcgggtatactagatatcaacttctttatttttcttaagttctagagtgtaggagaaaaatcttggagggatatgcttcgttctatcgctcttgatataaccttctttgattcgagcaacacaagcatcattatcttcatataattttgttggctcatttttgatgattaatccacttgcttcttgaatatggttagtcatggatctaaaccaaacacattctctacacgcttcatgaagagcataatttctgtgtgctttgatgaagtggccattaaagtctgcttttgaggacgctacgagattgtagttccccaatggtaaaaacatatccggtttatgatctatacttatgagggtccgataaatactctgcatctacaaaaccaactataccaaactcggtgtttttagaaaagtataatcataaatcaatagtaccttgaagataacggaagatgtgctttatcccattccaatgttttcgagttgaggaagaattgtaccttgcaagcaaattagtagtaaaagcaatnnnnnnnnnnnnnnnnnnnnnnnnnnnnnnnnnnnnnnnnnnnnnnnncatgtaaggtacttcgggatcaagtatatctttgtcatcctcacagggtctaaatgggcatttttcaatctggactattcaaaaagtacctttttcagcctgaataaatgactagtgatgttttatacctaaacacaaaacaatttaaaaacctacctgaactcataacatagtgcataattagaagtcaacgttaacaggttgttagtcaatgttaacgatt

SEQ ID NO: 34950 - DNA, 245 bp, Arabidopsis thaliana landsberg
  unsure (1)..(245): unsure at all n locations
gtatgcttttggtaccccccccccaaatcaccaaaagaacagtagatgcaaaagatttctgtaaaggatcggcaactacctgacaatgtaaagggggagaggagaggcccaaaagcggagtatcttgaatcagttatggaatgtagcagcttcagaggaannnnnnnnnnnnnnnnnnnntaacatcaggttctcctcttcttggagctggctcaaactggatgaatgactggttcttgcaatca

SEQ ID NO: 34951 - DNA, 6521 bp, Arabidopsis thaliana landsberg
  unsure (1)..(6521): unsure at all n locations
tgaatgctaagctggattgagtttataacttgctcacaaggatgaagcatgtccacttagcagctgaagaagagactattgagcttgagcctgagcctgagttagaggaaggagtcttctacatagacgattagggatacaggaagtttgggcagccactgggcaacttcagtggcaagaggtttacagggaaccagggttcctcaaactacactccaaagcctgctttccagaagacctttcctcagagcaactttcattggacctatggtaattcagcttaccaagccctcccccctccaccctcatcagagacaagaatggaatctatgcttgagcagattctagagagccaaacaaagctcgttgtggagtttaatggcaagtttgatgctgtctacacagatcttagtgggatgatcgacaatctgagctctcacttgaataagctggatgtacaggtagctcaactgcacaatcaatcaagagacaagaggnnnnnnnnnnnnnnnnnnnnnnnnnnnnnncaaggaagagctgtaatgccatcttgatcatagaaggggatgatgtgtgggaagaattggacactgaagacgagttggagttcgcagttgcagatatggtgtcgaccgacaccttccagtgtcgatcgacaccctatgggacactcttttctaagacgactcaatacgacggtgtcgatcgatatccctctagtgtcgatcaacactggatccggactacctcttgtgaggtgcaaataccaatgcagcccgagtttgtttatactcctcctgtcccttatcctaggaagcgtcgctctaagcagaagatacatgctgctaagtgcacatccattatggagaagatactccattctctccctaaggatgcatctgagaaatcctcacatccactcaacatgtatgtcaagcgactatttgacaatggcattagctctaccgaagctaaattgctcacaagggacattagtgcaatcatactgcctaaggtcaagaaagagaaggcatagagagtggacattgctgagtatattcgcaccatcacccctgatcagacatcttagaagcttccagatccaggtagcttcgttcttgattgctttatctccacaagcatgttcagctgctctttgtgtgatatgggatcaaatatcaacctcatgccaaagtctgttgctgagagactaggcatgactaaccacaggccgactcgcatcagtctcctcttcgcggatcgttccaaacgaatccctgaaggaatccttgaagatgttcccgttaaggttggtaagtctgttatccctgctgattttgtggtcctcgactatgagaaggaacccaaggatcctcttatccttggaagaccgttcctagctacaactggtgccaggtttgatgtgaagagaggtagaatctctctaaaggtttgtgatttagcgatggagttaggcatggatggttcagagcttactaagactatcagtagtattgcttctagcacagacacacctcctcagactgctcagaatcccacaacagagccacacacaatgctcccatcagctcagctcgccaatgagagttgtagagcaacggagtcgatcgacaccaccactcctgtcgatcgacaccctcgggattcacatacagagggttttgcacaatcttttcagctaacaccacttgagaacctatgtgataagttctcttctatctcttctcctgcttgacctttgattaattccttagattctttgaagtttgcttcacaagataacaagcgtagagttcttcgaaagcttgtttcccctgttgttcttgaaggtggcgagaagagtatcgatcgtcacaccattgagtgtcaatcgacacctgcagctgccccgatcagatttgtctacacatcgccttggaaggtgaggaggcagcagcaatcctccaccattccacctacatcctgaactccaccaagtcaagctattgactcaaaacaacctctcagtgggaggcaacccactggtttgatttttctttcttattattttatttgcttttatttttgatttatttctcccgctttcttcggatttgaattccacggggacagtgtcgtttaagtcagggggaggttctaactaagattacttttatttttgattcttattatttttcgattttgagtttattgagtcaaataaataaataaataaataaattaaaaaaacaaaaaaaatgttttgtttagtttagttaggaatcatgatctatatttctcttgattattgcctgattaatgagtgctgcaagttcgactcaatccgacttttggaaaatttagatggcaaaccaacaaacttgaggatatcctagtttccaacacaaccactaaggttggagctaatctcactgatcttccttttaccccttcaaacggttagtattcatagatcttgagaccaatgtgatagaaagaatgtgttcctctccccttataaaaataaacagaaaatgagagattgacaagattttcggatagtgtataggggtatgaatgtttcctatgaccccattattatacattatttggaatgatcaattacaaaggttggaataatgccgagggtgccgatccagtatgcgagttcccctttgtttactctctaaaaagaataagtttgggggagagaaagaacaccaaagaaaaaaaaatataaagagaatggtcgatttatcatggtatagtacaagaatgactctagaaggatcttgaatgttaacttgtttgataagaccgagcgatgaaagcctggtggatatagttgtggaacttaagtatgaaatctagaatattgtgtaagcttgcagagaagtatatgttggttaggatttgattagacttgttaggcatatggacttagtttgaatgatcatggcaataggctagagaatgttgggagttcctttgttttcaaaacctcttccacgggttcggcttttgtgttttgcttgagggcaagcaaaagctaagtctaggggagttgatataacccgattttcaccgattttaactatgttttaggtataggattttgagtttttatgttatttctcgagtgtttttagtgtcttttcaggtactctatgcaatgggacaacaatagagataaggagacattttggagcaaacactaagaaaaaggaagctaaggacgattttggttcaggaatcagcgaggagtgtcgatcgacacactcttggtgtcaatcgacaccagtttcggccccagcaaaaaccctagacgctttcaagtttacagaagaggaaatttgccccagaagactttcctatttgcattattagtccctggacgtttttagggttttatatatcttgtttttagacctaagtttgttttatcaagttttctacaaaaccctgttactgagagacataagctaatcatcgattgttttcagagtttcattcagatcattaattcagtgaagagatcccttatttccccttctctatttactgtgtttatgctttcacactcaaatatgttgtttgcttcatccaatatgtctgagtaatctgcttgttaggaatagggtttctcattagggattcatatgatttagtagattgttcactttgctaggttatctatagaattcttcatctttaattatgtttaatgctagatctagagtaattaactagatcttgaatccagacaatagatatgcccaccataggtatctgtagtttgatctattatttgatgagtctggtttataggtgtgtaataagaatcggcctatctactaagatgaacaattgaactcgttaagaatgcatatttaggttaaagatcactcggcttctccggttattcttagctatagatatagggagttttgcggaacaccatggttattccataattcaagtttgagtttaagaatggttcgataataacctagctttcattagatctactaaccaatagtttcctgagaataccatgttcctagctctttattaaatcgttcacaacacaatcaatctgctgtctttttactttgttctcttttattttcactattaccttgctagcttaatcccaacatttaactcattgtttgaacaaaagaactccgtgaattctatcctaaaatactgcatttgatctcttatttgagagagtagttctaggtaatttgaaccatatcacttattaataatgcatgctttagcataggatctctcggcttctccggttatcttagttgtaagtatagagagtttcgcggaacgccacctgttactctagaattatagtttgagtttgagaacggtgcgataacaatcctgatattagctagatctacaatttatctatctcccgagacaatgaagccttactcttagacctgacgccttaatcacttgaatctacaactcatttacttgcttatttgcctttaatattcaattacttcatgtagcttattaaacaacatcataagtctattgtgtgaacatcgagagcttagtggaattcgacccttaagtgctaacgacgatctcttaattgagggagtaagcttaaggcaatttgagctatatcaaatttggcgccgttgccgaagttctcttttagttcaccattagactaggtgtctgtgagagtcgaaactcgcacaatagaaattgtatttaggatttcttcaaagaacggatctctgtgagactctcaaagaacaacaaaattatttgattaccgtggacggtgttcttgatcttattattgaaaagatgatgattcgatcgtacaagtgtttagaaaagtaaaaaataggtgttttgccttcaaagtcggagcgttttgatagtctgaagttgagagcgtctttatgcatgtcccctttgttcgttccttgaggcgctttatataggaccttggtaaaccgcctctcgcgatattctcgaaagatttccagttatctccgggtcggcgataggggttcttttctatatggaaatcttccttattcttcgggagtttcgggaaacttccataaccgataatatcccagagatatttttgaaatgatatcttgacccttcactgaatttgtataagtatcctcctcgggtggatattctaccttgggctcggaccgaatgccgcgccttccaggccgagcccaagcgatcctcgagatatagttgagcttggctcgggtgtgttttctggaataacacccgagccaagtatagtttatttgaggtgttcccctgggtcacaatgtttcatcgcacccggctgggtgtgtgtttcctggagtaacacccgaaccggaacagcgctgagcctagctcctgaaatgctgatggtatccatccgaccggctcgggtactggggtgaaatcccaccccaacagtttgcccccctgctcgttgtttttgaccagaaggataagttaatcagactgattgtacgtcttcttactcgtgactcttggcgttccagtttccgggacagtcaaacttctattgcgtgtggccgcctttttcctcgagaagcagaagcgtttcgcttgttcccgagattcacgcggacgtgctatatcctcccgagctcacgcgccgttgacgcattctactaactcttttggacccgacgcacctttatacctctatatatatcgagctcttcctctgagatcgttcacttgaagtttctgaagaaaaatttgaggtttggtctctcttctctgatcttgattttcttataacggtctttcttttctggtagatctccgccgctttttagttgttttttatttctccagttagagaatttacgttttctgatcctcatttcgtcagacagtttcgagccgagcatgagttcgtcacattctaacgcctctctttcgtcccccagtgatcttctcggcgactctagtgagtcaaatcaccgagatgatcttcccccaatttacaagcgaaggatggtctggacttcatctgagggttccgagactaacgcagcgtcatcttctaatgcttccgaggcggcagtgccctttttggctcgggaggatgctacagctgacatcgttccggagttagatttacctgaagatcctgagccatctctcatccgcagaaccgcgcttcagctgttaacgaggccggagcatcgaattggcaacatgtgcctgagctgttcttcccccaagttaaggtcgaggagcatctttactttggtccggacgagacggaaaacatcgtgcgagcgtttgagcggaaggccttcgagaaggccgagaagaagaaaaggaagaaaaatagaaaggtggtgagaccaaatcctcctggctcgtctttatgcactgagcggtcactgtcggacttaagagctcggttcgactttggcgatggggttactcttcgcgttccgagcccagatgagcgttga

SEQ ID NO: 34952 - DNA, 3809 bp, Arabidopsis thaliana landsberg
tcttctttggagttggtatcggatgaaattttcgtttaaaaacaataatgatgtagcttaattcaaattgtagtaaattactttcaatttaatggttggtttggtttacaattacttaggttccgtctggatttgatttcaattttcacaatatataaagataacagaaatatttaaaagcaaatattgaagagtatatgatactaattactaaacactatgaagaaatttaagacaaacttactttagtttacacaaattggattttcccttatggcctaagataggtttccattacagctgtacatatacaacctacacctgcctcttccatgatgatgatttctccgaccgagcgcatcaaatcgtttttcaactggcttcatgagctctcaaacattttattctctcccagaatagtttcttactcactgtctccgagttatttgaatcccatgttgactctcaaaatctttcctcattaaacaattgcacaaaaataagaatcgaacttgggcgtctgtgaaagaaacctgtgcattgctaagccttttgaagactcatctcagctcaagcttggctctggatttctgcaaagaatgtcgctatccattaacatgtatacatatatcaagctgcagcaaaaggtcattgatcacatagcaaagagtagctaaaaatgatatatatgaatcacataacaagattacacatccgggtgtaagaattatacaaaggttgggggaaatctttgaatgaaaagcacacatacactttcatgtcttgtgtgtgtaaacacaaatgcttcaaccaacgccttcttgtccacacacacttcagagaatttacatagaaaccattgcatctttcttccagccaaaggtggaggagatacaaaggtgttagtgacaccaagttctgatttctgctgtagtttcagaggtgaattaagggcacggagtcacattaacagcgcatcatctcactcaccatttcaggaaaaagctacattttctttgcatcatttctctggagacatgaatgacgaagtccaaccagttctattcccactcccatatccagaatttgaggtttcgggtccgacatttcttttagaggtacccgcaggagataatgaagtggatggcatgttcatctgcaatgggttttcagtaaaataacagtcaagggaactcatctcgaagatcaatatattgtttcattaattcatgacaattgacaaagcgatactggtaaaatcagttttcagggaaccatgaagtgttctaagagtaatactatacatgacatgctaacacaagcaacgagtttgcaggatacaacatttatttggaagaggtaaatgcataagcacgtacattcttgtggacttgatcaaaacccagactcctccctatagcggtattaatgtgtgggcttggaccactggcattagccggtctgacacggtcagagacttgggcttcatgtgaaatattagttcctcctgccaaacggagagttagcatcgagatattgaaataaacagttgcaacgggaaactaaatcagccagacactctatgccagttgagtccagtgtgaaagttgagagaaaacaaaaaacacatcatatactattacaaaattaatcagaaaagtgacacaattaaaatttataacttgagctgacctcgatgattgcttgtgtccattggcattgcacgagcattactagacccaggaactgcctgcagtagaaatgacaatactttttgttagtaacaagaaaggtgacacagcatgcaaattaagattgagaaaacattgaaaactatacctgagactgatttctagatgtctgtgcttgttgatactctatgatagtccagtcaaatatatagtcgaactcatatcctgcaaaagagaacatataatagtgaggtaggtagatgatgccggtgaaccttatcagctgagtgaactatgaatgatgaagagatgtctttatccaaagtacctaccttcccgcgaaaataaatcacgaaaaagccgcttcaagaatccataatctgggcgctgatcaaatgtcagtgtatggcagtaatgaaaatatgatgcaaactccacagggtgatttttgcatagcacctgcaatgggatatcgatatatacttagtcgaatgaggattaacaaaaaaagaatcaatcacacaatagggaaacatacctcaatgggagttgatatcttcttctcacagattttatcatacttttgcttcttgtcaacagccttaagaccctgccatggaagactagaaaaggacgttcatgaaatgaggaacacaaaaaacagttaagtaaatctctaaaaacaaggaatagaaataccctgcgaaataacataatgttaactagtttctctcaaaaagacaacacaccttcctcttaggaaatacagaagcacatatcccagcgattctagatcatcccgtcgactttgctctgtgaagagaacccaaaatatgagcaaaagcgatttacttttacataaggataaagaatgccagcatttcttaccaattccaagatgtgtattgcaacttgcatatcgtgcagttcctgttaaattcttgttttccctgaatatagccgaataaaggaaataagttgtataatgattaacgtgaccgtaaaacttaaaaacagatagatcatttacaatctgtatattgaaccaaggccacaatacctgtaagggatgtggcggttggtgttggcatcccgatatcttttggcaagtccaaagtcaattagataaacctgaaaaatgagacttatcaatcataccatactctacttatggcatctgatgaagataagaagttgcagaaatatacctgatttgctttccgacctaggcccatgaggaagttatcgggtttaatatctctatgcagatatcctttcgaatgtacaaattctattcttgttagctgtaacagcgggataagaaaatcggaagcacattagataatcaatgtataagtcaacagatattataaatagcctaatgaatagttgaaagtcatgccataccatttgatcagccaacatcaagactgtctttggtgagaattttctcccacagtagacgaaaagatcttcgagacttggaccgagcaaatccatcactaaagcattctctgttccatcgactccaaaccattttatgcgcggaatcccacctgcaaaatgagcattgtactgataatcaatccctccaatgtccaacaacgtaaaccaacaacgacagaatgagaaaagataggaatgagttacatacttcctccttcaagagttctatatagcttagcttcatagagaagctgaggatgttttgttttactgttctcctgcaaaacaatccaaatgatctgagttaaagacaaattgtcagctaaaaagtaccatttcaaggagcttgactgataaatttagagttaatcaattcaaagaaccacacgaaacaatgaacatgatacaaaattcccagagtagattcgtttaatagctgattcaattgaaacttacgatcttaacagctacaatctcgaaggtatcgatgtgcgtagctgcgaaatcaacaaacaaggtacgtcaatttcaaaccaaagaagaagaacaaaactcgagaatcaacgagaacacacctaggaaaatctctccaaaggaaccaccgccaatcttccgtccgagcttgtactttccgccgatgatacgttccatggcagctccgatcacaaccga

SEQ ID NO: 34953 - DNA, 1169 bp, Arabidopsis thaliana landsberg
caaaactgtctaatatcaatccggctctttcaacaatcaatagagacctgtttatgtaatgtgggtgtcgtacgacaccaaggtggtgtcggacgacactatcggggtcgactctggtcaatatgggtttgtcacaacttgacttctccttgaaaattgttggtgtcgatcagcgaaggtaatggtgtcgttagacaccatcgggtataagttcctcctcctctgtgaaattattgattccacttgacaaaggtaaaacagagtcgttaagatcaattggtgtcgatcaacacccttatgtatcgattgacactaaagttttttctgcaactggacgagatgaagtcttttctgaaagttctcgctgaaggatcgggtttggtttctttccactgtgtagtgtgactgcattgacaaattctgaggtaggagaaggctgagatatatgagatctcaaattgtcgatcttcctattaagatctgtgtacacataatcaaacttgccattaagatcaaccacgagctttgtttagctctcaagaatctgcgcaagcatggagtcgagtcggctgtctaaggagggttgaggggggttgcaatcacaatctctgcttccctgcctaatccagttgcatctccccagaagaacatctatctgttccttgtcactcacatcgtcgtgaacaacaagaactttatgtgtatgtagttccatcttgtaagattcatatgcacatcgagtagattctatgtctggaattggtacaccgagcaactcttccaagagtaatgcaggcaagcaatcatacccgtgctctttcgatgttctacgaataatcttggattaatccatgccttaagaacttgcaccgcaaagtttcataaatctcccttgcaagagtggttttaccaataccgggcatcccaacaactcccaaaatccgagtctcctcacaatcaagatctagcttctcctttaattcttctaaccgttgtttgagtccataaatctcgtgcttttctcttcctacggacattgaattgtttttcgaatgatagacgaaagcatctttggttttgtccaacaaaatcttgctcagcgcttctttaacctcttcaacaataccattgatgaagttgtgctcgtcgctacaaaaatcagtaagaaa

SEQ ID NO: 34954 - DNA, 4580 bp, Arabidopsis thaliana landsberg
aacattgtgtctttatacaagaggatcattatatgtgaaaaacccaaactcttaaaaattatgaactaaaacatatcaagagtatattcaaccttatcccaatactccccctcacgttggagtgtgaagatcctgaacacctaacttggaaatgaggtaaagaaactgggaacgaccaagtgccttggtaaatatgtccgctaactgttcatttgttcgaacatgatgtgttgttatgatgccatcacgaaccgtatcacgaacggaatgacaatcagactcaatgtgttttgtatgctcatggaaaaccggattcttagcaatgtgaaaagcagctttattatcgcaaaacaagcggacaggagtagagtgttcgatacccaattcttttaacaactttcgtagccacttgatttcacgaagagcaacagatatagctctatattcggcttctgcggaagagtgtgagacagtgtcctgcttctttgttttcaaagagatgggggaaccatcgagtaacacaatataagcactaagagatcgtcgggtcttaggacatgtctgaaaatctgagtcacaataaacttctagctgtaaatccagatctgcttttaacaaaatcccttgacctggtaacctttcaagaaacgaacaattctcatggctgcagctaaatgagcctcacgaggagcttgcatgaactgagataaaacatgaacggagtaactcaattcgggtcgagtatgaagaagataaagcaaacgactaaccagcctccggtacggcttggcgtcggaaagtagcggaccgtcatcagaggccaaatgatggttttgttctaatggggtgaaagccgggcgacatcccaggttcccactgtcggatataatgtcaagtgcatactttcgctgtgataaaaaaaataccgtcagagccgcgactaacctcaataccaagaaaatattttaactttcccaaatctttcatggagaaacaacgccctaagtactccatgaacttctggaccatatactcatcgttgccgcaaatcaagagatcgtcaacataaactaacacacgaagttccattcctttacgtgtataggaaaagaaagagtaatcttcatggccttgtacaaacccaaaacgtaaaagagcatcagacaacttcttaaaccaacaccgaggagcttgttttaaaccatacaatgacttccgaagacgacaaactttgtcggggtgagaatgacgaaatccaggaggaagcttcatgtaaacctcttcatcaagatcaccatgcagaaatgcattatgaacatccatttgataaacttcccattagttagcggcaacaagacgaagaagagtacggaccgtagtcattttcacaattggtgcaaaagtttcattgtagtcttcaccttcaacttgtttgtttccttggataacaagacgagctttgtaacgttcaatggaaccatcagcattatatttcgtcttatacacccattgacttccaatagctaactttcttggtggcaaatcaacgatatcccatgtcttattaatttcgagagcatcgacctctttaaacatagcatcgttccatactttcacacgcaccgcatccttgaaagacttaggctcaacattactagtaatcgcggctaagtacgcacgatgacctggagagaacttatcatcagagataaaatttgttaacgaatacaatgagttaccttgggccgatgacgaagacttacgattagaggacaagagagcgtgatgggttaaaacttcacttgttgcattgtataagacgtaatcattgaggcgagccggtaactgaaccgaacgcttgccttgacgaggcggaggggtgacaacgcttggagtcggagcagcaacaggttcgggtacgttgggaactatactcttagtaataacaggaacagacggagtagccaccggagaaataacacattccgtgttaggagtagcagctacattttcatcagaaggtggagtcggagaggttgcttccattgaaggagtaatcgaacctacccgagaaacatcaatgtcatcgtcaacaggcagaattggagtgatcgagaaactccccctgtctactggaggcatacaccaatcagaatcagagactatcgggacagctagcgacggagctgaagtaggcttctcagcaaaaggaaaaacatcttcccgaaaaatgacatcacgagatatgaaaaacctatcttgctcaatatcgaaaactttccatcctttttggccaaatgggtatccgacaaagatgcacaaacgactacgttctccaaatttgtctttatctcgtgcaacacggtgtgtgtagcaagcagatacaaacactcgtaattgatcataacatggtttggccccataaagaacttcataaggtgaacggttattgtgaagagaagtgggagtgcgattaatcaaataagcagctgttaagactgcttcaccccaaaatttaattgggagacttgcttgaaacaacaaggcccttgcgacattaaggatatgccggtgtttacgctctacacgaccattttgttgcggagtcccgacacacgaagtttggtgaacaatcccatgttcccgaaagtaagaggcaagacacataaactctgtcccattgtcactacgtactactttgacagacttaccaaactgtttttcagtatatgccaagaaattagtgagtacagtgcgaacttcagattttgcaagaagtagatacgtccaaacggctcgagaaaaatcatctactattgtcaagaaatagactgcaccacaagatgacgggacacgatatggtccccaaacatcacaatgaatcaaagagaaacactcgattgatttattagtactaacgggaaaaacttcccttgtttgtttagctctaaaacacacgtcacaagaacgcgaaccaactgaaagagaagaactagaaaacacctgtaaagaagaaagcactggaaaaaataggatgtcctaaacgcttatgccatagatcttgatcagaagagacgttcgatgtatgaatctttgctgtagccacatccgtaagataataaaccccatcacgctcttcaccgcttccaatcaaagtcctcgaaaaacggtcctgcaaaatgcaaattgtatcagtgaaagtggcaatgcacttcgtttgtttgacaattttcgagacggagatcaaagtacaagtgaacttggggacataaagagcattagttagggctactttgtttgaaagagggaacactcccatattcaaagcaaagcttttgctaccgtcagcaaatcccaccgagtagggtggtatagggacaatgttagtcaaaagagagagcttccctgtcatgtgatgggatgccccggtatcgagaataacattgcaaaagtttgtcttaccggacaatttatcaatatttggattgctcgtttgttccttgatcatctatgcgagaacttgtaattggtcttgcgaaaattctggtaaagaagagggattagagctctttgtgtgagctgtgaccgcgtgtcctcttccatgaccagaactgcgacctcctctgccacgagtgttagaaccacgacctccaccattacgttcagtccaccactcgggaaaaccaacaatttgccaacaatcctttttctcgtgacccgaacgaccacaatgggaacacattatagaccgaggcttaatgatagaggattctgatcgtcctccactctgtgtctcttgtcgcaaagattcagaaccactttgatctccatgtgttgcaaagccaaccacttcttgtctctgctcatgaactctgactgaagcaaggcgttgttcttccctgataaggcgagagtctatgtcaccaagagtaggtaacggatccattgcaataagtgttgtgcttaaaccaccaaatcgagagtcttcgaggcccaaaacaaactggtgaatcttctcctcttctctttcttttgccggtttgctagtagcaccacaaacacacaacccacaagaacacactgtgactggcttgtagagttgatattcctcccaaagattacacaaacgaccataaaactcaagaaccgattgaccatcttgtttacacgcagcaagttgaccaatcaattgatgaatccgaaccttgtttccccacagagaaacgttgctctaagtctgtccacaactggtgagcatcggagatgaacgtcaccgtagacttgactttcggttcaatggaagttcaaatccaaccaacaatcattgagttgactgttttccaattttcaaagtttggatcagtagattgtggttttggaattgaaccatcgatgaaccctgttttacacttggcttggagtgcgttcaccatctttgttgcccaagcattgtaatcgtcaccgcgtaagtaaacggacgagatcatagcgccaggattgtcgaaactagataaaaaatagggtgaaactttcactgtttctgtttgagaagaatccgcctttgatgcagacgatgcatc

SEQ ID NO: 34955 - DNA, 9308 bp, Arabidopsis thaliana landsberg
  unsure (1)..(9308): unsure at all n locations
ttttttgctaaatttggggtcttttttagtattctatcttgagagttaagtatataggtaaaattggtgagcttcatgtgaattcccccgttatagatttattcatcattatggtattaataacctatagtttctatatacccatcaataaaatctttcatctcaccttgttgattcattgtgttgggtatagatataagtggggtattaaatatatccgttgtagttttcgtaacgcaaactatataaatttattgtgcatacgaaaaaaaattaaatgtaacatttgttattagtcgtatgattgtaacgttttgtatgattgtaaggttttgaaaagttgtgtaaccttccgtattgtttttaagttgagagttaatcaggaaggtagtcaaaattttggttcaagattagcaaagaaatgaatgatcaaattgtaatcaggtaggtagtcaaattttgattaatttttttttaagatttgaggttacttgcatgatttgtagtatggaatctatatagcttgtagggacagaaggttttgatgagatcacgagccatacaatgtctattcatgttcttgttgggtggacctagtggaccttgtggtaccacaaattaaagatgaaggatcaaattgaaacatccaaaacattttggtgcaaattgaaactcaggtagtatcatggagatataatgtgtaaatacaaattactaaaaggagtaatttaaaatattactattagtaaacgaaacctccgctttatctacttttccggcgaattggaagggttttgatctccttgagcaaatcggagattctttctacagttgtgcgaacgttcttataataagtttttagttgatcgatctccgatttagtgaactaggcgtcatcttaagaaccctaatttgttttctccggttgtgaaaacttctgttgttcgtcgtcgaaggtcagttcgtgattctgagtttgtacaccttttcgtttcctctgttggcactcgaattttccaggaagtgaaactagaatttgattctgcgtagtattgaacattaagataatgtctggaagaaatcgtggacctcctcctccatcaatgaaaggtggatcttacagtggtttacaagctccggttcatcaaccgcctttcgttagaggcttaggaggaggaccagtgcctcctcctcctcatccttctatgattgatgatagtagagaacctcaatttagagtagatgcaagaggtcttcctccacaattttcgattctggaggatcgtctcgctgctcagaatcaagatgttcagggcttactcgctgataaccagagactggctgcgactcatgttgcgcttaaacaggagttagaagttgctcagcatgaattgcaaagaataatgcattacattgattccttgagagctgaggaagagattatgatgagggagatgtatgataaatctatgcgatccgaaatggaattgcgtgaagtcgatgctatgcgagctgagattcaaaagatccgtgcggatatcaaagagtttacttcaggtagacaggaactaacgagtcaggttcacctgatgactcaagatttagctagacttacagcagatttgcagcagataccaacgttaactgcagaaattgagaacacaaagcaagagctgcaacgcgcaaggttttgaccagtctcttttttaagatttgcctttgttcatattgatgataatgtgtatgttaagctgtgatttctgttttgtagagcggctattgattatgagaagaaagggtacgcggaaaactacgagcatggcaaaattatggagcataaattagttgcaatggctcgggaactggagaagcttcgagcagagattgctaactcagaaacgagtgcttatgctaatggtcctgttgggaatcctggtatgataaacttgaataagtgtaaacctttataagcagtcaccacaatgcctattaaatgcacaagtagaaaggaaaactaataactagcaatagacagtcgatcaacagttgaatgcatatagcaatgttaatcaaaaaacatggttttgatcaggtggagttgcttatggtggtggatatggaaatcctgaggctgggtatcctgtgaatccttatcaacccaactataccatgaatccagtaagttataaaattttgactttttatatttttttacattgcgtgtgcatagtagatgatatgtctgaacgcaccataattctctctacacagtttcacactttgtttgaactttgaatttaaaccgaatttcagtagccaatagtacagcctaaagttcgaacaagtcaatctgatgtaaaacggaactggcttaatcgatttattagaccaatctaagtcaacaatgtgagctgatgtcgatgaaacctgtgacagaatatgtaactgaacaacatctatcttcatatatctcctattcttgtagttttaggtgcatacattcatacacatgtaaagtaatgtgctgatatgataacaatgctggttcaggcacaaacaggcgttgttggctattatcctcctccttacggaccacaggctgcgtgggctggtggctactatccgcaacagcaacagcagcagcagccgccaccacaaggacaaggacatcgatgaaaaagtcaagattcaaagtcaaagtcgcccatttttcaagcgactctcatgaaattgaagcagcctcccttttgtatactctgatagtctctgatagattgtgaacaaagccaacatattaaagtgttgttaagtaagaaacttggaaaccacagtttttttaatttaaataagcccattaacatcttcaatggaccgaataaaggcccataagagaccacctccctcgctctttttaacaattggcgggtaaaattctaaaattttagtttcagttgatgaaccaaaaacagaagaagaagaaaattancgaaattttaaaatcggaacaaatttcagaaatttggcgcacaaagnagtccattggcgggtaaatatcaatttctcatgcctttaatttctccgagatctacgactgttccattcacacaaacccagagatctgaaactaagaagccatggatgctcaatatcaagatctacctcctctcaaaagattaagactgttgcagagagatctcgaagctgctcaacagcaccagctaccgaaccaaccggagatgaagtcgttgcagttgccggcaaagaagaggaagcagactcgtgttgattatgacgatgacgacgcagagaactccaatcccacctatcattgtcttccggcgaagaaaaggatctgggcgattgatcccgatcttctctccggtggtggtaaccccttttcgccttttgatctaaatgtagagtataagccttatgttgaagagaaatcaattgagaaaaagtcaactctaaatgttgaatctagtctagaggtagaagaagatgatgataaagagaatatagatcctctagggaaaggaaaagctttagatctctctgatagagaagtagaagatgaagatgggattatgtgtgctgtatgtcaaagtacagatggtgatccattgaatccaattgtgttctgtgatggttgtgatttgatggttcatgcttcttgctatgggaatcctcttgttaaggctattccagaaggtgattggttttgtagacagtgtttatcgtcgaagaaccgagaaaagatcttctcttgctgcttgtgtacaactaaaggcggggcgatgaaacctacgaatgatggtagatgggctcatattacttgtgcgttgtttgttccggaagtttactttgaggatcatgaaggaagagaagggatttgttgtagtgaggtattgagtaagagatggaaagataggtgttatttgtgtaaggttagacgcggttgtgttattgagtgttcggagatgagatgtaagttggcttttcatgttacttgtgggttaaaggaagatctttgtattgagtatcgtgaagggaagaagagtggtggtattgttgttggtttctgtaatgagcataccaaactttgggaaagggtaagatttgtatccaactttcttctgatctgtgtagttgtggatgttttgtatagggctcaatttttgatggtaacttttttttgtcagcaacaggaaagtggaaagtacaagattgttgccagagaagaagataaaaagtaggagaaagctcaagggccatgacctgaagaccatgctttttttgcttgcaactctgaagcttccactcatgtatttgattgttttaaaacgtttgttcttcttatttatctgattagtgagagtagctgatcctaaatgctatcaagtttattatatttttgtgaaagaaatgttgtgtttcaatctttggtctatctaatttcacccttcataagaaaatgatgtagccgtctcgaaacaaactctcgatacatttcttacccgaaatctggttaacaaaacgcattggtgtcgccgtctcgaaacaaactctctgacaatcagaactgaaacaacggaccaatcactttgtcttagctatctaaataagctcattgcaggtccaacttttttcgcgcagatttgcatccaaaacttcacttatgattcacgaaacggaaaaaaaaacccagaaatctacagatgaagaaaaaatctgaaaatttttgccaaaaaaaatttggaccatttctcgatttatgcgtgtcatccttgcgcaggggccatgctaatcttctctgtatcgttccaattttatcggatgtccccgaagggacaatcactacttcgactctaaccatatataaactcagcttcgttttactgtataagcgatgtgggactaatatgatgttatctcttatattaaaatgggcctctgtttctgattctctgttagcccattatttcatttatgggcccaatttatcgtggttaagaatcaaaatcttaaaaagtgtaaattagcttcaacttttactgctcaggtttctcaagcgattaatttggatccaattccataaacgatattaataacaataaggttcattcgcgagagtacctttaccaagaaaattatatcatttccaggcttcagcaattttttttatattacgagcaaaccaagcatcaacaatttgattacatggaaagaaaaatctcacctacgactaggagacgaacaagtatacgaataaaagatcaacgaacaacaatttgacgtgcgatctaattaagttctaaactagaatgattaaggacaaatcataaatgtaggtggtagtactaggactttgatttagtttgattgttactcaactccattcattgtgctgcttaccataattgtgttattatttaattgtatcgatatagatgcaaaagagacaaaacacaaagtgaggcctgggcatttcggtttaatttcgggttcggtttgggttcggttcggttcggtttatttgggttttgtaaaactctaaccatagtcaaccgaagttagtttggtttggtttgtgtttgggttagttctaggtcggttcagttcggtttggatcggttttaattcagttcggttttaatctggttcaaaaaatcaattaacgtaacaagttcaaatcaaaattattaaatgcctagtacttagaatttaaaagaaaggaaaatgcaagaaatccaacaacgtaacataacaatcttccatgattccttcacccaatgtcatcaagaagaatctgcaacaagtcaataacttgcatataagtttataactatataaagacgaaacgaaaacaataaaaccaatcacttcttacactgaaacagagtattaactagaatattggaaaccaaaacagagtataaactattaagaacagaaagaaaaaaacataaattaacaattttaaacttttcaacaacagatagcaccaacatcgtaaaactaatatatagaaaggaaagatcattacctctttaatctttttctgctcccactaatcgtttacttagacatgtacctatcgctctcacttctcattctgagatggaggattaaactctaacaaaataaaataaaaattagacactaacatgaacagagagtaaatctataagtgattgtcacatataattattataaagaaataaagtaaaataccttcttcaagtgaatccataaacttgttctcttcctctagcttatcaagagacttcattgcttctgaacgaagtgaagcacgtaaccaatcttgagtcaaaaccaacgcttcaaccatatcaggagtcaaacaacttctatattgatctaggatacgatcacccgtgctaaaagcagactccgacgcaaccgaagatactggtattgcaagaacctctctagccattaaagacatgattgggtattttgagctatttgtcttccaccaatctagaagatcaaacgggagccccaaactattttcagtagttacatgcagttcgtcttttaaatactttaccaattcatttaccactgctatagaagtcttcttagcaaccataaattttagaaaaggatcatcaatgttgtcaacctccatattctcaaagtcttggtgtacttgggttacgttctcagcgtcacaggaaacagaaggttgtagatttgaagtggcatatcgaacactatatatgtcaaatagtttctccaaaacatccatcacgagttccttcatttcaacgcattttggattaccttttccatagataagttcaaaactgaacattgtaaataccattttgcgacgaggatcaagtacaccagccactatcaatatcttattgattttttctgtaccttcccaatatttgtcaaacttggccgtcattgcagaagccatctctctcaaatcagaatcttggctaaaagccattttttgcacacttgactgaattttgcagatctcattgtaacaaccatttgacgtcacctttatagaagaagagaatgctaaagtcgaatcatagaaagctttcaagaaccttaccatatgacgagcattgtcccaatcaattgccattggaggtccgtccctcttctttttattagaatcaacctctttgaaccatgcatcataaggtttatccatatcagccatcctatcaaatgcaactttatacttaagtgcacttttcaacatcaagtaggtagaattccacctagtaacacaatccaataccacacttcctcttgttatcttctcaacctccacccaacgcttaaatgattccagccttgaattagaagacctcacatattttacagcattacgaacacttacgatgctattacttatatcttcaagaccttcattggcaatcaagttaagaatgtgtgcaccacaacgtatgtgcataaaatcaccattcatcatcaaagcatcactatttctgttacttagcctctctttcaaaacagtaatagctttatcattggcgcttgcgttatccactgtgatagaaaatactttctcaataccccaatcatccaaagatcttaaaaactgattggcgatggtctttcccttatgatcaggaataggactaaaactaataattcttctatgcaattgccaatccatgtcaataaaatgagcagtaacgaccatataactcaatgtcctaatagaagtccatatgtcagtggtaaacgacatggcctgcctatttcgacttaaaatagtcttcaatgcagttttttcaactctgtacagaccaacagcatccctagtaattgttcttcgcgatggaatagtaaaccaagggacagccatctcacaaaaatgtttaaacccatcattctccacaaaagaaaacggcaactcgtccatgataatcatttttaccgttgcttgcctacacacgttttgatcaaaaggttttatcatgccagcaccattaccaccaccactagagactatgacattctgagaattagattcaagatgatccaaataagctttgcactttctcatgtgtgtgttcatattgctggttccacatgtagcaggattacatgaatagattttaccacaataattgcatgagcaactattatcatcatctttcaacctcgtaaagactttccatgctgttgatcttgtaggtagttttctttttgcctttggcgacactgttggagactcgggttcttttcttttattgctagtcgtgtttcttttagacatctacaaacaaaacaatgaaacatgtataaaattgttagtcaattgaaagaatacaattacgtttctattaaaacatctttcattattagtaaactaaataaacatgtatgatctgttttcttgcacgaaaatccattgattattggtatgaatgctaagatatattatatatattgtaaacaaacaaaatcacccaacctacatgaaacctattcttaaaaattaaaaaatctaagtaaatagaagaaacaagacaacgcaaacacagatttttcttttccatgactttgcggtgtacgtacagattgaaaaaatcatcatatactcataatatttaattaaaattgagatgagcgtaattgtattgctagagagtagttaaaaatcataccgtggctgtagagagtagagagagacgacggaagaacaaatgaaacgaagttagaagtaaaccttaggtttttactttttagggttagagttttagttagagataaataaatatttagagttatttgtaatattatttatagaattaattaattaagtatataaagacattgggttatcggttcggtttgattcaaaaccgaaccgaaccgacccatttggattgagataaaatacaatcgaatagtttgagtcttagattgggtttggtttgggtcggtttgagttcggttgggttgggtcggttcggttaaaatgcccacccctactttcccatcatccccttgacaaattaataaccaaattagtcataatccaatctttcaacatgaaaaccggaatatgagggtcaaagcggacccattaagagaaaaggtgggtcagttgacacaccttaaaatacaaataaagtttaatgcatgaaatttattaaagagataatagctaagttggtttatcatgtgtcattgacacccccattatccaagttcaattcttccctatgcactttttcgtaaaaaatttctttttatatattaaacgaaaaaactattga

SEQ ID NO: 34956 - DNA, 2008 bp, Arabidopsis thaliana landsberg
  unsure (1)..(2008): unsure at all n locations
ccaaatcccagtcttcttcaacaaatatgttctgaaaattcccattgctgacggtatctagaagcattctgatgtgtggtaaaactcctctgtaaagagtgttgagcagagaggctttcttgaaaccatgataagagaattggttggtgtagcccttgaaacactcccatgcttcatagaagctttcaccagtcttctgtgaaaaaccagagatctcatttctgagtaatcatcccaggtggtgattgagtcatgcggcagattcttctcccagatgtgtgctttgtcgcccaaggagaatggaaacaaccggagcttgaatccgtcttcactgacaccggaggtggtcgagtggatcctcaattgggagaccatggaatttgttctcctgaatcatcgagatgacaccactcttaatctcgaagttgttgttctcgatagcaggaggtgcaattcctttcctgtgatgatgggcccgtggtgcatctctagcaccaatgttggcagggccattttgttgattttgttcgtcagccatttcgagtgggtaagtggaattaggttggttgtgtttctcctttctgtgagttcgcgagctatgcggtcgatgttgtcgttgaaaaggaggttttgattgcctgggagcaaccgaattgaaaattgaaaaagaacttgatctaagcaagtctgaaatctcaaatgtaacaaacaaacacccaattggcaacggcgccaaattgataataggcttttaagatcaattaatcctaaagcactatcatgtcgttgtnnnnnnnnnnnnnnnnnnnnnnnnnnnnnnnnnnnnnaacaatcaagatgtgatcagaagtcactaagtcaagccaagcaataacaggttttggtgtgttctagcaatcctaagtgaacatgcagaaaacagaaaatcaagcagaaacaataaaacactcgaccaacacagctctttgcagagcactgggtgaggttgagtgacaggtcgagtaatagacagaaaataaaacacagatactcgactgcacagtctgttgccagacaactgggtggtcgagtacgaggtcgagtaacaagaaagaattgcagaaattaagcgacagataacaggatgcagtaaaaaacagtagagtaaacaaagaaatcaatcaggtaaagaattcccgaggatggggtaattgagtagtttcgtttcctcagtttacaggtgattgacatgctcaataaattaaccctagacaacaagttcattaaccaaatctaagtgccaccgcaacagagactctcaagttaagctagtcccagactcaatcaccattgacgagagctaacctaacaggcattacgaatcaacaagttaaagcagcgatcaagttatggtcaggagatactcgacttccaggttgaatgacgaggtcgagtagtggtatggcaatgaaggtgaagacactcgacctcggggtcgagtgatgcgatcaagttatggtcaggagatactcgacttccaggttgaatgacgaagtcgagtagtggtatggcaatgaaggtgaagacactcgacctcggggtcgagtgatgtgatcgagtgatggtcaggtgatggagatgaagacgctcgacctcgtggtcgagtggtgaggtgaagttatgatgtcttctactcgacctgggggtcgagtggtctcttgagatcttgaagctcctactcgacctctgggttgagtggttttgtcatgatcatgtccgcttcttccagatagctcgtcaacagctccaaatcacctgaaatcaacgcaaatatgcaacatgcatgcaaaactatcctaaacatgcaaagtgatgacaaatgatgtgaaatggtataaaacagtgatgatatgatgctaaagtgatgacatatggatgctcaaaacatgcaaaatacacacttatcaactcccccaaacttagtctttgcttgccctcaagcaaacaatcaaaaacaagctggaggtga

SEQ ID NO: 34957 - DNA, 3716 bp, Arabidopsis thaliana landsberg
agcttatctgaggactcataggagttctttggttcacttgctggggactcattggagttctctgactcatttgctggggactggactgttgtagctgctgttgggtaattccagctgatggtgaccctacttggggtggtgatagtacagactgaagaggggatgctgttgcctgctgctgctgctgtgcttgttgaggctgttcatgttgttgtagctgctgctgctgctgcggagactgagctagctgctgagatggctgagacataggctgctgtaactgttgctgatgctgcaactgttgttgttggggttgctgctggagttgctgctgctgttgttgttgattcatgtaaagattcatcattccaggcatcagcttgggtgggcccatgttacccatagcagcagctcgctgcaggttagctctgttctgatccaacatggaaagaccagctgagctggggtgcatctgcctagtacctgacacgccacttatccccgtttgaggagcacccattacacctcctcggtttgccatgcccatcctaatctgtgtaaacagagcgttttgttgtggtgttaatgcaccagatcggagttgctggcttatagcattcaaatttgatgctggattcagattcattgggttttggcccatattaccgatgccaggaacagacattgacgatgagattccggttccccccatacctcttcctgccatattcaaatggttgcctaaagctccaagcccagcaatactatttcccatgcttcccatacccatacccatgcccatacccatacccatgcctacacctgatcctagccccatcattatcttcttctgcactgccgcctgctgctgctgctgtaacatctgcagttggagaggcgaatacttgttggccatctgaccacccggctgcataccagagctctggctcatcgagttgatggctgatagtggatttgtaggcagtatcatggaaggtctctgcatttgtggatgctgttgctgtgtaaacattgactgttgatttttctgctgtgaatgtgatgacagtagcgctgactgttgtgggtcaagctgttgtggttgcataggcatggagacaccagacagcagtccttgagacatttgcaaggcttgagaatttgttggaggaaccatccttgcatttgcaagaatattctgggttgagttattcggcgtatttccagtattcccatgttttgatgcctcaccagacgcttgccctgcaactgcatctccatactgttgcatatcgtttgcagaataacctcttggataaccacccgcagaatttggatggctgctgattgggccagtatccccacggtttggctttgccataatatgttcttcaatcatgtatccttcacgggccatctgcataagcatataaatcaatctttaagtagctttaccatagaaccaggaacatgaaataattgattcagaactcgagaaataccagtgatttaaattgagtagcaagtagatcggcgatgtgctgtgacaaagtgaggaataagcaagtcagcatagcttccagaaaataagtggcgtacataagagaaaaattaataatccattgtccattcccttttgatcgcattggacaagaaggataaacgagcataagcaactaacaagagagaagtatccatagaccaaccaaccatattcataattacacaaaacattcacaacagagacataaaccccaagaacatgacccgacaacctataaacatcactaaatgtaaaatcaacattacattgaatggtagtgcatgcaagttgaagatatattgctgatcaaaaaagaatgcaggggagtatgataactatcaaatttcctgtgaacttactgtattgggcaacgctaagagaaaatcttcagcctgaaaaacatccccttcatctacgtccccttgataccatgctactgtcccatcgacggccttctctgacatcaccagtcttgttcggtttctagggatgaaggaagggaccgaacctgaaaagatactggagtctggtcaatcacataaagaaatataccaatagccagatatctagttaaaagaaaaacagaccttgcattacacgttccatctgaccaaagtgaatgactctggtcttgtatgtattcatactgccaccaaatatagattttgataatgcttcgtcctcgtctttgaagacctcttcgttagacaggtttgataaacaaacagtaaggggctgtttagcatacacgcgaggtcttcgagagtactcatccaccttatgctttttgcagtttagttggtacctaaaaatggaacaagaaactggatcaaccaaaaaataaaatctatgaaatatagaacttgttcatgcaccaacaaacattatttatttatataaatgcaatgatataaggagaataagacaatgccagcaatgctctagcgtaaagccagaatcaaaacaggagaagtatcacataagtgaaagtaaagatcataaaaaagaatttgaagggaataaaatcaacaaaccaggtttcataacattcatacctagcagcaactcgttcaatctttgaaaatctgtccaagattgcgtgatcgcccaaagtttggggtcccactgaagggctccttgcattaactgggacactaatagtattgacactaacaggagaaccaacagtgctaataacttgcgtcttaggaagagaatttgttctccgttttgcagccatttgggcttggtgttgcctttgctgcatagcttcattagcactagaacccactgactgagtagcaccaatagcaggaatagaagtaacagccttgtccttctgagctgctgcaactgctccatagtgggtccccattgaaccaccagaaaactcaccagacttcgatgaaagtggggactgcggtggaccacctgccgacaaacgaggactttgagccgatatcctacgactaaattgttcttcttttttcggctctttttcaatctgctggccaggattaacattccaggatgtttgagggaaatttgatctaatgaatgcattatggggcatccttgactgaatacgtggatctaaatcatttgcatcacttcccacccccggaatattgtttctggtgccgccatcaattttaccagtctcaaatggctcctcttttgaagtgtatttcattcccccctgttgtgaagctggaaattgcatgggaccaccttcctgattcataaccccttccatttggtgtggtgaaaacctctgaatacttgtatttggatactgaatacttctgcctagcatgtcttggtgttgtagaagcgtatttttccaatttgtatcggatccatgaaggccatccatacgttgccctaactgttgctgcggaaccccatcaggacccatatgtgaaacccttgttcgcttattcaagccaggcatagaagacatttgtccttcttgactttctctctttctatgaaaagatgtaccagggttcatactatcagagccataaggcagcatcgcatctagtccaccaggcgaagcgccagagacccccgcagaattcgatccttgatcctgcgtgtttcttgaacttccaattcccatgtacctttgttgctgaggtggtaccaacgccagagaggaatttggtgc

SEQ ID NO: 34958 - DNA, 8808 bp, Arabidopsis thaliana landsberg
  unsure (1)..(8808): unsure at all n locations
ataaaaatgatccgaaagcgatgcatgacaacgtagtgatgcatatatccgaattacctttttacgtcctaaatgccaaaaatatgtggatattaaattgaaatgagtaatgaaataatgtaacgacaagttaaatgattctcccatctagaaaagttaattaaggggaacaatacaaagcctctttgacatcgagaagttagcgagcgattaacaacatatgattaaatagttcaaaatacaactcccaaatgtgagatggacgctatatacgaaaattacggacgtgcatgagtgggaggtttaatcagaaagtttgttgcatgagagctccaccaatttgtttttttgtcggacaatatcatcaatctgaaatcgggaaatatgtgtttatctatgcggggaatatacatttcattctttgaaagtatgtttctaactcttttggattgaaatgtatattggaaatacttattcaatcaaatgtgacaaatactcctggctactatgaatattggttactatatctttatatatagttttttttttttttgaataccagaaggttctggccgaagcccgtaatccccccaaacccgaaatcacagcatgtaatattaattttgtcccaaacatcatatatatagctattaactaatctatatatacatttttgcagccattttgtaaaataaatcctggagttggaacttatttacaatggctgccattgacttttaattattgtttttttcagcaataaactgattaacaaacgaaaaacattccaaatatatttcaatctcatatatcacgcagatttttccaaaatttgaactagatttcagcaactatttaaaacaaaaaatgtttgacaacccaaaagacaattgcaatcccttaaaatgagcaaacgcaactaaatacatttcttatcaattcactaaatcttatttctccaaaatttgaactagatttcgacaactatttaaaacaaaattttgtttgacaaactaaaacacaatcgcaatccataaaatatttattttaattataaatttcaactagcggggtaccgcggtttttttttacaggacggatttggcggaacgggtttggaaggacgttacttaataacaattgtaaactataaaataaaaatattttatagatagagataatttgcaaaattttatatatactaatttaaataaaataaattgtcttcgcggtgtaccgcgggttaaaatctagtgtatatacattacatagactcttatattatatgttacctgatgcttctctttccaccttgggaagaaactatttccaagtaactggaagagatggtctctcatctcatcgtttgttactaacaaacatttgcaacttaccgcagcgtaaagccaatacctagaacaatttgatttcacataagaaatggttgtcttttttggattattcatggtcaatgtaattcatagacccagaaaaaaaggcaaatgcaaataccaatcatcgtttgagccaggaggggtagcatagagagcaccagcgtttttccatttctctagcaaggctctgtttttagggtatgtagctggacctccatttacacgactcttgtgcaggatcacaagtggtaaccttttcgacgggcttatttgttggcatctttggacagtgttgttaagctagtggggagagataaagagtcgcattagataaagtagtcaaacaatggttcttgagattggcattagaatgagaaagagtcaaaaccacctggaagaagctgaaactgcgctggttgactaagcccatgttggctccatcaatgactgcatcaaacggtccatgtctttccagccattcctgcaagcaaaaaacaacaacacatttctcaggttttcttttagatagttttaatacaatcttttagacaataattgttacctgaaactgattaaaattagccttgacttctctttcacatgccaatcgggtcaacgatgcagcaaaggtttctgtctcaaccggattgatatcaatacaaacaagcttctctttgcaacatttacatacaccattctcatccatctctgttcttttcacattccatttgccagtccccagccatccttgtccatgccacccaccaccaccactcacaaccgcatcccttattttcttcacatcccatttcttcactccagtttttgtagctacttcagatttaaaccactcctcaatcatatcaaaagtcgatttagaaacctgtctcaccaaatctctcaatcgctgcaacgtcttatagaccttgtctgcattctttgtatccatactaactttcaaaagagcagcaagctcaggttcttcagggactacctctgattcaaccatatgcgcatcgacttcataagctttgtctgcatcacctttcctacagaaaccaaaaagggcaggtccataggatctcaaccttggttgaataccaaaggctttcatctgtttcaccatatcgaaagccatttccgggtcatcctttgcaactgcgagtctagcaccgtttgtaaatgtagcttcattgggaacaactttatcaacaatcatctgcttaaaaatatcaaaacccctactaagccctggatttggagacgactctgttgctgcctcagccaacgagcatacataaagcaacacattataatggtactggctaagctgcacgccattgcgtcttgcctcatcatacaagcgaagagcttccaagacatcacctttcttagagcacatatctagcttttgtttcagcaatgcttcaggagactgttgaatagctttcttcttcgctttcctcgataagttttcagaaggagaagctgctgattgtttagcagcagcgagaggcaatgtacatagatgtctgctacgctcaacaagtataagacgtctatctctggtgcctttcacaagtgaggaagtatggtagaaacgaaatggagaaaatctaggatggtggagatgaacagatgggactttgagcatcattgcaaataaaggacaacacgctcgagaaaaagaaggtgtaaaacaagttaaacgcagcataactttgctctcaagcttgttgaagaattaattctcagtcgaattcatctgcaagagacaggaagaaaatattcaagaattaaaaaaatgagctgtttacacttagtctaagcatctaaaagctctatagtctatacattatcgagaaataaagagcaataacaacagagaagacaaaattgaaaacctttgatatacgggcaatttacaatatatccgaaacaaagtccaagaacaaaactttagatattggttatgtaagaatgtgagttagtagtcgataaaaaggagtagaaatgtgaagaaacatggaaattgttcattgggtaatatcgtcgaacaggttgaaggcaacacataagaattttgagaaaaagaacttacatcgaaccagagagaaactttctttctggtgggaaaattggaaaagataaaaagacgactttggtcgacacagcttgtccttcaggattcaccatggattatctccaaggttaatagattgagatataagagtgtcatgggatagagattttggatgctactttctaacgacgtcgttttaggtactctgtttatttctatcctgtgaagcccaaaaacggcctaatatttacacattagggctttagaagaaaacgctagggttttaaaaattgggttttttctttctccttttcggcttgtcaattttgattttgggttacaaacttactgatctagataaaacccagaccggtcatggttccgtcttgtgtttacaacattgtttagcgcataaaacattaaaagaagaatgataacaaacacacaagaaatcacttccattttaacgaatgaaacatatttaagagtattacaagtaagcgaatgcacaagagagtatatgacaatggaacgtatagctacctagtatctatacaagcatgaaacagagtgtgaatgtcttcttatctacagaaaacctttgtgatgaatatgcagcatgatagatccttcaactaatggtgatgatgatcaaagaatgtgaatgtctaacaactgcaaaaaggtagcggtcaccattctacaagagcttgtagtagcagtcacggcctgagaagagagtttggtagtttcttccacatggacagttgatctcaaccacaaaggcctcaccgagtctgttgaccttcacaccttctttgcactcttttggttgctcctcttgttgtactacctcatctactgcctgcaccgcaacaaacaatcattgtgctcaaaaacaagacttaaactcagaagatcataagagacaagtaagtgagcaacaatcattgtgcttaaaaacaggactttaactcagagattagataagagccaagtaaatgaacaactcaatgaaggacatgtttgatagaccaatacgattgttccaaatgcatttcaccagcaagattccattgagattgtgtgtcaagaagattctcgaaccttaggactgtcgtcttgtttcacagagccagaggagactgcttcaccgtacttaagaagcttgttacaccattgatccaattcacgaactccatccttgataatatacagcatctgccattatcaccatcttgagtaagcttacacacaacagatctctacttcgaaagacacaaatcaattttatctctgtatgatcaatgacatcaacaagaaacttaaacttcgttctcaaatcgcagaatttctcaaacgaatcagataattaacatagcaaaagatgaacagagccaaaaggcaatagaagctttcgaaccttattggcatcagagctttctggattcgcgagatcaccttcaggaattgcattggagcgagaagatccaagaagagacttggaggacggtgccggcgaaagatcagagacggacctccggaacatccgtggacgtggcgggagagaagggacattacccgaaggaggtgatgtttcttgagcgacgctgttacgggtataacccgacccacccgacccgaatgtagatccaacgggcgaagcaaatgtatcggataaagatcgcttgtaaagaggagaacggatttgcgtcggattgaattcaaccacaggaagcggaatctttgaatatcccatgagattcgggtcttcttcttcctcaggtctcggaataaacagcttcttgcgtctcggctcgtcaccttgcttcgattccggcgatggacgtttcacgggactggttgttgcggtggttgaagaggaaccgaaagatccgtacgatttgaattgcggaggagaggaattcgcacggcggcgatcagaggagtttccgaagctgttgagacggaggagggagagatcaatgtcatcttcttcgggatcgtaggagtaatcaacttcttgggaattagcgattagggtttctagggtttccgccatgtttagcgtcgccatcttgatctcagtactgttaaaagttcaaatgcgaaagagagaaatgagaagttgatgaagaagacgatcactggagtggggtttatataggcgaatgcgggtcgattgaaccgggtttattgttaaccaactggtttagttggataattatcaaattaattcacctttgatttaatttaatacaatatctggacaattgcttgacctacaagcaagggctggtacaacaaaatctcccagacccggtaaaacaaaacccaaccacaagcaaatattagcagagagagaagcatattcacgcaaagcttcttagttctgctatcaaaattcaaaaacccccaaaaaaaacaaatgaagaaggagagatcttcatttcagatatgaacatcatcaagccacactgagaagacgagactaatactttctcccaagaattataccgatgataacagagatcagcgccactccagtgacgatcttcactgtcatgagatgtgaagttgatgctgtttgagtaggagtagtaacattgcccgaagacgaagaagaagaaagagatgcttctggcttcttcttgctcttacgtttcgttggagaagaaaaggataagtcaatgtctcgagatttgacacctacatccattgcctccgtttcctgcaagtttggtttttgattataagcaagtatgcgattgagattttgacaaaccataatgcaaggtttctgtctctaattttatggatcttatgtcattttgtccctctagatgttataatatatgcattgcatgtctgttatcagtcaatcaaagttctgatgcagagatattatgactaaccttagttttagcatctgcgagctgcactttctgttcaagatctttgaccattgattcaaattcagtgacagcctttttcttagcttcaatctcttcttgtgatttctttaatgcatactccagctctgattgcttctgggagtgtgcttgtttctatttccatggaaacgttttcagatcttagtaacataatgagggaagatagattgtcttctttttttttgttttaatcatcaaactaaagagttctaaagaaacccgaaaaggttatatctgagataaataaagctgaaacaaaagaaagaacattaacctgttcatcaatggaactctgagccgcttgaagctctttctgaagctgaagcacttgctcgttgagcacatctcgttcaccagcaatatgttcgtgttcctgcagttttgaggtcaattccgccacttttacagacgcagtagctgcattttccacctgtaaaaacgtcatcaattagcaaccaatatttttacctatggattcttaattatgatattgataatttcctctgtctgagaagaatgcactacattttctttcaactgagctttgacctctgacaaagttttttcaagttcttcaaaatgtgattccagaacggacttttcagcagccactgccctgagcttctcaatctcggagaccagagtatcagctttagagctctctacggttagttgttcttcaagcttggcaataactgattgcagctcctccttggtactctgaaacatcgcattgacttggttgttctcctcagtgtgggaagaaatctgcagcacaaagtggtgtcatattgtattatagacaacaaaactgtgacactgtagatattaacacatgtttagattcagggtgttacctgtgactgtaatttctccccttcagaggtaagctgctttgttagatcttctatggttgtctttgaagcctcaagctcattggctgtttgctccttctcggcctccaaggcagagagctttgtctgcaactcgttggcctcagatccatgattggctagttccagattcaacttcaaattcacctcggccaaatccccactttctttctcaagcccctggcatttggccccgagctcttcaatagtagattcaagattcttcaactttgatagcgcatcttcaagctcaacttttctagtgtccgcaactcctgatgcttcatgagccagctttttgtactcctcgatttggttttcatgtgtttttaacttttcaaccaagtcactagattctgtttctttctgattaaacctttcgattgcctcttctaaccttttcaatgcagtttctttctcgacagaaccagaacctattaacccctcaagctcttgaattttgatcctgagttggttgtttgtctctgctagtagttcactctctgatgatgattgcaaagatttttcttgtgcctgatcaaactcctggttgagtttttcattaacagattctgcagctgcaagccttcccaaagtctgttcaagtttttctttcaaagaagaagatttgccagatgcttcagccaactgctcttcatatgattttattttgccttccaagtctctcaacttctcagtcaaagaactggcctctgaatctctgctagtgaactcctccattgccttttgaagtctatgctctgagtctatacttaaagactgatgcaaagcttcaagctcgatacgtttcgtagtagcttcatctatttctcttcctttctgctcaagactctcttcagcagacttcagtttctccattacttcactttcccgtaagccagcagctttcagatcattttcaatactctccaactttccttgtgtgacattcaattcattcctgatactttctaacagattctcagactcactgatcttcacgctgtactcatccactgttgcctctaatttctttttctcactcgtcacagcgttcagattttctgtcagttctttctcgttttcagttgcgatgtttaaagcagcttcgaggcttgaacttttcacttgaaatgcctctagtgtggattgaagctcagccacctgacccaagtaacctttagaatctgcttcagtttccccatgcttcttttctagcgagctaacctgctcctcaagttcctgaattctgtacttttctgtctggagtagaagctccaagtcttttaatcttccttctgcgtcttcatgttttgactgtgatgattgacaaagaccttctagttcaatactgcgctggtgagttggattagctcggtcttcatgttctgcacccttctgcaaagcgattctcaaatcttcttcaagctctgaanttctggccgatgattgggtcaaagacaattccaattctgatgcttttt

SEQ ID NO: 34959 - DNA, 2872 bp, Arabidopsis thaliana landsberg
tatacacaatgcaacacacacttcctgagccctcccccaaacttaaatcacacagtccactgtgtgaatagactttgaagagagtactcaggacaaatccaatcacaaaaacaaaatagagaacaaataacaacagatgatataatacaatggtgaagtgaggcgcttacctcagtcgcagaatgaatggagttggtcgtcgatggctgcctgtgatgctcccaggccatagacgaaccgccatgttccgtatcagctccagcaggtgggtagtcgacctcatcagctctgtggcggctagcaccgctctgaggatactcgacctctcttcttctgctgcggccagcaccgcggtcggcataaactacgagacagcaaaagttgtctactcctgctgctagatcgagtgagtgtggtcctcctcttcctccctgattcacgaggttcgaatgatgaatgactcgcatggacatgcgaaatctcctgctctctaggctcaggcctgcgccgacttggctcgggcgcgtcatatctcctcgaaggcatgtcctgaggaggttgtcctcgcggaatagctgtagtggaagaggagcagctgatcttgtccttcagaaacttgatagttttgaggcatttggcgagtaacttgtcctgtttcttgcaccacttttgcagcttgctgttgttccctcgcaggaggtatatgctcactgaaatgatacatgctcgtgtcaaactccgcctcatctatatcatccgtctcatcaatatcttctgttgtagcttcttcggtatgactgatctcctcagttggtggactgccctcgaaataaagttcttcaagcgcaggcttgaagtcaatcttcctgccctcgagaatcctagtagcatcaatgcaggggagaagaatgttggcgattttaatcgatgaatgctcgaacctgtagcggtgaaagtcgccagccatgtcaaactccaagaaatcacatcggcgcaaatgatctaagttcatcatcctcggtgctaaccctggttcgttgagcggtactccacaagcttgcaaaattggcgtcacaacgccacccacgcatagtgctcctctcaccttcttctttccgttcgtcaacgcccacttcctgtatccacacagatggatcaacagaggcattactggtggtgcgttgttgagatcgccgctcaagacattctttcccttcgtccggcggagaatccctgtaagcgcataatctatcatctccatgtccgtgttagacacggtgcctgtagactccctggagtacagaacatacgctatagagcgttgatagtagcggatcacagcgcttcgaatctggttattcttcgacctcgcaaagttaagcgccatatcgttcccaatagttaaccacaaatccttcaactcttccctctcgaacttgggtttagttccctttccactggggaaaccaaacaatccttccaaactcttgacagataactggtagcgctgctcgctcactgaaaaagtcaagaaccccaacccttcactctccagctcatttgctgtaagtccctgatacatctccacttgcagagtggagagaaactctattgtttcctttttgtaggcgacgtacgggtaagacatcagtgtctccagatgatacttctcaaataagtgatgtacgtcctctagtagccccagctggactaaagtctgataacagggatacctcattcccagaagtcgttcagctcgaaaagtctgatgtactcctcaactgtaatttcatcaggcctgttcaacagcttcgtctctctgtgtcatgactcaggctcatactcgacgtcaatatcttcgtcgatcaattcgcatctacttgtcattgctctctttcctctagcaatctcagctctcctctcattgcgtcgagctactgagcgttgggtgtcacctctgaagctctcacaagcctgttgctctttctctggtctagttgaccaagactcagcttcatcgacgttgtaatccgcatccatagaggattcgctactgtagttactcatattgatttcctgagaaaaaatacaactcaaagataaacgtcaatatgttagtcccaacaaacacaagcggtcgagtataccaatagaccgaaccgatagagtaactcggtcgagtaaaccgtggaataaccaggtcgtgtaaaccggtcgagtaaccggccgtgtgaaattgtgccttgggttttcgtttctaggtggattgcggtcgagtggtggcggtgtgtccggcgaggtcgagtaatcttcaccgggaaacagcggcggtttgataagcggtcgagttgagctttacggtgagtgaacggcgtgaggtcgagtgaaagaaatcagagtagagagaagacggtgacggtttgatgagagatggcaacgatgaggacgagtggttgagagggggcgtgaacggtgaggagggagaggcgagttccttggtggccgagtcaagcttgcggtgagtgaacggcatgaggtcgtcgagtaaacagaggcggtgattggagaggacgtcgcaatcgagtgaaagagagacggtgagagggatgacgagtgaggtttggtccagtgagagttgtgagggagagatggcgtcggtgggaagagatgaggtaggatcgactggctgtgatgaagccttgggatttccttatcactaaaaacgcatggggggacaaagaggagagaaggtgggccgcacttggtctgtttgtcctgaagcattgttccctattgactagaaccttctgtaatcctctataaacttgttaaactccctacaagtctctgtagcttctgttggtcgagaata

SEQ ID NO: 34960 - DNA, 2295 bp, Arabidopsis thaliana landsberg
  unsure (1)..(2295): unsure at all n locations
ctatgtttggtttggatctttgtaatgattgtcaccagagtgtgggcatcccctgcattttcgtttacctattatgttaataaagttagctatatagttgggaaacctcttattccactttcctctttatctgagaagctgtgtggtatgtgttggagatcagtgaagatgctcatctgttcagtgttgttgaaaaattctatactcttttctcatgctgcaagatttgccagatcagttctgatgtgtggttgcattctgtagatgtcagagaacatgcgcagaggaggaaggcgtgctcagcaggagcgagccgctcaacaggaggaggtgcccagcagcagcacctgccgctcccgcccccgtatgtccatcgagcagatgtttctgatgcagactcaggcagttcaagccatctgtcagaccttggccgccattcagcagcagcagcagcaggcgtcacctcagcctcagatgcctcagatgcccagagacaagcgtgctgaattcatgagaggtcatcccccaacgtttgctcattcttctgaccccatggatgctgaggactggctgcgcactgtggagcgggagttgcataccgctcagtgcgatgacagggagaaagtcatgtatggtccccgtctgttgagaggagcagcccagtcatggtgggagtcttatctcgccacccatgccaaccccgacaccatcacctgggaagagttcagaggtagctttcgtcagtaccatgttcctgcaggtctgatgacagtgaagaaggaggagttcctggccctcaagcaagggtcatcgtctgtcagtgagtaccatgacaggtttctgcaactgtctcgctatgctcctgaagatgtcaacaccgacgccaagagacggtaccgtttcctgagaggcttggttgacnnnnnnnnnnnnnnnnnnnnnnnnnacaccttcccgacattccagcacctgattgacagagcaatcatgacagagaggaagcgtaaggagatggaggatcgtaagcgcaagatcagtggaccccagcctggaagcagcagtcgtcctcgtttctcaggcaatcaaccnnnnnnnnnnnnnnnnnnnnnnnnnncacctcagcagcatcagcagttccaaaggcagtatcctcagcaccagtaccagaaccgtcagagcaatcagtcaggaggtcagtttcagaggcagaatcagcaggcacctcgtcttcctgccccagcaaaccagcaggacagtcaggcagcaccagctcaggttggaaacagagcatgtttccactgtggagagcaaggccactgggtgatgcaatgtccgaagaaggcagcccagcagcagtcaggccccaatgccccagcaaagcagaatgtgtctcagcctggagcaggcaatcgctctcagccgcgctataatcatggaagactgaaccacttggaggctgaagcagttcaggagacccccggcatgatagtaggtatgttcccagtcgactcccatattgcagaagtgttatttgatactggagcaacgcattctttcattactgcatcatgggtagaagcacataatcttccaattactaccatgtcaacccccattcaaattgactcagccggtggtagaattcgagccgatagcatttgtttgaatataagtgtggaaataagggggatagcgtttcccgccaaccttatagtaatgggtactcagggaatagatgtcatcctagggatgaattggctagataagtatcaggcagttatcagttgtgataaaaggacaatcaagttggtgtccccactaggagaggaagtggtgaccgagttagtcccgcctgagccaaagaaaggaagttgttatcagatggctgttgatagcagtgaggcagacccacttgagattatcaaagttgtgtctaagttcccagacatgttcccaaaggacctaccaggtatgccaccagagcggaaagttgagtttgccatagagcttcttccttgaactgcccccatctttaagagagcttacagagtatctagaccagagttggttgagctcaagaagcagattgatgagctgtcagagaaaggttacatccagccaagcacctcaccttgggccgcccctgtcctatttgtggagaagaaagatggcaccagaaggatgtgtatcgattatcgagctctgaatgaggtcacaatcaagaacaagtaccccttacccagaatagaagatttgttcgaccagttgagagcagccagcgtgttctccaagata

SEQ ID NO: 34961 - DNA, 5692 bp, Arabidopsis thaliana landsberg
ctagtgattttgatgacgatatccaacgtcctagcatggtgctgaagacaccgagtcttgtgtaccttgactactccagttatgtcgctggaaactattatgttgttttggattcgctagtcgaagctagactggatcttcgattatatgagccaatcatctatgatgaggatggtttgtggaatgcagaagtttttggcaatattacgaatctgattgaggcgatcagaaccattaagatccttcacttgtctcctagttctctcgaggtcagcttcttctcttgagtcttcacatgatgcaggagagagccagtctagtgctagctagcaaggtctttaacttatttatatatggcttacacatatcaggtgttttactattgttgtgatttgccggtgttggaagatctcgttaatttatctatcgaaagtgacaaggaaaaaggctgggaagtaatgccaaggctgctcaacaagtccccaaatctacaaactttagtcgtcaaggtattatcatcttttcaagaaaacacacataaattctgttccttcttgtcattatacatgtcaaatggtggtgtggtttcagggtcttgtgcacagagttacatattgttgtggagacgcgtgcgcttgcatccgtatgaaggacagggagatagtatcctgtttgtcgaggtgtcgagtgaaggtgcttaagattttagggtacggaggaagttttagagagctgaaacaaatgaggcattttttggggaagttgaaatgtctcgaaactgtgaaagttggcgttaaagagggcagcaaaaagagtaactacttggtagctaatgtaatggctctccccagagtttcatcaaaatgcaagattcaattcatatgatttctccctctttctctctcgtggttatgcatttgtttaaagtttagaaatttgtttttgcaaaagcatatatgcattcttctcaaaattttcgtttaagagtttcttacactatctaacacaagaaaacagagttatgcacacaaaaaaggattttactatgtcaaacctttttaaaaagatgatttagaaaaacagtaattatgatagttccagctgcttctaacaatgagaataatgatgaagaaatgttaaaaaaagcaatttttttcttaaggctgaaaaggttttgctgaaatggtttcgggcttcgataaggctggccctaaaacgttttttttcttcattgttgtttttttctttttctttcttcgatctaaagctctcttcttcttcttcaaacggagctctcttcttcttcttcaacctttgttcttcgatctctgtcttttttttttttatctcttcttcgattgtaagaaaaggtatgatttgtctctctatacatttcatctttcttattttgacactttgatcgattctctattttttggaatctgattcatatgtttggggtttaatagtttcagctcaaagaaatctgggttaaagtgtgtttgaaattgtggatcgattcatagattctcgataccaataggtacttgtgaatttctaagtttttgggtttttatctttccccttgttgtatatgatgtgttagaattcataagctgcagattctatctttttggttggatatgtctctgtttgaagttatatatttatagttttgaattcataggatgtggtgatacgtttgtaatctcgtgccatatctttggtttgtcaaagagagtgtgttttaatgtcaatttctgggtaaccaagtttgagcttattccttttgattctgcccggctctctgattttttaaggtgagattcctaagcatgtcaattacttttttttttttttttttaacattctcaattctctcggaaaaaaatattggagtacaataagtctcatatattgttcagaatgaactaaaagtgttgggctttgggtttttagaattaactaaacgtattggtgtttagttaattctaaaacctcttctgatttgggttttagcttaaacggcgtcgtgttggaagcatatcttgaacggacggcaaaactcggagtcggagatcgtagcggaggaggacggcgaatctttcatcgtctgtcttttctcttcttatacgcgtcagacaagtcttgaacttctgattagcactgtaagcaatcgcaacaaaagattagatctctcccatgttgaatcggtttgttgtgttatttttagctgtgatcgtcaaagttagaaccatggaacgcacttaatatatgtatatcaaagaataattctttagtattgggagtgacaagtcaaccgcgtgcgtgttgagtctaagaaataagggtaaaggaagaggaaggatctaatcttttgttgttggatgctgttttagcaatttcagaacgttttcatagacgatgaatgtgatggaagacgcaggtacatttttcaaaagattagccgttagtcccctgtagaaacccctgagaccttcatatctgcagagagagacccaaaagtgttactcagtgaaactaaccaaaaagatcatcttttcagacataatcgagaccaagaatatgccctgacctcgcggtttctctgatgacatgtaagctgtctatatatcttgggattccgttggtactaggtcgttgctgaacaagaaaagaaccatgtttatgaaatcctcatatattgtagaagatcaaaggtagaaagtaaggaagttccaggaatttagatttgagctaacaataataagactgaagaagacacgatcaattggtacctgtaatcgtgctcgaataacttgaaatggatacgtaagtagaactgcagcgactttggaggagccgccaagtgcagcgtaatctgctgagttctaaagaaaaaattgcagtggagtttgttacaatagtatacatccgtgatactggaggattaagaataaagttcctataaaactcaagaaccgcaatgtaggccattaaaaagaattactctgtaccaatagattgtcagtggattcggactttcttctcctttctttcaaatccacaatgattttacggagttcctcataagctgtgaactgaatagcaccatgagaaacctgctgaacccaaaatgtaaaccattcaatctgtaaggcctctttcgcaactaatagtcatcttttctagttccaaaactgtggatcttgtagtagttttacgaacaaacattacaagagaaagattaggatagttactaaccagtacaagaccagggacaatacccttgtagagcgccctgggtccttcctctttcactatggttctaaaggcatctgaagttcacaaaagaaacatttagaatgaaacacttgaaacaatgaaaactgaatttttgtgtgcagcatattgcaaacctaaaagccctgagtatggttgagtttgatgaagaggtgtctgaagctgtaaccttgttttgacaagccaaataggatttgtgcataaacagacctgaaagcatcattcccgtgagactgagatcgaaaaaacataggagaaatgagatgtttatggcgtctgttagagtcaccgaggcccctgcttcagcagcagaagcaaggtggagagcagggctgagtttctcatcgtccctgcctctagcgtatctctgcttggctcttccataactacagagagataatgtatttgttccagaacatttaaaacaagatccacggcttaaaaacattcaaagacctaacagaaatttgtttgaatagaaatcatgaagcaagaagatatgtgctaaacgaaagtaacactcacaaaaagaagtataagccccaggaaacagtagaaccgataactgcagggaagaagcctgcataaagccctctcaaaccctacagaagatttaacccaaatgggttgtatcatagatgatgagtcaaccacattgcatagaagaaaaagacagaagtcaatagaaaaggggataagaatagagtttaatctgggaaacctcgagacgggcaatggtgaagacagcgtgagcagtgttcttgtacgtcggcagacttgaccctcttccgtcgttgactgttgttcaatcaagtaatcaaactataaactatttgatgagttaaaaaagttcgagtttttagtcagttgcaggagtgaaaaatcagaccttggaatctcgtacgaacaacatcaagagggtgcatagcagctacggtggcaaatccagccacggcgccggcggtggcattttcccactgccacgacgccgccatcaacgaatcctcagatgtaatccggactatttgcgattgcttacagtgctaatcagaagttcaagacttgtctgacgcgtataagaagagaaaagacagacgatgaaagattcgccgtcctcctccgctacgatctccgactccgagttttgccgtccgttcaagatatgcttccaacacgacgccgtttaagctaaaacccaaatcagaagaggtttcaatagttatttgaggcccaatacgtttagttaattctaaaaacccaaagcccaacacttttagttcattctgaacaatatatgagacttattgtactccaatgatttttttccgagagaattgagaatgttaaaaaaaaaaaaaaaaaagtaattgacatgcttaggaatctcaccttaaaaaatcagagagccgggcagaatcaaaaggaataagctcaaacttggttacccagaaattgacattaaaacacactctctttgacaaaccaaagatatggcacgagattacaaacgtatcaccacatcctatgaattcaaaactataaatatataacttcaaacagagacatatccaaccaaaaagatagaatctgcagcttatgaattctaacacatcatatacaacaaggggaaagataaaaacccaaatagcacgggaagcaacaaaggccaaattctcaagcaattgatatacaaaacatgtctgaactactaatagaaactcgacatgtacctattcgtatcgagaataaatgaatcgacccacaatttcaaatcaaatatgaatcaacccacaagttcatagctacacaaaattcaatttttccagaccaacctttagagaatcacctttagagaacactaacacactttaacccagatttctttgagctgaaactattaaaccccaaacatattaatcagattccaaaaatagagaatctatcaaagtgtaaaaaaaagaaagatgaaaggtatagagagacaaatcaaaacttttctcacaatcgaagaagagataaaaaaagaaagagatcgaagaaaagattgaagaagaagaagagagcgtttgaagaagaagaagagaattttatatcgaagaaaaaacaaaaacaaaaaaaaacaattaagaaaagaaaaaagttttaagccattgaagcccgaaaccttttctctactttgatttaattagggcttttaatttatttagtgggctaggaccggccctaaatgttaagcccgttttaacatccctaggtacatatgattgtgaacactatacgggcacacgattaaccttttcatcaaaataaggtacccatccatatttcagttttggctaacaaaaaacagaaaaaaattgctttatgttcaaacatagctagatcttca

SEQ ID NO: 34962 - DNA, 10031 bp, Arabidopsis thaliana landsberg
  unsure (1)..(10031): unsure at all n locations
gagattattgccttgagaacaaaatgatttttttcccaatgaacaagcaaacaagaagttcaatattttcttgtcgaactttttgtcttcatacctttacaataaagtgattaactcattacaaataatttgtgaggaatactagaaacttggatttattgacatgatgtttattgttttagacattttatcttcatttgtaacatcgtgataatgacacatgttctagtttttttttttttttttttttttggacaaacagttatctatcaaatttgaggagaaaatattttagtgttacaaaaatatataaaaaggtcttttgtttttcaatgttactgttaaccttaaagtcaagtttcaatcagataaagaactatatgatataatcacagtcatcatacaggcagatgaagataaccattaaatcaagacgatagtcaatcatactcaattggcttcttcaataccaacggattaattaattcctcaatagctaatatatatctttttaatattttgactataccaaaatagtttagtgggcacaatttcgtaaccttctcttatttttttacacctcaaacagtcaaacgtcatcatatatataacaaatcttttgacatcatacgttattttctataataatccaaacacatcccccacctttataaatatattatgatacacttcccattattcaaagattttatagcacaattttgttttttaaaagcaattaattaactactatagtatactttactaacaacatttgaaaaaatatacaaaaattaaaattttatcattatcaaagcagtccagctgcataccattatcaaaattggatgtggataaacttaatttgataaatttctgtataacttaacaaatattaaatatgtgttaatagttatgtcaacttatgttgaagataaatccattggaccggccgtggtttttatattagtttgaatgtagctttcagattcttcctatacccaaatttcacattcaaaggttgcttatctttttaacattcaaactcatttaatatttaaatacactaactaatgacgtgagaaaacttatggatgcagcaacaaatcataagacgccacgtgacaatcttgatcgctctataaaaaaccaaacctgctcttctttggtcgctatagcaaaaataacaataaacaagataaatggagggtctaattccgttagtatacaaagccgtcatgcaaatccgttacggtaacgagtcgcagcaactttcttcttcttactacgttcgtcttcccggtgattcgggtcggtttgtaagatccgatttagatgtatcgggtcctggatctaattcctccaatagggcgtcgtcgtcgacgagcacgacttcgtttgctgtttacgcgggagtccaatcacctgtttctcgtcaggttgtcacgtgattcacacgcgctttttgaaggaacctgaagatgcgtgtgagggaagggttcgtgacttttgttttgtgcgttttttattttttgtaagttaggcttggaccggtttaataaacctgatgtaataattcggtttggaagattgatttctctaagcgtagactttaacccaaaagggtggtctcgttggttttaatttgtcatttgtgtgtgttcttataattgtataaagtttctacgaatatatttagtttattcgagaacaattgtatgaaatgttcaatttatgttttcatggtatataggttgtaaaacaggttaattacgttacaatttcctagttttggtattaatatgcaaaaattacataatatcaaacttttaagtaaattgatatttttcactaatgttaataatgaaaccaactaacaaaaaaaagaaagaacaaaccaatttctatttgtttaagactttgacagtacatcacttttagaaataaatgccataattatgttatgtgcacactgcaaaagaaaatgaatacgcacaattgactataaagaaaacgcctttagtggccatacgatttttagcattttatgcggaagaaacaaagtgctatttctccgagttacgtatgtttcttttcttctgcatctagttttttttttgcatattcatcaccttctctcagttttcttctttcaatagaattatccagaaaacttttaagagatggcagctccgattcgattctttgaactgaacactggtgccaagttaccttgcgtcggtctaggaacctacgcaatggtcgcgacagcgatcgaacaggcgattaaggtatcaccttcggatcaaacttcgaccttattattatgccattggatataaaatttaactttgacacttttcttgtcgattattttagattggttacaggcatatcgactgtgcttcgatttacggaaacgagaaagaggtaagtttgctatctacaatatatattaatatatctctcttaaaccatagatgtcatttgactggtcatcaaatgtattctctacaagagtgtatatttatgatagttttgaagggtcatggtggancaagaatctcacagtaagtgtagcctctatgcttctaatgaaagagtttttttttttggtatgatgcttctaatgaaaaaggtatatgaatgtttagtttgtgggaactaaatgtgttctgctttcttcctattttcgttgttctcacactatgattgatttccatttattagattggtggtgtgttgaagaagctgataggtgatggttttgtgaagcgtgaggagttatttatcacttccaaactctggttggtgttctgtttctaccaagattctctctggtctgcactacacacacacacatgttcatgttttttgttttgttctgtaggagcaatgatcatttacctgaagatgtgcctaaggcactggaaaaaacgttacaggacttacagattgactatgttgatttatatctggtacataacttatagcaaatgaatcttgtttacgtgtaatttttccattttgatgtgtttttgcttttgttgaagatacattggcctgcgagcttgaagaaggaatcactaatgccaacacctgagatgctcacaaaacctgatataactagcacatggaaagcaatggaagctctctatgactctggaaaagctcgagcaatcggtgtaagcaatttctcgtcgaagaagcttacagatcttcttaacgtggcacgtgtaaccccggctgttaaccaagttgaatgtcacccagtttggcagcaacaaggtcttcatgagttatgcaaatccaaaggagttcacttatctgtgagtatacttacaaattccaaaatttactctgtttttgcaagtatgaattaacgaagatgccttttcatctgttttggattgatgatagggttactctcctttgggttcccaaagtaagggagaagtcaggctaaaggttcttcaaaacccgattgttaccgaggttgctgagaaacttggaaagaccaccgcccaagtggctctccgttggggactccaaactggtcatagtgttctaccaaagagctcgagcggggctcggctcaaggagaatcttgatgtttttgactggtccataccggaagatctgtttaccaagttctctaacattccccaggcaagttctttcatctttctttttttttctcgatgaatcaaacgacaatttcggtttggtttcttgtcattattgatcttccctcctcttcaccatcttgttttcctcgaccccatcatgttgattatagatcgtcaaataatggattttaccaatccctataaatcttgcaggagaagttttgccgagctactgagtttgcgcatgagacacacggcttctataagaccattgaggaattgtgggacggtgaaatttgagataatgtccctcctttctacttgtttaaccataaaccattaaggacattgaaataaatatgttatctttttatatttaatctttctatgagaaaacactaaacacatgcttgggatttcatgatgtttggcaaatgttgttattctgcattcttcaaacaataaaatgttttcaactagttacaacttcaacatgacatagtcgatagaacctaagactatttccttagttcgcgtcgggaattttctagataccgcaaaaaaatacgtgtatgataaaaagtaaaattcaaaccttatttcaagactagggaattgccttcttctttttgattctataacctacttactgaatccaagaatcttgatcaaattagttatttctcatgaaaacttacattaacatttccttaaataaataaaaacttacattaacaatttaaaacatccattgtgaagggccggaatgaagcattatagtaagtgttcccaattattctccaattttttctcttcaaaatgaattactacaagctctcaaccgtcgattctgcatttcgctcggcgcaatatatatgcgttcacccaaaaacgtgttacttggacgttcacactcgagataatctaaatgaactcatatacactcgagatgttatataaactcatctacaatttttttgttgtcatcgttttctgatgtcttcggttgctttccttgatctgaggcctcctcttgctccaccaccggagtcttcttctccgctgactccaccagaaccacctgacccccctgaccctcagatccgcctctcctttaatgtatctcttactcagtcgccctcgacgacgagaaaccctcttcttcctgcaaagccacgcaatagttttggagtgctgcttctcgacgagtccctctttgcaaactggtttggagagatgttcccccaggtttgcttgtccttctcgttctctaattcttctaatatgggaaggaatttgaagttcgttgaatgtgtggttctggttttgtggaactcgtggttaactcaatcgatttcgatggatttagatacttttgtgtttacgtttttgctctcctctagcacccttatcgccttgttgcgatcgcttactgtagtatgcagattctctctcgatttagctcggcttgaaattgtctcatggcaacttagacatagttctttgtttcagtttaaccggccagctgcccgtaacttattggtttttgaaaataggactatcactgaagctaacactttgtctaaggctctctatgttgcgaacgtgacttgtcaggctcctaaacgtggcatacctacaactctacctcttattaaggcggctcccctatctttaccttgtattgaggttctttccaccagcattcctcggtctgaggctctttctcttgtcttacctcagtgtgaggatattacttgtttcatggacgcggcttgaaacgcgttctctggctcctgcggtatgggatagatttttaagactcaacaccaaagagttatccatcagggctcgtcttctcgacttcatacaccttcggccttagctgccgaagcccttgcgattaaatcggctaaatcggcgctgactgcagcgttgcgaatggaattcacctccatcacagtttgctcggactctcaagtcctcacatctttactcaatacagagaccacatcgaatgagcttcaggggatacttcatgatattacatgtttgtgtcgttcactcctatcttttaaattctgctttatttcacgtttagctaatgtttcagttgatgcaacagccaaagaggctttgttttctttggatttccctgttgtatgaaccttttaagattacttaaatgaagattacaatttgaccaaaaaaaataaaaatagaagaaaggtgattccttacctctaaaatttaggtcgataggcacatgcgattcatttgcatctttaagtccacttcatgcagcagtaaaaggtgattccttatccgatcaaaattatctgataaggaaggaggcgatgaggtgaggatgggagattttttttttaatttctttttcacagtgtgaagaaaagggacattatccaacgaatggctctcgtgaagggcgattttttggccgacaggtgtctttcgtttttctccggcggagtagttttccgaccaaaaaagatctagatttcttgtatcgggtcttctatggcggttttatcttccaaaagtctatggcaattactttcctccaaattttcgggaggtaaccgtcaaccgaaaccgccatagaatcgtttatatatcttctccgatcacttgctttctcttttcgattcactactccaccaattcgttttcaccacaccacaaatcatgaatgaagttctccgaaaatctgttcaggatctcgatttgggaattgatgatatcccaattgctttgtcactggaatttgtttctcaagcggccgctgtcaaccgcttctcgctaattgtcaccacggtgacccaaggaagcaaaacctaagagcgttaattggtcagatgccaaaggtttggggttttgcagaccattgtgttggtcggattgttggtcaagggaaagtccaattcaagtttcaatcagaggaatccatgaatctggttctgcgtcgtggtccctggtctttcaatgactggatgttgtctgtgcatcgttggtatccaaacatcacagagaatgagatgaagatcatacccttttgggtccaaatcagaggtattccgcttctctacttgactaatgcaatggctagagtgatagggaatagattgggacatgtctcagatgtggactttgatgagaacacaaaccaaacgggcttcgttagggttaaagtggcttggaacttcaacaatccgttgcgcttccagaggaacattcagtttgatatgaatgataataccatcatcaagttcagatttgagagactcaggaatttatgtactaagtgtggttccctcaagcacgacgtgaaggaatgcgctctagccttcgaggaaaatggccctgacaatgaggatgagggatataatgatgatcatcacaaccaggatcatgatgcacagaagatgtctgatgaggactcacttcctagcattgatctaacaactctaatttcgggacttcagagaaacactcaaactgctttcaaccagggatcgccctcagactcagtcccatctgatctggcaagtgcattcgaggacacaaattaacagcggaacgactcaggtacctccatgccaaacatctgcgtgagtctttgatgaaacaaagggaaacatgccttcttgaagaaatctctgacaatgctacaaatgagtttgcttttgtgaagcgtaagcgggtcagttttaaaacattgtacaaccaggcggaggctgcagaggaatcagcagtactaggtcatcttcgtaagaaagacaggagagtaagctttgctgcatctatgacatctccaatctcaatggacggaggcgtgggggacccggtacccccacagcccccatgaagatcagttcctggaactgtcagggtttcagagcgccgctgactcaatcgcgtcttactaatctatgtaaattacttaagtttgatgttttattcctcattgaaactctaaattagtgtgatgttataagtactctagcaagtgtattaggatttcccaatgtaataacacaacccctcaaggtcatagtggtggcttggccttgttgtggaaggataatgtgtgtttatccaagatttctcaggatgaacgccatatcgatgtaaatctctctatcaatatatcaacttctatttgtcttgcgtatatggtcatccatgtcaaagtgaaaggcattatttgtggacacactttgaaactttatcacttacacgcaatgatccttggatattgataggagattttaatgagatactgtcaaatgctgaaaagattgaaggaccaccaagagatgattggactttcagagattttagaagaatgcttgcaacttgtgatatggaggacataaggtcaacaagtgacaaattcacttgggtgggtgaacgccataatcatacagtgaaatgttgtttggatagagccttcatcaacacggaaggagcggctacattcccctatgcagagcttgaatttctggactttacagggtcagaccacataccattactattgactctagagaagctagaaacaccaaaaataagacctttccgctttgataaaaggtagctagaggttccggatttcaaaacgtgtgttcgtaatggttggaatgaagaaacttctaaacaaagtactcaaatctttgatcaagtgcgaacctgtagaagagcaatggctactctgaaacacaagtctaatatgaactcacgtattaggattgatcatttacaagcgtcgttgaacaaagctatgtccagtgtgattcgagtagaacggttacttataccacgtatacagagcgatctcaccaaagcattttctgatgaagagaaatattggcagcaaaagagtaggaacaattggatgaaggacggtgatcgtagtacaagcttcttccatgcttgtacaaagacaagattcttcgtaaatcgaataacaactataaaagatgcagaagggaggatccgcagaggcgataaggagataggaatacatgctcaacaatttttcatcaatgtctacacaagcaacagacgacctgtttctcaaattgatttcgccgatttcaaatcattagtcacaaaccagatgaacgatgatctcacaaaagacttcacggacacgtaaattttcaacgcggtgtgtcaaattggagatgataaagctcctggtccagatggattaacagctagattctacaagtcttgttgggatatagtgggacaggatgttatcaaggaggtaaaatattattttcaaacatcatacatgaaacatccattgaatcacacaaacatatgtatgatacctaaaataaccaatcctgaaacaatgtcggattatcgtccaattgcactttgcaatgttctatacaagatcatttctaagtgtttggtgggtcggctcagaagtcatcttaataacatagtctttgatgctcaagcggctttcatcccgggaagacttgttaatgataacgtaatgattgcccacgaaatgatgcatgctctaaaatcaagaaaaagggtctcacaatcttatatggccgtgaagacggatgtaagcaaggcctacgatagagtcgaatggaatttcctggagactacaatgcatttgtttggttttagtgagaaatggataaggtggattatgggtacagtacgatcgattcattactcagttttaataaatggggttcctcacggcatgatcaaaccccaaagaggcattaggcaaggggactctctgtcccctatctttttatattgtgtgctgatgtccttagccatcttattaaagctagagtctctgagggtgatatccggggaataagaattggaaatggtgtactaggggttactcacttacaatttgcggacgattctctcttcttctgccaagctaatgtccgtaactgccaagctctcaaagatgtttttgatatctatgagtattattcaggccaaaaaataaatctggctaaatcaatgataacttttggatcaaaaatacatagagttgttcaagaccgccttaaaaaggtactgagcatccaaattcatggagggggaggtaagtacttggggctcccagagcagtttggtcggaagaaaggagaaatgttcgagtacatcattgaaagggtaaagaaaagaacatcgagttggagtgcgaaacatttgtcacctgcgggaaaagaaatcatgctaaaatcggtagatatggcaatgcatgtgtatgccatgtcttgtttcaagctacctttaggtattatttaagaaaaattgaatctcttcttatgaatttctggtgggagaagaatgctaaaaaaaggggaattccatggatct

SEQ ID NO: 34963 - DNA, 5947 bp, Arabidopsis thaliana landsberg
tcaaaatcttcaactaaaacaaaaaaaggtttagctaaatacctgctaattagatcggcagggaggccttccatgtcgaaccgccagctgcttttgtatgcggcggcactcatttccatgccgtatgcaccagcagtgaagcctccttcgatcacaccatctgcactgatcaacgattgtctagccaaagcattgatttccaacgtgtatctcatgtgtggatccagtagcttgaatatgggatgcatagcgctcaattgcctgtgtgcagctaatataaatggctccaagcatgcatgtgtccgtaacctttacaaacaaatatgacaaaacatgtcaatatataactctatattcactacttgttacataaatgtgtattaacatgtataagtactaaccagtgattgacaagctgatggacaccagcatcgttagaactaacgtgggctttagcgagctgcccacatccaattagaggttgcatcgactggaggtgtaagcacacgcttggaccgatgttttggaccatggggagggaggcttagctcaatggctaccggcttaagtgtgcctagacgagtcaagaagaagatagttcgagtagcataggctttgcgtccgtctagcgcattaatccggtctaggaacggtaagaatatgtcatggtaatccaacatatacaatctattctcttccaacgcctgaaaaaaaatagaaaagactatttaatttaatcattttttgattagtttagttaatccattgtaaggggaattatatagataaacgtacttgttgtacggagaatccgtcgaggtgaccaatgatatggtcgtcagtaagagcggagtgttgtggaccgtagatcttggggtcaagattgctgaccggtggaaaagtcttgactctctcaatgttcactggattgattccagctatggcttgacgtgcgaattcgtcatctcttaaccatgcgtttttatcctctgcattatttatagtcgtcagaaatcaattgactaattaatatttccaaagattaataactaaaaagcaagttacggctatgaatgagttaagtaaaagcaaacgcgcttttgttatccgcaaaacgaattaagagaatcacgtggaacatatgttgttgttttagtactctagtaatgcgttttgtctgcttttcgaaactaatgggtcccaataaccaacgatacacaaatcgccaaaaaagaccaataaaataatgtaaaattcttggaaattactcaattaggggatgcttgctttagttggtgtggggatatgaaatggcattagttcaacttttgtttactaaataattgatgttattaatttagggttcttactcgataatattttgggagtgtcgtatttgaggagtcctttagtagattcttggagggtatcaactacgaccttagggagaggaaacttctcaaagatgtcatcttgaaaccctaacttgagtaacaagccttctttataaagacgatcgatctcgccgaagtctgcaaagtcctcagctacaatactggctttgagcgacggaattaggtggtgtaagactgcttttagcctccctgcagcaaaagtgtcctgcttcgactcttcaaattgctcgtctcgtggcacatacataggtaatggcttctctactcggctctccgcgtctttatctgtcaacagtacagatcaatatgagaaacgtttcataaaaccaaaacagaaagtgttgttttttttgttgaatgcaaatcgtactaaaaatgtttcatagagatattgagctacaaaatataccagaaactgttgattggcgaccagtacgacaacgtctagggtaaggaacctctttgccaccgagtttggggcgagagagctcggatgatttgtcgggatttccaaggtcgttgtaaacatcaaagtcgtaaattctgtctgataattttctcactccacttccatctcctcgtagattcttcaactctttctccctcaatactcttaatccgcttggtgtctcattcggcaaatacggctgcgaataatattcaatttacatgacgttattttcatacttaatagctggggagttgggtattattaatggacccaccatgacataaatgttaaagaagattttgaaactgactaagatatgtaatcaattcgtgagggaacgaaaatgacgtgttttaaagattttggaaaccatgattaactacttagtttaatgagttacctgattagtgaagaaaattcgtttatcagggtgatctttttgagactgaacccaagaattgcatggaaagtgaacaggaccaagtgcgaagccttcaatggttatgctctccaagaaaaactctttttggtgtttattcatgacggtgattgctcccggcgagccaaacgctgcatccaccgtgaactccgccgtatagtgaactctctccgccttagttttcgatttctttgaccaatcctttaaaactgctgcattgcttttcttcggcaacttcgtttctgtttgaatcaaaaagttttgttttttcttagtattttggaaacccattttagattacacgatcttcagaaaatatgtgaatgctctgcttttcaagagaaggacttacttggatcaagttgggtgctgataagctccaagacaatgtttcgaccaattttatcagcaaaagcatccaaatgcttaacaagagtctctttcaaatcctccttgttcttgttcctcacagtaaccacagctctcaccttgaacttcaccgccgctttctcctcctcttcgctctttctgtctccggtcgttgtggaaaaacgcagcgttttgaccaaatcctcgctgatggctgcaacgacgccggatttggtttttcttggtctccggtcaaaagggttgatcgagaactgtgttgactgtgtcctcttcttgaaatgcgacgccgacgagacaagtgatgacctttctgtgatgagaggataacccattaactctttagctaaggccatcacgataatctaataaattacaattttgaggttttgtggtatactattagtgaagaagaaggagttgaggatttgttggtagatgaacgttctggttaattactagtaaaaatcggcgagtgagagatataaatagagagagctagtaggaacccttgccgtccacacgttttgttgattggactatggattgtctacgcaaaagtcatgttttattttttttccttttatataatgtgaattctcaacacatgtttcaagtaaagatatttttctttctgttttagtcaactagctagttttcaaactgattactcttattctgattatgataccttttcatgataaatgactttcttttaaattttagaaaacacgtatgttatggcaataacacactatttttattttatacgtgaagagaagaaggatacgtcgtatatatacgtggcgtattatagtattattacttagcttgtccaatccaaaccatgttaattaagattttaaaagctgattggataaaataaagttagttgtccaaaagaaaaaaagagaggataaataaagtgttaaaagggtatgacattagaatgatagttgaagattaagtatatgtaaaaagagttttatatttaaatgcatattaaatcaaacttaccaatttatcaaggcaactatacatttcctaaatatatgcatatttactgttaaaactttttagtacatgaaaacgggaatgatttttcaattttcttttttttcttttgctaaatatgtgaattttcaatatatgaaaaggcttgtaggaggagctacaaagttcttaatacaacagattttacttttctctgtttgtgtttttttttttttttgtcaacggagaatatacttcgttaaccagagttattagattcatctttgtattaagtttcgtgagttgcataatgaacatagtttggctatgttaactagccaaaaacaatgaaaacaatgaaaaaggaaatgatggaatgaaaaatgtggggtaattgagtcaaacggagttacgagtctgacacgacgcgtagtataggggcgaggaatcaaaggagaaactccggtcggaattctttaaatgactattttaccctctcatccgcccaaaataagattttgcattatgggggttaaccggagaatgttgaccatcgcctttttctaattataaagtaacaaaggccccgagaaagtaaataaataattcgacaacaagaccgttgaagatctgttggtagttcttttgagaaaaaaataagaaaatggggtttggtagttatgaatagttttacagacgaaattaataaaattaaactaaccggaaatagatgtgacataaatgtacttgatgcttaaaatagtattatggtatacaaataaaccctttattatttatgaaaatgctacaacttcttaattaatcttaccaaaagattctgaccattttgaaccacaatctcttctaaccgcataacaaaacaggtcactatagactatcgtcacttcctaacatcaagactcaagctcataccgaggttcattccttattatatcgatttggttatttacaatggaattgtacatgcatgcatatatatagtaacatagggtcaaaatataagtgtggacaccaaatgtgattagtttaacaggttagcgaaaaatatatatgaattcaaatataatgattaaggtctccaatccaaaaactcgatgtatagctgtcaaaatggacgggcggcccgtgtccaatgcttaatggactggtcatgaacaaacccattatgaagcgggcattaatggtcatggtcattaacggacatgggctttagcggactggacgtgatggacatgaacgatccaatagtcataaaatattaggttaagtgatttgtggcaaaacagaaaaacactaatcatcgaaaaacatttcaaagtgttagatttttgacttttggattgattgatacttaaatcatttaatactttgttgtttaaatttacttttagattgataatttcaaagtgttagacttttgacttttgtattgattaaaatatgaagcaaatactattgtgttaaaatttgattctgttatgtcatgtccactgaacaacccatttggacatgagtgttaatggacatgggccttaatggacatgaacactatttgtcaaatatcgaaatggacattattggattgggcttatgggcatggacaacccgctttgacagctctatacattgtcattacctctctagaagatatatatcttgtcttccaaatttgcttctcaattttcatgccacggtcattactgttcatgctttgttattgtttatgatcgttcctcacctacatttgttctaaacatctagttagattcttcgagtgttctttgcattaattttccggtgctaactaaaaccatgttggcgctaaatatcaaaagagtcacgagaatgatcatcaaaggagttttatactaaattatacgcgctaaaacattatactaaattttcatagaacggtcacaacgttggtatggcttatgcctaacactatcttcaaagcgaatattagtcagatcaatactcaacgtcaaagtttttccagatgtcttgtttctgaagtcgatgcacaaagatgagtctttcacacgcttattattccaagcagaagattattagagagttttgattaaatttggagaataatcaaaaattaaatatctggatgatgagcatcttaaaacggttattttttggaagttcactaccgaggatgaatcatcgcgtaatattggaaaataaccagatgcgataattcatcctcggttgttcacataacgttcttgt

SEQ ID NO: 34964 - DNA, 5230 bp, Arabidopsis thaliana landsberg
  unsure (1)..(5230): unsure at all n locations
gttcggctcagttcctaccgtttggtcaccaaagtctgctgcttcttttttgttctctaagtctaaaaacctctcctttggctgtgagagagccaacgagaagagaaaaagtatcttcctttgagaagtgcaagtccatggcagctctctgttgttgtcccaccaccatcatcgtctccgggaaggtttcttcacggattaaaaccgcaggtccattaccccgaatcaacccttttaagaatcagaaacgattgattacagagagaagaaacttgatcgttaaatcgatcattgaagacagagaagcaatcgatgttaaaaatgacaatttcaaggcagaggaagaactaacagaagataaagtagaagatacagatcggctaatgagtcgaggtatcaacgcagctatagttctcgccgccggtaccgttgcggttactaagcttttaaccattgatcatgactattggcaagtaagcttagggttttctttatctctcttgtgattgattggttcttctatttctgcaaagcttgctcctttatgggattatactgaaattgatatcacgattgttgttgttcttcttagggttggactctctacgagatacttaggtatgcacctgaacataattggtttgcgtatgaacaaattctcaaaacaaaccctgttttggcgaaaatggcgattagtggaattgtgtattctttaggagattggattgcacaagtaagaaactaaaaatactctaaaaagcttcttaatttgagttctctctgaccattttggctgtaactttatgcagtgttacgaaggaaaaccgctgtttgagtttgatcgaactcgtgttcttagatcaggtcttgttggattcacactccatggttcactgtctcactattactaccaattctgtgaggtaaaaatcaatctttgctctgtcaagatatgttgtattaacaacgggctgaaagctaaaatcttttctttgtacaaggctctctttcctttccaagaatggtgggtagtccctgcaaaagtcgcatttgatcaaaccgtatggtctgcaatttggaacagtatctactttacagttttagggctcttgcgtttccaatctccagctgacattttcagcgaaatcaagacaacatttttgccaatgctcactgtaattaactctccttgccctgtgtcttcgtgatcatatataaagcttaaagttagtctgttgattttatctaaaggttatgtcatgattttgtctatgcaggcaggctggaaactctggccattggcacacttggttacatacggtgtaatccctgtagaccaaaggcttctttgggtagattgtattgaactcatatgggtcactatattatcaacgtgagccttcttcaacttcaatcttttttatccaatgtatttgaaagtgttgcacatattagctttgtggctatcatgaagagaagttttgtgttgctaatatcggttgcctgattttcattttgaattctggaagttactcgaacgaaaaagctgaggcgcaagcatcagaggaaacgaactccagttctcactcaagcaaggtttgccaagtgttccttttttccaagaatctctcttcaaaaattagtcttgagcgtttgaatgtttgttcagagtgttcatctaagctaatttgtgcctgcaaatacttgtcaggattaggtgatatcagcatgtagattctagattctatagactctaacaggaggtggatgaagaacacaagcacatatatactttttttttgtttagagagatacctaaaagcaatgtatctacacatttgattcatggattccaagagagaatcgatgaggcaaatccattgtgcaatacagatacatcaaacacgaaacaccagcaaaacaaatacagatcaagctgcgcacaatgctcaagcataacaacgaaaaatgacaacattcttcaagatcagtcctcagaaataacattaaaagctaatctcaagtcttcgatttctcttcagagaatctcggaagctggacaagtgagttcacacgtgtgacgccttgtagacccaaccagttttgatctcctaccgttntctcatcctctgcatcagtctctgtattcacgttaccataagtctcgttttcttgatctgatgatgatctaactgtgaagtttctttggagacatggttctgatctttggccatcatctgattctacagcatttgtggctgaagagaagccttgttcatcataatccgactcagaatccattttcccatccagaaacaaacataccactgcacaatcatccattttggaagtcgggtacttcagtttccattcacgcgcagccgagttcaccaaggtcctagccgctgatgcccggcttgtggctgaagctacaatgtcaaccacttcttcgttgcttaacacatcccatacctgttcaataaagctcaaaaatcagtaaagcctttgtcttgaggctcataggctaataagatcactcgtttacttactccgtcagaggcaagaacaatgaattgatctctgtctgtaagaacacggtgagtgaactcaggtactgaaatgactccatactcttttagacagaagtcaccaaacgccctagccatggctaatccaggtgcatcatcataaggtagccagactcgcggcacctctggctcgtcttccatcgcaaatactcgacctttacaccgtttgatcctctcagcttcccctatcagacccacaaaacagtaacatcctattagataaatgcatacaagccaggaaaaaagatttcgaaaaagtgttaagcatactaggtaaatccggcttcagatcaactgtcagttgagttgccaccatagaatcgttactgtcttttgatccaaggatggcccgagaatccccgatgtttcccatgaagagattagacccctgaacaatcaaaagagatgattaaagaaaacatggttgaagctgaaagagagctctttgttctctaagtgtacctgtttaagaattgttacgccagtgctgccactacaaaaacagtccagattaggatgagaccgcagttccttatccatggctttaaaagatttcaagaaagcttctccccataagcctttcagtttatcctcgtcagatccttctttaacagcttcttggacagctgatttgcttgaatttcttctgaatcgagttcctttagaacagttttgcttcgactgaagcgtctgaaagaaaaactgtaacttcacaggcaatgtatctctcactttacgagcaacaagatggccataaggaccatgaccatcaaatacaccacaaaatgtcacatcttcagacataaaatcctacaaagcaacaaagaaatccggctttatagttgaccatagtgttagaaatacaatagaaagagtctgaagaactcacttcccacacaatcatggcgtcctgattaatacccttgcgtccttgttgagtgaaaatgcaagagctcctgctcttgctgctgctggtgatccgatttggtatagaagtcaagttctgcaacgagacaatgtggtctgaaaacgttctcttcgcccttttgctcacacaacaaccaatcccgagatatggtcgacgcacaggcttctctccattgctccagctgctacacgtactcttactactagtcgacacacaaccccccattgtttaatcccagcctagacaataaggttgttatatagccacacacaaaaaaacagatctccaccgttatgcttaagtagaaaatttggtcaagccagagctttttatgagtgttttgataactagtatatactctccgggaaagccttggattcaaatcttggtcaacgatggactatgacctgagagcaatagagacaaatgattaagtagatagtttaacagcagtttcaataagatcacagagataaataaacctcaagaagtagtaaagaccaaattctagcatgtgatcttagcaatagaataaaggtatgtattaccaaaaagactgtcttgagattgtttatcaccattggggatcttattaatctatggtctgagacttgtttactaatccctgtgattaaattaatcaaagtaggacctacaagaatcacaaaacatgaatccttatgaaaagaaagcataaagatcaagaacagagtttgctcatatgtctattcacacatgaatccagacggattcttgtgaatatctctttgtaacttgttctttacatctgccacatagacaatattcaaattctactggcgtaaatcatcaattcctttcaggaaacgagagacgttaatgcaaatcctgaagaacagagagattcttaagcaacaaagttgccgttttcagagaaaagtaaatcactttataggaatccaatgtcgtaaagtgtgaatcgagtaagaagaaactaaaccaatattgtctcaaaagaattcggaaacaaaactagcgcagagtgatgaagaggaaaaacaactaaatgtctgagcagatcagacagtttgccttaaacatggtaacaacaagaaacccacaaagagaaacaaacgatttgagatatgagccatttcaacgcaaaagaacgcaccttttgtttgtgtagaggtttctggagatcaagaacagttgattcacagacagttgaaacagagagagagatagagtgagaaagagagttactaatttctcactaattcaaacacacaaagagagataagagagaaaaacaaagattttagtttccccaaaaaaaatcgtatctttttatttttaaaaaattcatgaaagagatatattaaagctgctttagtgctttgcaaattacctttctaaattctaaaccacattttgtatgaaatgaaattttgaataattttcccaaactaatcaagtccatgcactctccatcacaaatgattactttctataataataaaaacaaaaaaacttaatgtatagtagaagtctcttctaaaggttttaataccatgtatatatggtttaattccaagagaattgagtttatcgtatctaatggtgcaaaacttaacaaaggtttagaatgtcgcaagcaaatatgtttgccgtatattgcagaaaaaaacatgtctacatgtcatggacttaatgatcttaggctttaaatggt

SEQ ID NO: 34965 - DNA, 3787 bp, Arabidopsis thaliana landsberg
tgcaggtcgactctagaggatcccctaacctggaataagtactccaaggttactggagtatctaactgaccagtagtcatggccaagaaattcttgagatgattagaagcttcagatttttcagacatcaaatagagccatactccacgagagtaatcgtctacaatggttaagaagtaacgagcacccgaatgagttggagttctataaggtccccataaatcacaatagatcgaaaatccctttcgttttattctcacttaatggaaaagataatcttgtttgcttagcgcggagacaaacatcacacgctttattcaaaatatcagaaacaacatttgaaacaacagggagaagaccaactactttgtctgaatgatatcccatcctcttatgccaaagctcaaaagatttatcatctcttacttccacagatgctgctgactccatacttttaaagcggaaagtccctcctgtacgtctactaactccaatcaccgtccttgtagtgcggtcctgaacaacaaggaaatgatcagctaactgcactacgcaacgattttcatccatcaattgacaaagagaaatcaaattcgattgaaacccatcaacataataaactgattttagtgtccaattcggcccaagcctcactgatcgttctttaactaacactcgttgtctcccatcagctaacacaattccaactggttgaatatctttaacatccgttaagatttctaactaacccgtcaagtgatgtgtagcccctgtatccattatccaagagggaaaagagtacgtacctgtcagattttcggattcatagactttgctagtgttagcattgagcagattcttaatcaccttccactgtgaatcggagaaaccggtcactccgtctctgtcattgtcggtgatgacgtagttagcggctgcataacctgttggttcattaactccgacggcgttgacgtacgaggtgctgccacgactctttccagtccctctgtttgagcctccacgtccacgaccacagctagacgtagagcgagatctcggtctatctccccaccactctggatagcctatcacgccatagcagctgtcgctagaatgacccgctcggttgcagagtttgcaaaacactgacttatctctctcatctcttcgaaatggtgtagtggtttggacagcaaatgcgtttacttctaagctctattcaacgcctttgattccatttcttaccatatcttcctcttgtcgtaccatattatattcttcctccatagattggatcggaactctcaaaaccaagcttgacctcactgttcggaaatgtgtatcgtccagcccaaaaaggaattgatgtaccttgtcttcttctctgtccttctcttgaagtgtgccaagatcacactcacacttacgacacttgcaaactctcaaaggacgatagttcgccatactgtcccaaatgcgagttagctttccaaagtaggtctcaatggctagacccctttgtttgcagcatgctagctcggctttgatctattgaattctcggtccattagtgacagagaatcgtttctttagatggtcccacagatccttcgcaacatcacggtgtgagacgttagatcggagacttggatcaatagacatctttatccaagagacaagtaacgcttgaatggtccaccaatcctccaaatcgggagagttttctgcaggtcgtgcaattgagccgtcgagaaatccaaatttctttcgagagcacaatgcagttttcatgctacaggcccactcatcgtagtttgttgcttgcagcaacgggtgggaaatcacagcaccagggttgtcgtagggggatatggttcgtcggacgtcagtggtcgtcgggttcgttgatgggttcatcgctgccatcgtcgtagagaatcacttctctattttcaaatcgaaaattttaagagaaaggctctgttactatgtgaattcagagattgtgactgggaaaatatgttcagttttctgatatattcaagagaagtgtttacaatgctttaaatagattacaaaagaatctctaagaggatccgaaaaaatcaaatctacaactatcaaaaacttgtggaacaatcttaacaacttcttgttccaaactgcccgcatatctcgctaatatatttaatcacttaggacttgttcgagaggcacatggtcgtgtatgcagttggaacttctttagcatctgttgctactgcttggattggtaagttttgatatttgcttactttgtctcgatttctcttgtagactagggatggacctcttccagcgcagcctaagaaatgttttaaaaaagttccaacactttcagttgggtttaaggtacgagtttacttgctctcatagtttgaacgtacttagactttggacaaagtaatgggtcatggtttttgctttaaatttagagatctgataatcaatggtgtcttgtcttttacgagtttgatttctgaactttgataatggcttcttctcatgttgatccacttctctttgaatataattagcaaagctgatcattttagcttgatatgtctataatttctggtttcaaagctatcattgtgattggatattgtcgaagtttgtttttctaaaaaaataatgggctgttaatttttgtcaaaccttgtttcatagagaaaacataaaaaaaagggaccaattcaggttagtgatcactacaaagtcaaatctgtgtttatctttctctaaacattcttaatgtattagctatagagtgataaagtatttaacagctgagatcaattgaactgatcttttaaaaaccaagttgcctatattgtctgaccaagaaatttacatatgtttcttatgatagtgtagctattcaagttcttaattgtgaggtccggagatattaagttgcgaaaatgatgattgtgtcttaagaactgtttggcttatctcgccaagttctttactttttttttaatttaagctcacattgatatagtctctcatgctttggtcttatgtgggtttgtgttctatagttggataaatagaacttgttgatatgttctcttgtgacatgtactgttcttttattgcatatagtgtgagaactagttgtctttttaactgagtttgttttttaagcagtgtgctattgtttctgcaatggcaaatcatgattgaatgcttggccagaatcatgttgataggttcgtcttaagatgttatgtccttgccttctcatggtgtgttctgtttgcagggagatgatcttgaccagacatatgatagcatatcagctctaaatcagctcaaaacaacacaaatatgcaacatgcatgtaaaactatcctaaacatgcaaagtgatgacaaatgatgagaaatggtataaaactgtggtgatatgatgcaatagtgataacaaatggatgctcatttgaaagaaaaaaaaatcgtgtcgacgaaacgcgatggtgttgatcgacattctcattttcaaggtaagtcgatttaacctaaacttcatcttcttcatttcagtttttattcaaaccgccgaaatcactcttttctctctagattcttcgattcttcaccgtttcttgtgattttagctctaatctcattagaatttcatcctctttcttccccaagtatctatttcatcgatctgcaacatgactgggcagaaaaagaaggcaaggaagagcgtttctccaccttcctcctccggc

SEQ ID NO: 34966 - DNA, 2555 bp, Arabidopsis thaliana landsberg
catcctaaaccgaagcttgtgagcatggccccgtgtcgaaggtgttggtaatctggaattccggaagttgatgaaatttataatgtagtattttagttgttgggtactttgtattattcgtataaacgaaggaatttgtagtttttgggtactttgtattattcgtataaacgaaggaatttgtagtttttgggtactttgtattagtttttgggtactttattattttaactaataaaacgttgttctatgtttcttttgtaaatcccgaaatctgtaagcctagtacaacaggttcagcccgttcaactataatcacttagtaaaatgtgtttaacgattttataatatgtagaaacgtttgaagtttactactagctcaacaaaaaatctactattactattaaagtgtcattgataaatatttttttataaaaattgaaatcgtggtatgtgttcacataaacaacctcttatatgataaggagtagttactatgagatcacctcaaatgaagtaaattacgtgaatatggtcgtatatcaaatgtgattctgccaaaactttcaatatgcaaaataaatcacagttaggttgggttcgacatagttatcaagtatgtacattaaagttcagctgaaatatatgaaaacagtgaaaagtacatctatgtgtatgatagttcagctgtacaactatgtgtaaaattccaactgatgaacttgataattccagctggcataccgcataattccagctggcatactgtatatcaactcaaggaataaatggaataaatgtctggatttatcaactcaagttagattttggtgggttcatatgtttaaagttcttttttttttaatggtagggttttgaggattttcatctatatttaatcatttacttgtgaaaaatcaaaaattcgagaaaaccctcttctgaagaagacggcggcgattctttagcggcgtcaagtattttcgggcgacgagattttttcggcaaacgacgtcatttcttcacaaggttagatcttttctattaaagatatagggtttatgtggtttattttagtcaagatctagggtttataatagtcaagatctaggctttattttagtcaagatctagggtttattttagtcaagatctagggtttagtcaagtatttgatagttttatattttgtatttgacagacatgcctatctcttttaacggaagctccgactcctctcctagtgagaaatctgacggtttcgactactacaatgcaatacgggacgggaattggggcattccgactaagtgctattgtggaagagacgttgaaaagggtaatgtggttggtggcaatctccacgggaaaacaagattccgatgtccactaaatctgaccgaggtggatggagaacacttgcataagtggtgggaggaagccattgaagaggagttttcgaagtattgtagccggaaggacaagcgagaagaaggacctcctgcttggcaagttccgatgttcgagcccatccacgagaagatacgcattatgaatgaccggatcactgatcttgagacccaattattcaaggaactacgatcaatgaggagtgctattagtatcctccgagctagaggagggcgtggttctcgttgaaccatgtatgaaccatgtgaaccacgttgttttcattatgcaagtatttaattttgaaccatgtgaagcactttgttttaattaatgtatgaaccttctgaaccactttgttttaaatatgcaagtatttatgatttattacgatgtgcaaccaaaatatacagttgaacagggtaatgtgacgaaagatgaaccatttgaactaaactgtttcgaaccagatgaactatctctagttcagtcgaaccaatgaaataacattacaaagtcacaaatcaaaagcattataaaatcagggaataataaggtcacaaatccgacattacaaagtcctgtttctttttattaccaaacattacgtaaacaatggcaatggtgatcaagcaaagccacacaaaacacattgttaagcaaactttccacttgcggaattcttttttgcccaattctgcttcttctttcagttcttgtaacatcacatgtagctctttcgcctcagatttgattttgttaagctcatttgcaatgagtccaaatttttctaaagcatcttcgacctcttcttgcacagcatcctcaacccacttaaacaaatgaccctattgcacaacccacaaaccaaatccgacaagtttaacaactacataaatacacattataaacaccaactctacttacatctcttttgtttggccacattttcggatctcttttggttttacaccggaaaaaggtcttccgggattgtcttgactcttggatgtgaagatcgtcacatctgctccacacgcacaattcaccggaaaaccacgggctccgtcaacaccagatgacactgacactgaacttgaactcatcggagtagttagagaaggcattcacgaaaccctaaatca

SEQ ID NO: 34967 - DNA, 2954 bp, Arabidopsis thaliana landsberg
  unsure (1)..(2954): unsure at all n locations
taatagagccgtgcttaactacttttatagtgaaaattaaataaggcttatgtatccaaatacttgtggtcaacttttgtggtctgatttttttttaatcatttttctgtcacttaaattaagtcatataccttgaataccaacatctaacttgggaataagaggtgtgtatcttgcggacaaatgaatttagaccgttgttaaagagcgtaaactttaataagacgttaacatgtgtgtgaacagaaagctattctctaaaattttgatattaaatttgtacaaaatacatttctacgtggatttaaggtgttaaaagagttcgattagtaagctttacattttattgatactaccactatatatacgttggaatgtcatatcaaacacagattaacaaattctctcaaatggctctctccgtatttgcctttccttcttacataaataggaatccttcactaaaatatcttaaaccttcttctatgtcttctacaaaatatgtgagagtttttttcttctttccctcttttacttattgattactatatgaagttgcattattatcaaagttctgcagattatccgtgagaaactatattacgtacactagttgttggtaaggttgtgttagttattgaagtaattgaaagtgacataacatctttttttgggtcagtcagaagcaagagcaacaacattttcagagaaaggtgaatattattcaaacagaccaccaactcctttattggacacaatcaaccatccaatgcacatgaaaaatctctccatcaaagtataaatcctaatccaagtcttgaaccttgttttgtgtcaaatcaaggatgtgatgatgaaaaagtgttctgctatgtaggaactcaaagttctttcggacgagttgagatctgatgttatttttaatgtttcgaaaactggaggacacttgggttcgaatcttggtgttgttgagctcactgtggcccttcattacatcttcaatactcctcatgataagatcctttgggatgttggtcatcaggttggttatctcattgcaagcataagttttcctttagctacatgtacaagtgtttttaacttgttttgtttttgtctttttgacaagtcttatcctcacaagattctaacgggaagaagaggaaagatgaagacaataaggcagaccaatggcctctccggctacaccaagcgaagagagagtgagcatgactcttttggcaccgggcacagttcgaccacactatctgcaggcttaggtcatacttgttattttcttgtgtcacaagaaaacaagaaaaatcactttcctaacatgcatgcggaaattgtgaatcagggatggctgtagggagggatttgaaggggatgaacaacagcgtggtttcggttataggcgatggtgctatgacagctggacaagcttatgaagcaatgaacaatgctggctacttacactccaacatgattgtgattctcaacgacaacaaacaagtatctttgcctactgctaacttggatggaccaactcaacctgttggagctctgagctgtgctcttagtaggctgcaatctaatcgtggaatgattagagagactagttcaacactgtttgaagaacttggttttcactatgttggtccagttgatggacacaacatagatgatctggtctccattcttgaaacattaaagagcaccaaaaccataggaccggttcttatccatgtcgtgactgagaaaggtcgtggatatccttacgcagagagagctgatgacaagtatcatggtaaaattaattttcatatcttcttgactatactaagcactcttggattgatccatatttctcattcttgtcaggagttttaaaatttgatccagaaacaggtaaacagttcaaaaatatttccaagactcagtcttacactttcctgttttgtggaggccttgattgcagaagcagaggcagacaaagatattgttgccattcatgcagccatgggaggtggaaccatgttgaatctcttcgaaagccgctttcctacaaggtgtttcgatgtcggcatagcagaacaacatgcagttaccttcgctgctggtcttgcttgcgaaggacttaagcccttttgtacaatctactcatctttcatgcaacgggcatatgatcaagtaatagagtcacatatttttggttatttgcttattgtgatgtggtaactagactaaaactagtttgtgtaggttgtacatgatgttgatctacagaaactgcctgtgagatttgcaatagatagagcaggacttatgggagcagatggtccaacacattgtggagcatttgatgtgacgtttatggcatgtctaccaaacatgatagtaatggctccatctgatgaagcagagctttttaacatggttgcaaccgctgcagctattgatgaccgtccttcttgctttcgatatcatagaggaaatggtattggtgtttcacttcctcctggtaacaaaggtgtccctcttcaggtatgtttagtaaaaacaatattgtgaatccaaaactttaacattctaagttttaatctttgtgtgtttttaatttcagattgggagaggtaggatactaagggatggcgagagggttgcgcttttgggctatggatcagcggtgcaaagatgtttagaggctgcatctatgctaagcgaacgcggattaaagataacagtagcggatgcaagattctgtaagccgttagatgttgctctcattcgtagcttagctaaatcacacgaggttttgatcacggttgaagaagnnnnnnnnnnnnnnnnnnnnnnnnntgtggtacaatttcttgcactagaaggccttatacatggaaagctcaaggtacattaacaattttttacacattcttaatagtcatttgtat

SEQ ID NO: 34968 - DNA, 4092 bp, Arabidopsis thaliana landsberg
  unsure (1)..(4092): unsure at all n locations
catgtaacttggcatcaaagttagaagggagaaagtcgcttgtacacgcggctctaaaggccaaaaactcaggtttgtgtttcatccagttattcatttttgcttacgagaaaaactaattctagtttttctttctatcacatttgctttctcaaaaagataatcaagtatttgtgtgagcagatatccttgatgttattttcaatgaagacccaagtcttgtcaatgaacgagatgaagaaggacggacctgcctttcagttgcagcatacgtagggtactataaaggggtagtcaatctcttacaccgatcaacatcaaatgtctttgagtgtgatgatgatggttcctatccaatccacatggcagtggagaagggtcgcgtcaaaattttcctagagcttctcaagtgttgtcccgattcacaatacctacttaacaaacaaggtcagaacattcttcacattgcggcaaaaagtgggaaaactggaacttacctattacaagtcatcaaggcttatgatttgataaagaatgatctgattatggagcaagatgtggatgggaatacacctctgcacttagccaccttaacgtggcgtcctcgaactgttaatatacttaatgggttcactttgggaaaccacctacatatacgtaacaaagatggcttgagtgctctggatatagcggagtcgaatctgcagtccaattacgtctttcgagaggtatatctgtctgtacgttattttgtttttgatacaatataaagccttttctcttatttccatttgttcatcttctttggatatcagagaatgacgttgatggtcttattgtgcacttgttcgccaagagggtttaaaatgatacccacaagtggaataacattaaaaagcagatcagaaaaagtagccggtaacaaatacaaagacagtatcaatgtacttctacttgtggcaactctagtagctactgtggcatttgctgcaggtattgccataccaggaggatttagtagttctactccaaaaaggggaattgcaattttggacgatgatgacttcctctcgatttttctggtgtttaacacattggcgatgcaaagctctgttctggcaatagttgctctaatatgggcacaactgggggatccagtacttgttcataaaacctttcatttggcattgccagcactctttgtttctctagtttcaatgtcctcagcattcttctgcggcgtggtggctacaacaaagcacaatccttggctttttgatagcactatctttatctctatcatctttctttttgtggtagcttatctccttgccccttacgctatccctcagtttccgggcactccttttcttcaaagaattactaaatgttatctcgactttatgttgttgtttgttaatgaagatgatgttgatattgtctgcgagaagaagcaggagaccgtccatctttatgtcgcgaactaagtcgaaaggtaaaataaaaaatgtctttaaagaaataatatcatttcatctgtttgattaagatgttgtttaaacgttattggcttttcggtgtttcgtgatttatctatgagtttttatttatggtttccatcattccatgtactctattttgtcaaaatacataatatattgtgtggagactctctagagctagagaatggagcttctgttgctatgttgattcatgtgttcagaacattcttcacattgtcacattaaaacccaaaaaaaaaaaaaaaaaaaaacattcttcacattgcagcaaaatgtgggatagttagataaacggcgtcgctgagataaaagggattactaaaaactgggcccatttgtgttaaactttataggcccaattgtgaacaccacgttgagttcgacttttttagtaggcagttgtccaaatgatgacaaaaaaataaaataaaataaaatgggcggttcggctgagacagctaatcggnnnnnnnnnnnnnnnnnnnnnnnnnnnnnnncaattatatccatggtcatggctcatcattagtcgcactgctctccttttctcaaagtttaaattcgacatttggtaaaatgatgaaacctcgatggaactgctctctttatggaatcacggaatggacaaataatcaaaatcagaaatcgaagcgaaaagggaggagaaaaacgcagatttggaggattggggacagattagatactgttgaatgcatcactctaatgctatcagcctattaatagcgtcctatattttcgaagacttttaatgtttagggttatggaattttcgagcgaagcatggagatgttgaattggatactataggatttggtacaacacatacatatgttctgcttctgcaaaactaacatatcaagttcagagaaaccagtaagtcgttgaatattttattatccattcaatgctttcttcttttggatcatgtcttgtttgcttgaccacttcttcttgcttaagaggatggacaatatataaaaactggagccttctttttctatgaatgcttatcatcgcggagttgatctgttcaattcacctgccattggatgcttaatttatatatacttcttgttcaatttcagatgctttagaaggttttcggagtggctagagatctgttatctgtatgaacagctacttggtatcagcttcgtcattttatccacacattcttaatatacaatccttctttttcatgcattaagccccgtacaatgtcgagtaaactcaagcatgtgtccgctaatattgtcttcgagcttggtatttttgtattctgacacattatttggggacgagatgttttgttgactcgatataagaaggggctttatggaagaaattgtagtattatatattgagaatggctctccaaaccatgttcttcctcgtgctgaccacttagctattattaaagcgtttgttgcatcgatatcatagattcagctaggctgtctgagagaggttgagactgaatctatgtaatctggaggacagagtggagatactgctatgcatttggccttgaaaggtcgccatgtggagatagctgcatgtctggttaatgtaaccagtttcttgccaatagaaatggaatatctccctagtctttggcagtgcgaagttggtaatgtcccacttgcgatagcaatcttgagaactacaggcaataagggagaaagacgaactttgattgacggttggaaacgtggctttgaaggccaagaatacaggtttgtttgcatcttaccattagtagctccgaacttgggcatgatggccattttttccaataatcaacttattatttatggtatatgacactgtggcaatgcagagctccttgtagcaatagttgctcttatctgggctcagttgggtgatctcgaagactcgaactcgttcacagagccttttagttggctttgccgtcactagcctttgctctagtcttcatgtcagccacattctatcatgccttgcttgctacaacaagtcacaatctttttatagttcacttccatcttctcggtgccacgtttggagcattctccgcttaaaccccgcctcaattttccccggaaattatgctgcttctttggttagttaaggttacagggtcacgttgttactgttttgccaacaattttagactttattaagagacgacattaaagtctttgacttaaaacgagtgttagttaggtctttttttaatatctcgctttccaagacacctttctggtttaagacaaagtcaaatactcaaccttgaatgtttcctctaaatatttctgagtaaataaagaccaatacttaatttataggtgaacaatgtgctcttggcacgcacatggacatggcatgatggcacgacgaggcgagtttaaatataaatgtctttagcaaatcctcttccatttctcatctcctttttccacttggtaagtcttttgtctgcctccctcttcttggtgtagttgactttttatatatcggtggtttaaaacaagttatgtgatggatttcaggattaagcatggac

SEQ ID NO: 34969 - DNA, 4847 bp, Arabidopsis thaliana landsberg
tggactgtcagcatttcataaaagattacctgtctaacacagagaaccccgttgcaatcaacctttggtgctgtgtttagctttgggatgaactcaaagaatccccagcccctccacctgaacggtagggtttgccattgaacgctactgtttccgaccttaaaatcgaagctgctaaggcttttcacgaagtgtatgcaatgttcaagaggtttgaagttgaggagctcctaggttacggttctatagatgactctattaccctgaaatttctagttggcacaaacggggtcatacggattaaagggagatgctcaaaacacgggctccttagataccgcatggagagaggggtggataattggaaagttgattgcaagtgtggcacaaaggatgatgatggcgagaggatgttggcctgtgatggatgtggtgtgtggcaccacactagatgtattgggatcaataacgctgatgccctaccttccaagttcctttgtttcagatgcattgagttgtacagcaagaaaccaaagcaatctaaaaaagagcgtggatctagtcaagtgcccaaagctggctttgtttgtagaggtgagtcagctgctatgggcagtggatctaatttatccgtaacacttagagtaggctgactgtatttatgatctttctgtatataggttcttatctaggcacaaaactgcaaatggcttaaggtttctacccgtgattgtaactaacacatgaccacttcaagatttcaatcctaagcttaaaagtgttatgtaaacatgggattaagacatttatgaaagtcgaatgttttgttttgggatgctttgcattacctttccttcttcttttttacttgctcctcattcataagcctcaccagcatttccttgtatagtcagcaatctctaagcatcttccacattcagaaccaggtcactggcgtctgcctccatattatgggggtactccagatctgttatgagcaatcaagaagctcaaagataccgatctgtttatgttttaaaccatacaagagaaaccaactataatagattattaacttttcacataccaaaatatcaaaactagtaagcaaataatttgaacaaacttactggtagatgaaccggattctaccttcttactcggtgctgcacaacttcttaaatgacttgtccgagacaaggtttatcctcagggacaatttttgccttccttcagtataattggatggatgaacttgagaaaagaatgcaaggtgcgcaggatttgtctgcaattgtagatcaagtaaattattactacatagtaagtatttcaataatcactacagagaaataggatatcgaacgtaaaaataaatacactgctttcctaaggataaaaaaagatctataataataaaagcaagcttgagacatcaaatggaaacttgacctggaaagaatttacaccgaaataattaaaatattacatctagacctttcttagattgaagagggcacaagatgaaatatagttgagaaagttgaaattgagtagagcttaccatgattgtagcatacatgaggagaggcaagaactcatctgctcctgccagaatatggtcatttgactttgatgcatcaggtttctaatgagtgtgcaacagcttcaaaagagttgattttcagtaggtccttctgtgcaagctacaagaaaagccatgttaggcgaccacttaagaaaggagcactatatatatcttgcacttgaataaacttcccacgctttgtgttccacaccatcaaaaccgaaaacaacacaaagtgttaggctattagccagcacataccaacaaataaccatcatcatgaaacaacaagtagacatcaagcagattctaagcagttgtatcttgtcgacaatctgctgggcgtctcgacatcctcggtagaaggtgggaaagccctgatcatagttctttcctgacttatttcttcaaaccctacaatgatcagaaactacatatcacaaaccatattgccataaaaagttgctgatgatgatgaacacaaaagaggatattcatgtgatggccacaaagggtaatcaaactaacctccaaggcgcaattgataatttcatctgttccctaaaaggccgtttccatggcgacaaagaatttctgaagcttattgctgcgagtatcatgatccattgtttagaacgaatgctatgctaagaatctgtaaattatcaattcaattggtattcatacaagaacttgtaatcttcaccggaacgaaacaaaacaatataaatccgaatcatacaaaaaccttcgctttgaagaatttaagaatcctaagtgatcggtttcatacctcaagataaatcgaccaaagatcgacggaagcatcacaaccttcattcatccgagaaaatcatcgaattcaacagattgatttcggctcgtcttcataagaattgaaaaccctaaccctcgaagaccataattctctcgacggcaagattgaattgatgaaaaaagaacattcgaagaatcttccttgggagctctagtatctttctccaatgtttttggcactagaagcagccatgtgaaaacgataaagaagaagaagagaagaatcgtgaagaagatgaagaagaagaagcaatagcatcgtcgctgcaacaagaagacatttgttcagggaaagagattattaaccaaagttaaatttcgttaatagttaggttttcagtttcacaagtacgaagcctaaatgggccgtatctaggcccaataaaaattagatctgattactttaaaaaatcattaattcgtccgagtgaagaagaaaagggtttagggttcaaagaagaaatggaggagaatcgtcggaatccgtcggccggtatggaagttccagttgccggcggcggaaatgtcgtcaaatggattgagatatctgttccttcaccttctgtttcatcttctagtatcggtgctaattcaagtgaggacaatgagtgtgttcagcttcctttgtctgaagactacgcttctagctctgtaattggggaaccttcgatctctttcgtttggagaatcaacaagacgagtccaaatgctctcgagcttcttcagctctcagctaagtctggatttccaataacaggactgcgtttcgtctttgctcagactctttctccttttgcttttgtatacgccgatgaggttcgatttcactgtcttctgcattttttggatcttttagttttgtttgtgtgtgttgaacttgaaagctatgaaattgaatgtgtcagggtggtgatagtggtcgtcttgtctactttctttactctctcacgccgtctggtgttgtctacgttcttaaactctcgaatacgttagcatataagtctggttcagtcttcccgcttgatcatttgattcacttggatgttcgaccttacttgaacgagagtcgtgttactagtgttgctgcatcgcctggtttcatttttctcgggaggtccgatggttgtgtctcttgcttccaacctattgtgtattttcagaaatcttcaggtaagattactctgcattaccttagtatctcaatatgatgtttcttctagtctcttacttatcattgatttgtttctgatcaggaaaccacaaggagctgcgtgatgatacaggatttggtcgtctgtggggattcgtaaggcatgtcttttagtatagtcattagaaaaataatgttatcatgctgctttacttcatgtacttagaagaaataaactacgctaatgtaatgctatcttttgctatatgtcatatatttcccctgtcgtgatgctcatctaaataacctcttatagattgcaatgcagggggacagttgttgcagccgtgcaagatttatttatatcagaagttcatggaagaaattatctatgtgtgcttcatgctgacggggcattacgtgtctgggatattttgacttatagcagggttttatgtcagagtatagctgctaagaaccttgagggtaattatctgttagttctacttgtgaccattagttgacgttattttattatcttttaccttgttttcactctttttttcatgcttcttacactaggggttatgtgtgtgaggttatggttgggcaaagctgattacgattctggcatcattccattagctgtcttgtatagaaagagtatggtaagcgtttacaactgatggcttgacttgagtgtgacataggtagttatttctcttgttctaataaccttttcccaatatttgaagaatgacagcatggacgtgatcactgtatatggcctgcactttagttctgcggaggggatagctttgtctctagattctggattacagaatataccactggaagaggtacattctttgggctcataattgtgacaaatacttctgtattccttttgctcataactatgttaacgactcccttgtttttccgttactggcaactttgttgaatttgcatatcgactttggcagggggaattgcgggatgtcagatttacatccgacatgaactggactttattggccaatgcattaacatcttacatgtgggggcagatatctagcaccatgtgtttccgagactatttttttccttctgtcttggttgagatacttcgtactccataaaagcttgcattatacatggtgtatgaagaacattgattctatgcgcgtcttcttctctctggtccgctgaagctttgaatttatacttcttggaaacataaatctagaatattgtaggtgaatttctgca

SEQ ID NO: 34970 - DNA, 7021 bp, Arabidopsis thaliana landsberg
cttgagtaccacagtcggacctctgcaatctttgcatgcttcttggatatgaagggttttggacacttttctttctttctttctttgcgttcctaagcttcctctttctttttatatgtagtagtctacacaacatagatcttttcttatccttggtctcaattatttccttgaattgcttaagacgaactcacatgttttattaccgcaataggttatcggataaaatttactcgctagcgggagaggtactgaaaaagttggctgccgtagatgttactcatcgcaagttttttacaaaagaactctcagagttggcgagtggtttgagttcctcaactgtccgtgtgctggcaacactaagcactacacagaagatgagtcagaatacatgttccatggcaggtgcttcaattctccgtgttctgcaagtgcttagctccctaacttccactattgatgatagcaatgtgggaaccgacaaagaaacagatcaggaggaacaaaacattatgcagggactaaaggtggcattagagcccttgtggcaggaacttggccagtgtatcagcatgactgagttgcagctcgatcatactgcagctacatcaaatgtcaatcctggagatcatgttctagggatctctcctacgtcatctctctctccaggaactcagagtctcctgcctcttattgaggctttctttgttctctgtgagaagattcaaactccgtcaatgttacagcaggatgcaactgtgacagcgggagaagtaaaggagtcgtctactcatggttcttcatcgaaaaccattgtagattctcagaagaaaattgatggttctgttacattttcaaagtttgtggagaagcacaggcggcttttaaattcatttgttaggcaaaatccaagtttgctggagaagtctttttcaatgatgctcaaggcaccaaggctgattgattttgacaacaagaaagcgtacttcaggtcaagaataaggcaccaacatgatcaacatatttctgggccattacgtattagtgtccgccgagcttatgtattggaagattcatacaaccagttacgtatgcgctccccacaggatctgaagggacgtctgaatgtgcagtttcaaggtgaggaaggtattgatgctggtggcctgacccgagaatggtatcagttattgtcaagagttatatttgacaaaggagcgttactcttcactaccgttggaaatgatgccaccttccaaccgaatcccaattctgtttaccaaactgagcatctatcatacttcaaatttgttggtcgcatggtaatatttcagaaccttctcaatgcactcacctgattgttggtttttggttctctctgatgtgtttgtgatgtcactgcaggtggcaaaggcgttgtttgatgggcagcttttggatgtttatttcactcgttccttctataaacacatactcggtgtgaaggtgacctatcatgacattgaggcggtggatcctgattactacaagaatttgaagtggctattagaggtttgaggacctagcctttattaatctttatctattacaaagctcaaaaatcgaagtcaggtcctgctttttgagactcatatttgtgcctttttctgttcatttagaatgacgtgagcgacatactcgacctcacatttagtatggacgcagatgaggaaaaacacattctttacgaaaagacagaggttcgcttgatgtgtttttgttttttgtttttttggtgctttatcccaaagtgccactgtattgaattgatcatattatctttgatgaaaaaggtgacggactacgagcttaaacctggaggacgaaacatacgggtaacagaagaaacaaaacatgaatatgttgaccttgtggccggccacatacttaccaatgctattcggcctcaaatcaacgctttcctcgaaggctttaatgaattaatacctcgtgagcttgtatcaattttcaatgataaagagcttgagctcctaatcagcgggttgcctgagattgattgtaagttggattctattgatcaatatctatgtgcttatccattaagttattataataacaatctttttatttgttttagttgatgatctaaaagccaataccgagtataccagctacacggcaggatcccctgttattcattggttctgggaggttgtcaaggctttcagcaaagaagatatggctagatttcttcaatttgtccctggaacatcaaaggtagaccaatattagcagcttctgtccaattcacttgagagtctcattgagagagatatgtacaggcattttgttgtatggatggtttgatctcaattttgatatccttcctctattccccttttggttcgctagaaattcatagtaaaggtaacctttcatatgtttaacaagcggtgtacatgagtgcaggttcctccaaaagacatcaaggcactgcaaggtatttttggccctcaaagattacaaatccacaaagcatatggagccccagagcggctgccatcagctcatacatggttagaaatcattacaaagctcttttttattttaaaattttagttgttggcgtaatttaacaaatcttgttctgttgcagttttaaccaactagacctccctgagtatcaatataaggaacagcttcaggaacgcctgctacttgcaattcacgaagccagtgaaggttttgggtttgcttgaagaaagcttgtcgaaaccaacccccgtcacattaagaatcagtgaaaacccatcaatccttcattcttttgactcctctgtacatgtaagctagctttcatacttgtacattctttaagattcaccataaattgcttagtttggaaaaataaaagtctcatgatttctgttgtggcagatctcgaagattttcaggcaggataaggagaaagagcttttgattaagactgcagaatgaatagaaatcgcaagtggctatttttgtctgtccatattatgttagtattagtctatttattattagggtttctctctgtccccttaggattttgtatatcaaaaatcttttgaaatagttgcaaactctcaaatattagtagttgatatttgctatccattctagtaagcaaaataagataagaaaattacatattataactgctggtcattattttgattacttttttgactgttgttaatcaatcttacaaaaacgctaaacaggtacaggcagataaagctaaaacaactgatttaactgtaacgctcattggcatctttcctttgtcttgcctcaacaacatacctttatacagaggccagtttatgacaactagtactcctgttatcacaaattgcatccccattgttttcaaatctccaccgtctccggaaacaagtctcgcaaccgctgcggcgaagcagaagagattgagcataccgagtgttccgaggacgagatacatgggagactccactccaaactccattacctcttccttgtatctctctgctgcttcttcttctgctacttttgctgtgatcacaaacgcagactcagaaactccaagtagcttcttaatcgtgtccataaatccgaaaagaaacgagcttgttcttctataaagccacatcctttgctcgttccaccatccacggaacgtccctccgcaccacaagaactcggctaggctatatgcggtagctgcaacagtgacgtatccaaacggaataaaccacgagctcgagacctgaattcaaaaaccggacctggtttcagattccaagtttatacaaaaaccaaaaaaaaacagaggaaaggtatatatattacctttggaaacagaggaatgcctttgaagagacagagagaagtcaaaacagagtaaatgagcacaggtagtgaagatggagcccaaagacaatagcaacagtaaccaagtatcagtcctaaactgatctttccttttccataccaaaccggactatacttcgaaagcataatctgaaagtctccctctgaccatctcctctgctgcactagcatttgatgcaaattggtcggcgctaccccgagaaatgcttgcttttccgggttcaggtaggctgatttccatccgcgacactgaatcgtcaaaccagttattacatcctctaccgggcaaccatatttcacacccatctgccatggaaacaaacaaccaagaatttgaatgaaattgatagtgaacgttttaacttcattacaagaaacagtcataagtaagtgagtactaatcgctgccttacctcctttacccattgagtgtttacctcataagtgcatatcgcgagagccttaatcatctcaggctctaaaatttcgtgaattctctcagattcttcttttttttcttcctctccatactttcttccacagatcacatctcttctgtgaaagcatccagttccaatgtataacggaccaccatttccatccaatccaagaaattccaccttttttgttggttagttttcacattacaaaacataaaaaattagttaatagcagaatcaataattcacaaatccagaatctatcttgtgtttttgtgcggtccatctcttttattacttacatcaattcctactcgcatcatgcttccatacaaatcatttcttgtaacattgtcaaaacactgcggaaactgcacgaaagcaatctcttttccctctttctcatcgaggaggatgcagagcgcgtcgcgtgttgactttgagttgtttgcgtacatatcacagtccaagtttagtatgattttcccacaagtaattttcgaagaaaccctcagctgtaagagagtgaaacggtcacataaagataccatgttgccttgtggagcaagaaatttgttacttaccaatgcgttcattgctccagccttgaagttatgatgatgttgaggtctcttttctcttgctaaatacaccaacgttggtattgctattgtattcccttctcttccatctaccaaaacctgacatttaatgaaaccaaaaaaaagaacacttagatttagttttatcgattgttgtaataacagaacataactaaaaagccattacgtacttgaagaatggttccatggtttcttcgagtagcgtcagcatcccactgtgaaaacccgtcaccgtacttcacccgcgcctcctccggtattcgtcccagtctcgccgccgtttcaatcctcgccgccatttctctatacagcttagccacctcctcagccgcagaatcaagacagtttgccttggaagacaagtaagcagcgggagatgttggctcaacgttgaacttcttgcagaagggaacccaagttttagcaaactcagctgcctccgtgagagcatagaacgtcagctcagaaccaccgtcatctgagagataaacggcgagtttctccggtgggtagtcaagagccgtcacagataagactgtgtttaccaccaacaacggcggctcaatcaccggatccgccgtgcaaacgaagacgtcgagcctcggaaggtcgcttccgtatctccgagagagtctatcggagaagggaaatcgccaaaccggattccaccgggaagattgtgtgactacccaatataaaccgaaccaaatctccacaataaacataacaaaccagattaatcgatctaaaacggtacggttatcaccaatctcaccaattctgtagaaccaaatcaaacagatacacacgaaaaccgaggctgagaaaaaccggtacgcaatcactctaccggttcttctcctagtctcaaaaagcggttcaccgtcggcttcatgaaccggtctaatccggtcgtctttgtttaccatgtttggttctctctctgcaacggtgccaagtgagaaggtgagagggataagagaagtggtctctcagacaagtggaaaggttaagccttttatacaagaagaaccgaatttagtggcggctataactctggacattgtcaagaacaagtgtggatctcgagacactctcttacgtcattggaactgtcagctactatgtttctactttctatttcagtcaaataaggacagatagatagcgtcgacgatcatcttgtttgagagtacaattatttatttatcttatcaacaaccaaaaagactaatggttggtgatgaaaagtcagagagtagctatgttaatctctatttctttattgtattatcattgaatcaaatccactcagtgtatgaccaatgatgttgcagagatcttggtttcacaattgagataaaagggtctgcaacaatggtgatattaaagaacactctagtgactaaagaagaatgcagagaattgcaaaaggacataaatagaaatgagttctatatatataatggtactagatcaaaagatccattccgaggaaattgtgttccatcttctttttaaacaaaacctgcatcgagctgatgcaagcgaaactagtaatacaagtaaaggtgattgattcttatcttaaatgctgctcatcaaccagagacaaattccggtttcttatgggcaattcgtgttataagggttgtagatcactcagatcttctggtcatttccaagcttctggaactcattttctaaggtatcgaagatcttgttgccttcggtgtctggctcagggaacttaacgtggactgaaccatgtctgatcggtgcacctgatcctttaaccagagcctgctgcttgacataatcataaaggtcttggtggaaagagtgatccagagagaaacaattgtctactgttccatttgagatatgcctaccagatccagacccttctcttctacagaaatgtgggagagactcatagtccattatctgcaatatcaaaaaggttataagaactaacagtcatcttgcacaagagtaagactacttcttcttcatggggaaactgaattgcttaccatagca

SEQ ID NO: 34971 - DNA, 3149 bp, Arabidopsis thaliana landsberg
ttttcaacttttctcattgcgtaaaagattaatctaaaggttaagacatgatctgaaacaaaaacccaaataatagaatctctgtctctcctttcctccacctatatatctctctatacaaacctgaatccattagcttttgagtttcctacttgattttaatcataagtttctcaggttttagccgcaatctccagaagagttattcttcttcttttaatactttgggggcttcaaaatgacttgaggcactagactacactagcctcttcaatgcctccaccacatttgacactggaggcctaagtccaggctccgtctgaaaacaagaaataacaatccattctcacaaaccttgaacttagaagctctgaagaacataataacacaatagagaatcaacaatgagcgtaccattacgcagatggaaactatatccgcgaatgatgatacagattctggagcgtagagtccgcacaacgcgggatccaccatttcatccagagtatccatgtctttaagctgcggctttgcccaacgaactaaagactgttctgcttttggcctcccactgaagattagaggcattcaaaaaacatttcagatacttgtatagttctttatagatattatatcgaacattactactgtttgagaatggaacctgtcataaggctttcgaccagttagcagctcaagcatcaccacaccaaagctgtacacgtcgctcttttgtgtgtaagcggagggatctgtgcattctggggcattgtatccaactccaagattctgacttgtgcgctacagtttcaagagatgagacactttaatagatttgaaacaactctgtatctccataacactaatttttacaagaagctcacgtggtgaaagtttgccaagccatagtctgagaggcggggatttagctcattatcaagtaaaatgtttgatgacttgatgttcttgtgaactagcggaggcgaacatgtttcatgaaggtacctgacaaaagagagtttcttgtcacaagataaaaaatgaaaataaagaagagcagcaagtagctagttcgatgattctcctcaaacaaatggtttagataattactctatagctttagcagttccgagagcgattcggattctggtgttccacgtcaatggtttgctgaaatcatcagacaggtgaagaaatctgtgaagtgatccacttgtgaaatactcataaacaagcatatttcttccttgttctgaacaataacccacgagttctgccatattcttgtggtgaatactcgagatactcgacactatgtgtgaaaactcttccggattgccttttcctaacagagaagaatcaatctctttgactgcaaatttctggtaagaagaggataacaagataagagatctaaagaaagttttcttgagaagaaaatgtggaatgtaacaaggaaaacaaacccttccatcctgaaatttagctttataaacacgtccaatggttccttcaccaagaaggcgattcggcgagaaacaagacgcggtattctgcaaatccgctagtgaaaacgctttcacaccgcgtgtatcaggagagtcttgggaggtggaggaacggtcaggggtagcagccacttgggtagaaggtatgagatgaaaagtaggagagttcttgtaactgacagaagaagttcttttaacagaaggctttgtttccagtgaagtattagaatccactgtcttctggtgtttgaattcttccatattattgaattgaagcatctgagaggattgtggtgtgaagagtggcttgcttcggttggttcctttctcgtcgtcgaaaaagtgagaagaatcattagagttctttcttcgagaaatcaatgcaatcaaccctgcaaataaaatgagtccacctatagaagacaccgctattataactcctagtgtcagagccttgctgcttcctccaccgcctcctgatgagtttctgtctatgtgacgggttcccggaggtggtgaaggagctctaccgcttgaccacttgtttcctccagttctaaccaagaaatgaagaaaaacacattaatgcttttgcatcttttgattgtgtttaagggagaatgagagagataataaaacttactcaaggtttccaatattcttcaactcgtttgggatccaaccagtaaattgattgtttgctacgtttctgtcaacgcaagattcataaacaacattaatgaaagaaagttcatatttcaaggatttaaacgatgtgttatgtatatagcatgaaaaatactaacacatcatcaatctgagggaggtccctgagagcatttatagagcctttgaattggttttcttgcaaatgcctataattagaatggtaaggtgagtaacagtacaaaggagttaaatttgaacaactacttcgaagtgctttcttctcttacagtgttttaagacctgttagattggcaaaactctgcggtagttttcccgtgagttgattggaagaaagatcactgcaaaacatatactcaatgaagttaatgaaatctttccaaatctgctgcaaaaaaagaagtatgtggcttacattgtttcaagttttggaagcttttgaaacatgtcactgagttcaccattgaggttgttacggccaaggtttctgagtaaatacaagaacaggtatgactaaaagggcggggtgatacgtgggaaaagattatgcgaatgagtcaaattaaatgtctttggcttacaggtaactgaggtcgttcatgagagataccgaatatggcacattaccgttgaagtcattctcagagccatctctgcaataccaacacattgaaattgtgtactaatgaacatcatatattatggctttgtaattcgaagatacttacagataagtaagcttgtcaggaagctggtagggtaagtttccgttaagattgttcttgcttacatcactgttacaatgacaaaacagaacatgtagctgatatcatcaattaactgaatttgatcaagaagtagagattaaggagatgtatcgaagagaaaaaacattctcacaggtaagtgagcgatttcaagtttccaagctggtaacctaaagatccactgagt

SEQ ID NO: 34972 - DNA, 5563 bp, Arabidopsis thaliana landsberg
cccgaacttagctttctaaaactatcaataataggtaaaagagacttaagaatctgaacttttgcattagactctgtactaagcctatctttatcaagcttcttccttgtattatcaaaatcagcttgtaatcgaattttcatctctttctctgaagctatcttcattgataaagataaaaccttttgatccattttattcttctccttctcgattttgcaaaacatcgtttcgatttctgtaactgaggtttcgtctccgttgagaagagcttgtttatatgacctaattagggtttttacatctgcttgctgctttgaattcgcttcttcattgttattagtctacaaattataacagattcgaattagaagaagctttaaaagcaaagaacatgtaaatatgctgaagaagaagaacttacttggtgagcagagaagattgggaattttcgactgggttttgaaatgagtggagatattggtgaaggtctgccatggaaatggaggttgtttcgtaaaggtaaggtttttgatgaagaagatggagaggagaaggagaagcaaggagatatggaaggatcgattgcgaaagaaatcgccattgttggatttggtagtagtaatctcagtgagtcccaaaggaaaaaattctcagggcacaggcaagagtaatctcaaatactcatctgtaaggacagtaaggacatttccaatggtgacttttaaatatatatattttttaattagaacatgtatattgatagttttagaagtgtttttttagaacaaatcctaaagaaaaatacaaaaaattaaataaaaaaacataagtttgttaaagaatacacatgagcttaggattttttgtgtttgttaaggactaatacgtgtcagtgtgattggtaaggagaaagagattgttttactattatagatataaatgtgtatatatatactatatctcaacacataaaaattagagaatctgatttaaagatgaagctggtgattgtaattattacatgttaatattagcgtaataaacataattattacgtaagaaaaaactttttaattttgatttataatcacataagatattattcttatttgagtagctacagaaatttaggttggttaaagagtggattgagcagtgaaaataattttagacaaaacaggcactttccaaggttgagacactgttctttgtttttggagtgaaaatagaccattatatctcaaataaactgaatcacgaaaagaagaacaaccggtcattggttttggtttgtaattgtgtgtaccaacacgtgtagaataatgggttaattcggatcaaatgaacgtgttaagatttgcagtttaaatagaagttaatgagaaataatgaccgtccgatcatataacaattaaacggacgagaagatgaatttgtctgcaaacataactaacttgcgttatgttaggtcttcagagattggtttcacaacataactaacaagactttgatagcaatcttatgttttctgtaaacaattaataatagaactaagaatgttgtagtaaaaattgactgcttttcagtaataataaatatacatgttctagttatttaattttatgcctacctgattatccacaacatcgtgtagatccatatcttgatagagagagattttatactgaaagatataataatgatgttgtgaaattattatacattactaagacatatttacaaatgatagatagagtgcatcgatagacagttgtagatgataagaaatacttccattggagataacccaactttgggattatgtgtgggagatgattgagtatgttggtcaagtttggaactgatatcaaatactagatcaccaacaaaaagtgatgcctccaataagaagattatttaaatatctatccaaaaaatactgtccaatattacaaggactgtaaatcataaagataatttagtgtacatgtagaccttcatttgctcattagaattttttttcagtttggggatctttcaatgattgggatgcaggaagcctctccaaaatgttctgattgagttgaagtagaaatgaagatggtcagaaaaaccataagaaacacgaccttcaataagaaaaaaatgtaagaaagtatccaaaaaatcatgtccaacgtatcaaggagcaagcgattaataaaatttggtaccccattgtaggtttgttgacttggatgttcccacttgtatcgaaaataggatctgacacaatgttcctaacctaaattttgtttttaaagtaaattagtcaagtaatgacttgcaaactaaggtggggttttaaagtaaggagtgtccaaacaacagtaccttcatgtttgcgtatgaatggacagatttctttggatgacatcaataacgatgatcacatgatgtgcaaaagcaagtctaactgatgtattcacccactcgcctaaagaaattaacaaagttaaaagtttgatattatgtactctaaggttttctattgactaatcacattataatgaccaattatatcaacacaaatggataagtcaaattactcttttacaacttaataccagacaatcaatgttgagtagcagtaagaacaaagttaaatcaatatcctaatctggccataggatcacctaaagctctagcatccaagcttacatattatttcttaaatcaatgatttgatttcttccaaaatgtaagattaagaaatagaacctttatgtggctttttccttgaattatcaaacaccaagttgtgcagtcatatatagtcgtggacaatgattttcaattttgtaacgacacatacgctgcaaacaaaatgtgtggttgtccattacggattgtccaagtgttgtagtccatatgttcatcttctgtccaatagagaacctcaagtactgaatttcaaacaaactgggcagagaagttatcaaacattatcacagaattacgaacaagatctccgaagttaacatgacaaaactttaccttagttgttccgaaattcttgaacttttctcgaagtaacctcaattgaaattgaaattgagtttggacggtacgagttaagggtttttcaggcaaagtaaatccaaatcgatttaagaaattgcagagatttagaggaaatgacaagagaattgggtttggtgttttacggttgaaagagcaaacgagagtgtagtgtgaaaagcactggtggtggacagtgacggaggagatggatatcccgtcgccggagtccccttttcgagaaattgtaatttaggattttttattggatttggatttttacgattctggaaaaaaaattgaaatcacaaaggcaactacaaaatcgtgggctccgtaaatctgaattggtttagtgaaaatggatttgatttgtttggttatagaaaaccgacgatatgagggtgaacaagtaattttaattattcaaagtgcctaatgatttttaagtgcctaattacggataaactttcaaaaaagtgtctaatcacgtaatattctctaattaatattaactttgtatcatttttaaacaatgtgggcaaaatgatagttatatcaattatttaagggaaatttgcaagaataactaataaaaaattataattcattaactaaccattctaactatgtaactataatattttttgtattatatgtaatattactaatttgttcttgttgtctcgataccaccattagccaccaccaccgccggccaccaccgccggccaccaccggtcaccaccgccggacaccactgcctgccaccaccgccggccatcaccgctaactccgaccaccatctattccggtcaccaccaacaccggtcaccgtcactgtcggccaccatcaaatccggccaccagcggctacttccaagccaaagtctggagaccaactggtgggcctaactgaacgcccaaacattggcgttggaacaccgtcattgctatgttcggcgttttccttgtgtgcatccccatcgccaagctatctgctaagcttgaggtatacttcattactttggtccttcattacttcattactttggtccttcaatacttcattatagtacgaataacatatgagtagaagggaatagcttggaagttgatactggaatctacgcatattcttccctcacatcttctttgttcttggtctatgtttgtcaatagttttatcggtttgtggaaatagatttggatgattcaaggaaccgattgtctagctattgaatgttttacagtagatattaattgctacctgcatcctgcaaatttggatgtttgggaccatgcagtgtgtgtgaagatattctaacagatagcgttagtttatatgttgtacactagtgtgtttttatgaaacgaacaaacttcgtgtacccagttctgtatggaattcttagtcattgccattaattcattgggcattagtgtatcagtgactgtatagattgtgtaatatctcgcaaaatgggaacctatccgtgatgtttttctctgacttgatttagatttgcaccctttgagctccccaagccctgtttcccatcaccatgttactttgtgttgtagcctgtatggttttgtaatagctatgggagatttcattgattatttttgtagtttgcctggttctttgagaagaattcagttgaatgtgtagttcgacactgaaatcttggtttgggtgcaaatgcctgaagacttgcaattgctcttataaattgtagcctaatgcttgagtcccttgtgacaaaaaatctgcacttgaattgttatgttttgtgtatgtccgtgctactatatagtttccacttcttgtttgatgttcacaatttgagaaaagccctttctgatttcagcaaaggccacacatgccagtacgcccaattccttcacagatctggtgcaagaactttggaaccaaggacgattacgaaaaagaacattaaagttttttgcttggtttggagagaaccctttaattggtcttcttatttgcagacaatgtgagcataaaaaaagcgcttctagctttgtctatggatttcatagtgtactgtgaacataataatgtctttttttcttgccatgtagaacaacaccatggaatctttccaaattaagaaatttcatgtttcttccatattccaattgataatataggggtgggttttatctgaggcagaagcagaatccatgtgggttttgaatcatcattatacgattttacattaaggcaatggaatatacaaattcacatgaaacatgaaccaatcttataaatgaactatttctctacactagacgaacaattacatcatacttaagatcttattcaagagtgatgattaattgaagaaatcctaatcaaagctaattgataaagatctaaaatttcaaagaactgaacaaattcaacatgaattcgacactcgatcttaggaacaaggaatcattgttatggaacaagcattgaattatcttt

SEQ ID NO: 34973 - DNA, 4108 bp, Arabidopsis thaliana landsberg
agaaaaaaaaatgccagcttcatatatctggacgatcctgttttagcagtaccttccttcaaataagggatgagatcggcacgatcttgcggttttttcagtccaggaaacaccatttttgttccagggatgtactgtaacaagcaaagaaattccacaccaattcaatcaaattgagatcttatctcttcataattgctcaaaaagaaacaagcgacccaaaagtgtgaagaaaggagtcagtattagccaaacagcattttcttgacagacaatattatgtttcgatattctagaatatgcaatataataaattggaacactgttgagatgatgatgcacacacaggttatgatgcaccagcttaaagagtgaaagatgaatcataagatttgtggaaaattccacaaatcagctcaataaagagacaatagacaagagtgaaggaaagactcaagtattaaccaaaacaaatgttgctaattgcttgatattcttgaacatgcaatagaaaacaaatggcacaacattgagatgttgcacttattagtgtaccattttgaaagatgatgtccaatttcacaaatatggagatttttgcaccaaaccgaaatgaacaaacaaattgtgtttctagatcaacctaacaatacttaagaaggtataaagactcataattccttttgcaacaaatattctaaaactaaagaccactaatccacaaattagcttatgaacaatcaagaaccttaatcaccagactctatgatcgaagtccattaaagattaaagagcaatcaaataccttcttaggattcaacaagtaatcgtaaagagtcttctcctcccaattcacagccatgcttttgttagcagcagagtaagaatatcctggagttgttccagattgtcttccaaacaatccattcaaattcggtcctgaattcataacaaaattccaaaattcaaaataaacacatacggatcctaaacaaacacaaacgaagatcaatacgagaaaacgaaacgcatgtggtagatccagattcgaacaaagcgtaaccaaataaaatcaaacgatgatgatacagaatattgtggatctaagagagaatcagaggaacagaccttgtttgtgaccggcacctttctcgacggtgtgacactgagcgcacttggttctgaagatcttttcaccggctttggggtttccgggaggtgcttcgtcgaacgacgccatttttttcgcttgagctacgcgatcaggaacaacaagagaaaatgattacggaactctcgtttctctggagcttgccgaagtttccttagggtttcactgtggaaaaagtgacctctcttaaaaaagcagtatctccaatcttaatgggcccttaatgggtttaggtgggctcatatttatttcatatataatgctgtttatgcttgttactcatacttgcaaaggaccatcccctagttcatgtaaacttatgtttacaggaaatcatgcaattaaaacttgttgtatataagatttatgtacaaattgattctccagtttgataaaatatttctatcagaatttgattatttatcctacttctacaagacgttcttcatctgaactttgctcctgattgatgacagaatcatcgttcatcggcttattattctctccatctaactccgaatctgtttccatcaaagcaaactcatgagccttttgcacgcctaagtcactcagtaaagtcttcaccgttacaagcttgctccaagaaccagttactgcatggatatctggaagcaacatatagtgacctaagtgttctggctttgtttctagtagtaacttatctgcagcccactccccaatgtttgtgttcccgtggatgaggcacgctttcagtagagtagcacacatagcacttgatggctcgtaaggtattgtatggaatatatctctggctttatccaggtaacctgctctgcaataaagatcaaccatacaagaatagtgttcaaagcgaaggcgtataccaaacacatgctccatcttcgtaaacaaccagtgtccttcacgcactaaattggaatggctgcaagctgataaaactgcaaccatagttacatgatcaggtttgataccggatctgtccatatccttgaaccatgccaatgcgactttttctttaacccagcctgccatatccatcgatcaaagaagtgtatgtcactttgtccctcttccttaatgaatcaaatactcgctttgcagctatgatttcaccggattttggatacatatcgacaagggagtttcacaggattaaacagtccttgtagctttggcgtcttaagatgtagcagtgaaactctttcccatgttgcaggtttcccacccgagcaaaaagagggagaatgctagcaagcgtaatgtgatttgggtgaaatccagagagcaacatctccttgagcaggaaagagggttcttctgatctctcgttgtatgcaaaaccggaaatgatagaattccatgtactcaaactatttgcttcaacctcctgcccctataaacgcgtgcctaagatcactgcatcttgaggtacattgtgatcaaggaattccgaacattgtcaatatcatgggaaaaactacaactacggatcgcaaggcaatgaaatactttcccccactttaacgctccaatgtgtgagcatgcctttaaaccattaatcatagctacagaacctattcttacattgcaatttctcatcccaacaacgcaattcaaagcccctatgtaatttcctgcctccaaacaacctccagctattgtgttccaagttacaatactcgcttcgacaccagagagatacattctatcaagaagcttaaaagcttcccctaacttttcttctgaagtataacagttgattattgcattccatgagacagcatccctttcagacatcctgtcaaacaatctccgagcaacatccactttaccaaatcttttatacatagatatcaacgcgttgcagacatacaagttacacctgtgagagctaacctcaatagagccatgaacaactctcccatatgcaaaatccagtaatgctgcacaagccttgataacagacgggtaagtaaattcatccgctctaattcctttactcatcattcgcttgtaaacagaaacagactcctgaaaccttttgttcctaatatacgaaccgatgagcacattccacggcaagggatgcaaaatctcagagttctcagtaatggtctgagcttcgtcaaggagattaaaagcagagtagaaagtgaccaactttgggaccaaaacagagtcaaactccaaacccgacgagatacaatgagcatgaagttgctggccaggaacaaactcattaaaacccacacatgtagatagaagagaagctgatgaatacaaaacgaattcatgagaaccagactggtagcgaagtagagagaaagttctgaaagcttcatataattgaccatgggaaatgcaatgtctaaatgaattgaaaagcacttgtggaactgattcatcatcatgggttttggaagttgctgagatgggtctcggcagctgtttccacgattgaggaataaacttgcaaatttcggatacagtgagacctctgagtatagagcgagaaggagaagacggcatatacagtaagctgcatatgatggcaacgaatggattttgattattgttccaagactagtttgatccatcaaagcgaaagttcaagcaattttgcttctccgtctgaaagtcaaaggaagaaaggtgagaaagataaaaaaaaagtttcgttgaggaatttcatcgaacatgtggtgagcgaaacataccgtatacagacgaaacatggaagtataagtacatctagagaaacataaaagagataagacagatgtcatgtaggaagaaaaaggaaagaagacagtgattcggagacagtatcgacggaaccggacgaagcgaaagtaggagtagccgcgcgtgaaggttatgtacaaagagactcctttttgacatttattcaatgttctggcatgtgctcagatg

SEQ ID NO: 34974 - DNA, 816 bp, Arabidopsis thaliana landsberg
  unsure (1)..(816): unsure at all n locations
ttaactctcagtgggtgttttgaatattgatacagctcagaaggcttgcaagcatgtcaaatgttcattcccaataggtgtactcgatgataacgattctttttggggctcaatttgtgaaaaaggtaatctactccttttttatggttctgcaaaattattccctcttttaatcagatataagcttccccaccaaaattttttctaatttcgttcacttctatatgtcatcaaattatgaactttaacacaccattcttccttaatccgcttgatcaagctgtgtaattaatgaaacaccaaaacacatatgtgtaactatgttatgttaaatgatttctacttcagatttggaaccgccgtctcaaagaccaaagacatcagcgaaaacagctcaacggttgattgctcacagcatgggattgaagctaccggcttctggattcgggtctaaagagcgagaccaagaagctgcccggaaaaaccggattgtctcgagacagaaacaacgggaagatgcttggggagatgactgacattaaccatacagtttggtttgctcaattttccagcttaccggagctatatttcgtgtgtctacttattggtatatacaacctcaatccacttgagtgatcccttataagcattgctacttgctagtggttgtttgtagtgtttttgtgtattaaatttaaacagtttaaaaatgctttaaccggaaatgaaatctggacccgttattataatattatccaaagttctagacccacccggtttaggtagaggggcaataatgtanataacgtattagcg

SEQ ID NO: 34975 - DNA, 9059 bp, Arabidopsis thaliana landsberg
gtcctttctattaaaatatttgctccatcattaaaaatcgaaatagtcggaaaaagaaaaaacaaaagcgagaccaaatctaaacggtccggagaagaagctagcctatcattaccgagagaccgctaaatccgaagccagagccgaccaccaatgttgattaaaccaccgatgtcagaaacatagccggatgaatatgcaaacgaaggcatctacaccggaagcaaagccaatctataccgttgagaaagctggtacaaccaaacgacaaacccacctcaaatgagataaaagtcaacgaaaaaatacatcagagaaatctgagagaatgaaaaatgaaagagagaagagagagaaaccttagaaatttgatagtttatacatcaaaaatacattaaaataatttagttttaaattgtaatgctacttgccgtaaaaaaaaaaaaaaaaaattttgaaatactacttagtaatttaaaaaaagaaaacaatattcaaaaaatttccatgttagcgcaaaaaaaaaaaaaatctataatcaaaccaaaccaaaccgaaacaaccaaaaccaacattaaacctaaatctcatgatttttgatttgaataaccacgagttcaccaatccctcttctacattcagtatttaaaatctttataaacacagttagacacataaacgtttctgaaaatcttgaataaccaaaaatgatccataatgataatgatgttacattgggccataggcccgttaaaatatttttctcttgctgttattgggcttggtactttatatatacattatcaaaagacgagaaaatctccgtcaagatgcagagatctactacgcttgagtctgctaaggccatgcattcgactttgattcagcggccaaaaaccggatctccattactgatgctgtcttcagaaaaggatggttgtcgctgtaatagtgtgtacaacccagaagatggtagggtttacgagccgaagagtgacttttccgggtatcaattcctgggaagctcaggtaagtggtttctggtggtagattctcgaatgaaactctatattatagatgtatttagcgagaagaggatcgaacttccaccactagaatcatttaagggtagcctttttaagattttgcgtgacggagaggagaatgtcaagcatatgcaaatggctgataacgatccatttcgtgatgaatttcctcatgctgccgaagatctgagaggtcgtttgtgggttgaagacaagaatggaaactacgttgttgtctggcagtttgaaaagaaccaatttctagggttttgcaggacaggggatgatcattaccgcgagattccaacacagctcgaggttcagagggagttacgaggtttatacgatatggtacttaaaggttacaatctttacgtctttgccacccgtgagttcattcgacacttggatttgtctggacaagatgaagatggtttcaaggatgtgtccgagaaacataggcttccaatgtggatgccacgtctgactatgaaggaacgttgttgaaccaaggattcacacaatagatttgtttagagagggaaaacaaatctagtaatttctcttcattaggtattctatccaagactcgattacaaaagatgttctaatctcttatgaaatacattagggttttaaaaaggtatagctgcatccatgatagattgcctacgtaccctgtgaagggatcaagccattcgtagttctcactaggtataaagttatgtgtttcttctgagtatccaaagatccccttttgtgaagtccctgagacactttatatagggtcgttaaaccgcctctctagcgatattcttcggaagattcttatttatccttaggtcggttctagaggataatcgtcctaaggatattctccttattcttcggaggttttggggagatttcctgatttcgacattatcttcaaagattctcctttatcatttccgaaagtcccataaaagatcctattttaccggaaatgatccttggagaatgaacggtttttacaagtctttgcctcgcgtgttcttcacggctcggtggtcgtttgagaggtggcttcggggcaaacggtatgtaccggctcggggcgcgcttgatgactccgttaagctcagttggctgtctcccgagccgacatagatgtttcccgcagcgttctcatgattggctcgggctgtgttcatatgattaacacccgagccattttgcaaactctcttcgggacggtcgatcgaataaggtcccgaggtgctttgttcttagctaggggccaatcatatgtttaatcatgaggtgattgttattcttagactgtttggctcggtcttgcttgtcggggaatccgaccctaacagttagccccccagctcgttggttaagagttaatgcgacgagcttcatgaatggtgtgaccgagccagctgcttccgcatctaaactgactgatccgtatcttttgagagtaaggcttgttttttcttggtgctacgagattctgttcttgacgggtgttgctatctcgaactcaaaatgttagctgttgacaagttgtgagctaggaaagctgctaggagacttgttgaagaactccaagctgttgacgagctgttaggcgggcaatagcaagctaggaaggctgccgacgagctgttagctgggcgaactacgagtcagaaaaactgcagacggactgtggtggttggctcgggtacaaattgcctgagtcaaagctgggttcagtatacttcgttccgagctgatcgtctcggtaccaggttgttcgggataactggatttctaagcattgagaccaaagcagataagaaactgtatttagccgaagcaaatctcggcaccagtgtttatgataactgggttttagtttccgaggcggttgactcggtaccagtgtgtttagagtaactggatttcagtagacttgaatacccacggttgcgacccgatttgattcaatcttttaccagcgtttagaaacgagctggggcaccggtgttaagtataaccgggtttcagaagatagaattcatagcctgctcggaaaaacattcgagcagattcttatcttgaatatttatatagcacgctgtaaccgaagcggtgtaaatgaaactttggaaataataggccgtcgcccgttaaaatatttcaaagtaaaaagatttagaaatcaaattccaagaaaatttgaagtagaaaaatcgaagttcaaatttaaaccgaaacgagagtttaaaattgaagtgggagtatggatatacggaccccactcccccccctttttgctcggtagacgagtgtttttgcaagtttacgcaaaaaatatagcagagaatgcatatatatgattaagctgtacttgttagattataatagataacacttatcttattggtttggacatagagatgatgatatctacggcatggacgatctgaatctctgagattgtaaacgtcgttgtatgaaaatctacatttaagatgttgttcgttagaggagatctcatctttgcgtagaaagagagaagcaaggatgaatgcttgtgatataagtgaaaatgtcaatcaagcttaattaatatgtaagaaagtaattgaacttatcttttatgagggaggtcgtcgagacagaattggagatcgcatcattgatgaatgagtggaaaccttgagcgattgctagtgatgatccattgtcacttgttggtgtaatgtacttccttttgctgatttatagaagaactgataacttccgtttgaaccgttaaactattgatcccaccgttgaatctttagctgatagtcatacgaagattttgtccgaattttagtcagatcggatattgcctgaggcttctaccgtcttatgaagttgctgtgacaaagtgaatttttcttcctttgctatatttgtttttggtttcggttgctccggtagcaacatacgatcctcagtgaatataggaggcagtatccagtgatgcttactctttggctgacttctggtgatctttcttctttacttctctttcctttgaattttcattacacgacatgattttgtgagatctgaacaacgtcttgtgattaaggaagataaagcagaagctctccaaggcgaggaagggacgatttttcttagatatatgttgcgttctatgcctccatgacacatggtccgtggtgatgaggcgtggcgatgacgtgaagctttttaaattgaagaccatcggtgacgaggtgaagacgtgaagcctaagatgggaatgttggtggaatcgtcctggaaacgacgatggacgtaaaatcggtcacaaaggtggctgatctgatagccgcagacatgcatctttgggctacagccaggacgtgcttgtcgcagaaaaacagtaataacttttgttagacgtaatcaattgaggcaaggatgaatccgttagaaagaagccttgtagcttcaaaatgatgtgcagatcggctcctggttccttttagatcgccgggaaatcgatctcaaagcagacagatcacgtgtcgacagatcacgtgtagacggatatgcttgagagaaaaacctataactcggaagacagcaccaaatggagcaaaatcgatcttgttggaaagataagcctcagagcttcatgatgatattaagatgggctcttgatgttttctgaatcgttgggagtttgctttctaatccagttgctcccacagttcgaatctgcgatttgacaggtgtcatatgtttcattgaaacagtgataacgcttaataaacagctcggaattggatgaggtcggtctctattgaaagataagcctcggggctttcagttgatacttagatcgcctcgtgatgccttttagatcgccgggaatttgattccgaggtcaacagatcggatacagatcgatctgtattttgtcagtgtcttctgcagataaacggcagtatctccgagaaaacacaccctaacgaagtgagatcgggcttgttaaaaagaggagcctcagggctttaaattgatctgtagatcgtctcctgagtctctcaagatcactgggaaattgagcctgagttcggctggtcggatagagacgaatctgcgcttgaaagaaacgccaatatcgcttggaagatgataggttgaagatacccttggctttcatgaagaagaaagtgagaagtggaaggcgagctcgagtgtgggaagcaaaggcgagctcgagtgtgggaagcaaagctgagctcgagtgtgggaagcaaaggcgagctagagtgtgggaagcaaaggcgagcgagtatgaaagtggctaagagtaagaagtgaagtgttgtgaaacctctaattgttctagagggtttcactttccttctattgttgcgttgtcgtttcaattaaactcgagtgtatttaatggagcccaacctttagggttttccttatcttatgaaaaatcacattaatcatcttaacctaagtttcttctgcctctcatctcttctcttctcacctaactctatttctgctcgttgttaggcttcgtgcttaacagaccctttggtcactcgttggttgggtgaatgtcaaacgctctccatcttctaccagctagttcttggcacacgtgtctccgatatccgcgtccaagaggatcgttgtgtctgccatggagctctttcttcgtacaacgttgatgtcgtcctcaatgacgtcatcagatttgtgtccgagacccaatctgagatcataatcttggagataaggaccgagtttggaaagaaagacccttttgaattcgagacttacttggttgataaattaggtcaattcttgatacatcaagacgataacttgttcaacaagccggtatcagagattttgccgaaaagggttatttgcatctggaaacctagagaatctccgaagccgagccgtggtggaattctctggaactcagattatctaaaagataattggatcgatacggatcttccatggacgaaatttcagagcaatttgaagcatctgagtgagcagcaaccgatatcttctaggaaattcttctaccgggttgagaacacggttacgccgcaagcagataatccggttgtgtgggttaaacaggttactgatcggatcagaaaacacgctaggctttttatatctcagtgtgcttccaagggatatggagataagttacagattttgtccactgatttcattgaaggagattttgtcgatgcctgcgtcggactcactcacgcaagaatgaagggacagtttgataagatatctccaagttagacaagcattggaaccaaatatatttatttgcttttgacttacgtatactataagttacattatttacaaaggcgtgtgtgtgattttcgccgatgaactttatgcaaagtgtgtgtgaaccctttttacttttccttgttcataatatcttaaatttgtaatgtttgagctctaccgttctccttaagtaaaaagaatatgttttagtggatgtcatgactaaagaagtataaaacctaattatgtaccactttaaccattaggttgttagaaatttctaaaaattaaaattggagcacgatgtttgctggattaataaagagagacaagctggtgtccttgactgtgttatgttgtgtcataatttgcttgcatccaaacgtatcaagaatcatgagttattaacgaacaagaaactcttcacaatcagactcaatgcatttatgttattacctaccacaagccgtgccaacttggacaagcccgaactttgacacatatggacataatctcatcttagttaacctaaggcttcaaataaaacccaccctcatggttattacaattttcttcgtcctcttcattcaagattgtgattttgtcctgcatatacaataatttcttgctttaacattaaatatgtcgggctaaccatgcatgcacaacattgcgtatttgttgattacaatactaattaatctatacaggaatttatcagtttagactttagtcagcattggaccgttatacatagtctccaccaacattcgaataatgttgttgctataattatactaagtatccgattcagtttctgtatataaaacgtctatttttggagagcctttcttcttccttgaaaaattcggagaaattaacgtttcaccaatatttcattttcctctctgtctctctctctccccgcctcgctccaccgtcgtctccggcgatcaaagccaccatcttcattaactttcaattggattacacaaagaaaatctgagttataagagtttcttgattgttgtttctcatggcggatattgtgaaacagatcttagtaagaccgattcaattagcggatcagataactaaagcgtcagacgaagcttactcattccgtcaagaatgtctagaggtcaaagccaaaacggaaaagctcgccggtctcctccgtcaagcggcgcgtgcaagcaacgatctctacgaacgtcccactcgccgtatcatcgacgatacagagcaagtcctcttcaaagccctagccctcgtagagaaatgccgcgccacgggactgatgaaacgtgttttcaccattattcccgcggctgcgtttaggaaaatcacgatgcagttagagaattcaatcggagacgtttcttggctcctacgtgtctctgcttcaggcgatgaccgtgacgatgagtatttaggtctccctccgatcgctgcaaacgaaccaatcctctgtttgatttgggaacaagttgcgatactgttcacaggctctctcgatgatcgatctgatgcagcggcttccctggtgtcgcttgcacgtgacaatgatcgatacgggaggttgattattgaagaaggtggtgtacctccgttattgaaacttgctaaagaaggtaaaatggaaggtcaagaaaacgcggctcgagccattgggttattaggacgagatccagagagtgttgaacagattgtgaacgcaggtgtgtgtcaagtgtttgcgaagattcttaaagaaggtcatatgaaagttcaaactgttgttgcttgggctgtctctgaattagcctctaatcatcctaaatgtcaagaccattttgctcagaacaacatcatccgtttcctcgtgagccatttagcttttgagacggttcaagaacatagcaaatacgctatcgtgagtaacaagcaaacattgtcgtcgatccatacggttgttatggcgagtaatacgaatccggcggataagaaggagaacaatgagcaagatgagacaaaaagcaatatttcacatcctttgagtaatcaaacaccgagccagatgcatagcttgattgctaacacattggcaatgaagggttcaggtcccagttcaggttcaggctcaggttcaggttcgggaactaacaagaatcagataaaacagagcaatcaacagcaccagaatcataccaagggtggttcaaaccctagagggaacaatcctacgcatgtttcattaatgggcacaagcattaaaggaagagagtatgaggatccagctactaaagctcagatgaaagcaatggctgcaagagcattgtggcaactctcaagagggaatctccaaatatgtagaagcataacagagtcaagagcattgctctgtttcgcggttctgttagagaaaggagacgatgaagtcaagtcatattcagctttggcaatgatggaaatcacagatgtagcagagcaatatccagaactgagacgttcagcctttaaaccaaccttttctgctgcaaaagctgtagaagaacagttacttaaggtgatcgaaaacgaaaccctggacctactaatcccgtgtataaaatcaatcggtagtatttcaagaacgtgccgagcatcggaaactaggatcattgcaccactcgtgaagcttcttgatgaaag

SEQ ID NO: 34976 - DNA, 5278 bp, Arabidopsis thaliana landsberg
cacactgttttttttctatgccttagatgaatgcagactcaagattatatacaatgtaacacacacttcctgagccctcccccaaacttaaatcacacagtccactgtgtgaccaaatttggaagagagtactcaggacaaaacacatcatagaaacaaaataaaaacaggagatggtataacacaatggtgaagtgaggtgcttaccttagttgaaaaaggagcggatttggtcgtcaatagctgcctgtgattgctcccagtctattgaagaatctccctgttgtgtctcagctccgccctgtgggtactcgatctcttctccttcgttgcggccatcaccgcggtcgagtgaattcctgatgaagtcgtattgcatcaactatactcgatcacagcttcgttcgctccccgtatggtgtggtcgagtattctgctctcttcttctactgcggccagcaccgcggtcgagtaatttcctggcgtggagaagccaaaacaaggtccaatgtctttgattggctctgtggtcgagtgtattgctgttccctcaatgccagaatctatttccctcagcttttcatacttatctcctgaaaacactaacaagatgcatcaaaaacaacaaggaaaattaaagatatgtacaaagataggcatgggacttcctcccaagtgagcttgttttaggtctctagcttgactcctcatactcattaagcgtttataggctcctccaaaggaacataagttccttctggaataaactgatctatcatgtatttctcgagccgctggccattgactttgaagtctccattctttccagctagactgatatcaccataaggtcgtactgcagtaacagagaaaggaccagaccatctagacttgagcttgcctggaaaaagcctcaggcgagagttgaacagcagcacttgatcaccaaccttaaaatctcttgagactatcttcttgtcatggaaagactttgttcgctccttgtagattttggaactctcataagcttctaagctaatcttgttgagatcgttcatttggatcaaccgcttctcctcggcggttccaatgtcgaagttcaggagtttaactgcccacatggctttatactcgagttcaacaggcaaatgacaggattttccatagaggaggttgaaagaagtcgtgccaataggggtcttgaaggctgttctgtaagcccatagtgtgtcattgatgcttagcagaccaatctttccttgtacttcccacagttttctctaaaattgcttttatctccctattggagatttccacctgcccgctcgtctattgatgataaggagtggctaccttgtgctttactccatgcttcttcaaaaggttctcaaaacccttgttgataaaatgtttccctccgtcactaatcacaattttcgggactccaaatctagggaagataattgtcttgaacagctttagcacaactctagcatcattggtgtggctggctatggcttccacccattttgatacatagtctactgcgaccagtatgtacttgttcccgtaagaagaaggaaacggacccataaaatcaattccccaaacgttaaagatctcaacttctaagatcggattctgaggcatctcattccttctgctgatgttccctcttatttgacatgaatcacatttcgagataaattcctaagcatccataaacattgatggccaccaaaaaccagcttgcaggattttcgacactatcttgaacgttgcaaagtggccaccataggcagacccatggcaatgcaataggatgccttcgatttcgtcttctgagacgcatatcctgtagatcttatctttgcagagtgtgtagagataaggttcgtcccagtagaaatggttaatgtccttgaagaacttcttcttctcatagctcgacagatttggaggctctttaccactaaccaagtaattgacgtgatcagcataccacagaagcttttcttcaattgcacatacttgatctaatgattttcgaatttgagcactctcgttaagttgctgaattgctattagctgttcttctggcatggagtcgtcaatagggacctcgtgttcaattctcatcctagacagatgatcagctacaccgttttcaattcccttcttatcaactatctccatgtcaaattcttggagcaataagatccatctcaacagcctaggtttggtattcttcttcgcatttatatgcctcagagcagcatgatcagtgtaaactgtcaccttagaacccactaggtagcttctaaatttctcgaatgcaaataccacagctagcagttccttctctatagtggcataccttacctgtgcatcatccatcgttctgctcgcgtagtagatcacatgtagctatttgtcgatctgctggcccaaaactgctcctactgcataatctgaagcatcgcacatgatttcgaatgggaagtcccagtttggtgcttggactattggggcagtgaccaaagcttccttgattaacttaaaggctgtcaaacattcttcatcaaatgcaaactcggtttccttcacagaagtctggtgagcggtctcgccaacttggagaaatccttgatgaatcttctgtaaaatcctgcatgaccaagaaaactccttatgtccttgacagtctttggcggctgcaagtgcatcatcacgtcaaccttagccttatcaacctctattccttcctcagaaattttgtgccccaaaacgatgccttctctaaccatgaaatggcatttttcccagtttagtaccaggtttgtctcttcacatcttttaagtaccctgcacaggttcaacaaacacgaggagaaggaagagccataaacagaaaaatcatccatgaatacctctaccatctcctctatcaaatccgagaaaatggaagtcatgcaccgcttgaaagtagtaggtgcattgcaaagcccaaaaggcattcgcttgtaggcaaaggtctcataaggacaagtgaaggtagttttttcttgatcgtttgggtggataggaatttgaaagaatccactatatccatctagaaaacaatagtagggatagtttgctaatctttctagcatttgatcaatgaagggtaaagggaaatgatctttcctagaggctgcattaagcttcctatagtcgatatacatcctatgtcttgttatggtcttagtgggtatcagttcatctttagaattttttatgactgtcatacctccctttttgggaacacaatggactgcagatacctaagtgctatcagatatagggtagattatacccgcgtctaatagtttaagtatcttttttttaccacttctttcaggtttgggtttaatcttctttgaggttcaatactagagtaagattcgttttctaaatgaattctatgggtgcatagaatcggtgagatccccttgatatcatctagtgaatatcctatagctctcctatattttttcagttctgtaaatagcagattaacttgatcggtgtttagctcatcactaatgataataggttaagtagagttctgtcgaaggaaaatgtaccttaacccttttggcagcggtttcacttccacctttggtgccttgagttcataccagtcgccggatgttagatcggcttcacagggaaggttgtgatcgagtgcttggtcgagtggattgggtggacagtctgttgaatgacgtgatcgagtatattctactcctttgcgtttccaaacaaatcctcatactcctctggattctaaacttctttatgcatatctaacagcttccggtaccccaaagttttcaagtgtaaatcttcttctttcccattctttgttagagcattttgtagatgatcctcttctgctagctcttctagcagttcatcagccaacatatccgtctcttcaatccagaagacctttccttctattgtaggcttcttcatggtgttagtgatgtcaaaggtcatcttgagttctttgccaatgttaagattgatctttcctttcttgacatcgatggtggctccaactgtagctaagaagggtcttcctaggatcaaagggtccctgggttcttcatccatttctaccactacaaagtctgtaggaacctccatagtgcctatccttactggtaagtcttctagcaaaccatgaggtattctgatggatctgtctactagaatcaaagaaatgttgcaagccttttatttactgaaaccaagttgcttggccactgagagaggcatcaagcttacggattcgcctagatcgcataggcaccggttgaatggtaaagggccaagtgaacaaggtaaagtaaacgagccaggatctcctaatttcttaggtgtgatcttctgttcgatgattgcactacactcgtgactcaataccaccattccctgaacttctttgatcctttatgtgatcatatccttcacatatttgttagagtctggtataagcgcaagtacgtcgacaagaggcatcgtgacttcaagatttttcaattgtttttccaggagagctttgtacttctgtatcatgaccttctaggatcgaccaggaaatgggagtgagggttgtaaggtgggggaacgaagacgttttctttgttttttgtagctgctggtttttcaacaggaggagaagctgcaggagctggtggtcgagtaagttggtcgagtacagtctcttcagttgtcttttcagctgaatcttcatttggaccgaaaccccccccccatcttgctctacactgtcctcaatgtttttgtttggactttctactgtgggtaattgcttaccgcttctgagcgtgatagcatgagcgtattcctttgaagtttgtattgactttcctgaaggtctagtaaatttgggagcagaggtggagctagtctggccttctatgtatctgatcttacatgttagtgcctctaccttgatattgatatcattgtaactggaatcaaccttgttatgaatttcggacatctttttggctagatccattgctccagctgcttgtccttgcagaatctgctgtatcatgttcttcaagtctgaatctggagttgttgaagctggttgttgttcccgctgatcgttgccttcgtactgctgctttggaacatacccctgaccttggttgtatggaataaagggcttgggttgattctgccgctgataggg

SEQ ID NO: 34977 - DNA, 6603 bp, Arabidopsis thaliana landsberg
  unsure (1)..(6603): unsure at all n locations
aaagcatgattacagtatatgtttcaggtttcgcaaatgacgttgatattgcatataactacagttccgatccagtgtccgagtatctatcttttgtggacaatggcgatttctctgtcgatggtgtgctctctgattttcccttaactgcatctgcatccgttggtaagcaaaatctcttcttcagacactttttttatttgtctctaaaacataaaactcaaacattttcttttcatattttcctcagactgcttctcccacattggcagaaacgctacaaaacaaggtaatgagagtattgatgcttcacattttctttctgctagctcttactaataaaaaaagaagaagaaacttataataaacattatcatctaccaaatggttcattgctcagtggattttcttgttatatcaaaacatggtgcgagtggggactatcctggatgtacagatttggcatatgagaaggcaatcaaagatggtgctgatgttattgattgctcagtccaaatgtctagcgacggtgtacccttttgcttaagatcgattgatctccggaatagcacagcggtccttcaaaatacttttagtaaccgcccaacttttgttcctgagattagctcagttcctggaatatacacttttagtctcacttggcctgagatccagagcttgattcgtaagtttcccttcaaattttccaaactgcttcagacaaatgcacactcttgttgcctgtaactaatcagagagctttgtttcttgtcctacttaacttaaagaggttacatatctgtaacaagtttatattctcctacgttgtatattatgtggtcaaaattactggccacttttgagattacataacttggagttataataactactctcttattttttttgtgcagctgctatttcaaaccccttcagggtttatagtatttttaggaatccgagagagaaaaattcagggacgctcatttccctttctcaattcctagacttggcaaaaaattacacttctctctccggtgttatgatcagtgtagaggtgagttcttagtgtacctcttagtcttaagattttatcaatccgaccgttatatcttctatgtttttttttggtttcccccagaatgcagcatacttgagagagaagcaagggcttgacgtggttaaagcggttctcgatacactcaccgaagctggttacggcaatggaacaaccactacaaaggtcatgattcagtcaacgaacagctcagttctagttgacttcaagaatcagagcaagtacgaaactgtctacaaaattgaagaaaccattggtaatattcgtgactcggccatccaagacataaagaaattcgctaatgctgttgtaatcaacaaagattcagtctttcctaactctgatgcctttctcactgggaaaaccaatgttgtggagaggttgcagaagggtcagctcccggtttatgtagaactgtttaggaatgagtttgtctctcaagcatatgacttcttctctgatgcaaccgtagagataaacgcatatatctatggagctggtatcaatggaaccatcacagagttccctttcacagctgcaagatacaaaagtaagtggttcatagaaccatcacagagttcccttgcaccaaaaggtctcacaacacaaaatgatcaataccaatgcctaactttgtttatcttttgcagggaatcgatgtttgggtagagaagaagtaccaccttacatgttaccagttaaccccggtggcctcttaggcgctatgaatcctctgtccttacctccagcccaagctccagatctaattatcacagatgctgatgtcattgagccaccactacctccagttacagcaaaatccccaacctcaaccccatcaaccaatgcacaagcaccaagtggacaaatccggcacactctatctcttctcctctctgtttttgcctctcttctacttctgtgatcaacctttgatctcatctcctctctgttcataatgtcttccaccctagtaaatatttctctgtgtatctcagtcaaatcttaaaagtcgcaagtcgcaaccataatttgtttttcacctggcgagtctttgtgacaaccgttctttttctttgcagtataactttcctatgtggatacgaggtttcacagaatacaacatcgcgagagacacttaataaacatacaccatcgactacgagtagagaacttatctccaccatggttatgattgtgcaccaaacacaacacacataaaattagttcaagtgatcaagggttgggaatgctgaattatcttatacttgagaaggtgtctgattaataaagtaaccagtagtactaaaaatgcattctcgtaaaaaaacaataaatgtttgcttgatactacaaatccaataggcaagtaaggccttactttatttttaaggatatatcatcgaccaacatcatgacccttacgtctacaatgtgaacatagagttctctgttttcttctcatgcacaagagggtgaagtttttaacgcatagttcaccacttctagaatactctcctgcgatttgttctgtgtcttaacagtctcttcgcgttgcagagtgttgtaagtcgagtttaacgtcggcaaaggatcacgggagagaagtaaaatctgaacgttgcgaagatagattcatcgagtccagttaattaagacctgatcaatttttttatctctgtaataccggtgccctattttttattcaacacagaggtaaaaattcatgaagaaactatatcgcaactttttttgagttgtgttattgtatattaaaacatgtgttctatttgttatgcaaataacatatgaccttcacgacgattttctattgacaaacttgaagattccagctttgagtttgtggagaaaacctgcagtatatcagaggtacttgaacgctcctctgaattccaaaaagattcgaaaaccgacgaagctgaaatttgctgcaagacaggccttggaggcacttcaagggcttcgaggcttccttccatcatctctaccactttgttcatcggtggccggtttgatggggaagactgaatacaccacaaacccaccaatgtcatcttccttgctatcttctcttcttcgctactgattgcaatctcgataagccctccattttctgtcttctcgatatccttaatgttggccttctcaagatccttatagatccattctggaaaatatattgagcttccgtccgatggagagttttgatcaactctttctttcttccttgcacctatcatttcgagtaccaacattccgtagctatacacatccgacttatgagaaacactcccataaagtcgagagatcatctctggtgcaatgtatcctattgtaccccttgtatccaacaatgataaaatgctctccttcttctcgcagagcttagcaagtccgaaatcagaaactttaggacaaagattatcatccaacagcacgttctgaggtttaatgtcgaaatgcacgatcctcgttttgcatccatagtgcaagtactctagaccacgagcaactcctagtgcgatcccatacagtgtcttcaagtctaaattcaccgagatcttgtccgatatgaatctatcgagtgacccattacccaaaaattcatatataattgctcttcttgaaccttcacagcagaatccaagcagtgaaacaatgttgacatgagaagtttggctcatgctggcaacttcattaatgaagtcttcaccatcagtaccctttgaatctttcaagacctttaccgcaaccatactgctatcactaagggttccgctataaacaattccaaacccgcctctcccaaccacctccgtgaatgactttgtcattttcttcacttccgcataagtgtagtgtttgagtggaatcagagccttcagcttctgtagtctcacttcatctgatgtttttctctttcggaaaatttggactctgaagcaagggcatagtagcactagaaaaactataacaacacctgttaatgcacccagagctgtaaaaaaaacagagaaaatcttctattatagattaaaacttaaaaatcaaggaagatcgaaagtactttgaaatatgcaccacactaacctataaaagtatacctgaccagagtcgctgtaaaccatgaaaataaataaaaattgttagcatagaaccaaatttaatcttgaaaatgaacaattaactcagagaagacaatggttaagggtattagggacaatgtcccacatcggaagttgagtaggatcttaagtgatatatataagatatgggcctctccacctattgccaattggttttaggttggaagcccacattttaatatggtatcagagcccgatccgcacatacacaacccgatccacatcggtccggcccaatacttggcccgccgatccatgcccaaacatatcgagatcaatggctagaagagccatcatctcgagggggcgtattagggacaatgtcccacatcagaagttgagtaggatcttaagtgatatatataagatatgggtctctccacctattgccaattggttttaggttggaagtccacaatctaataaaaggaagataactaaaagtaaagtttaacttgaatagtgcttacgcaccaatgaaccgtcgatgccgacgaaaaaatccatctataaaatggcacaagaaagaaaccttggttagagctgaagactgaactttgaactttgaaaaaaagtttccgcggccgaaatcttaccatcgtattcgtatccgcatttaccatctttacaatagcacccgaacccacttgaagtctgattatatccacaagcaccgccagaacctcggcacctctcacaatctgatgtaatcaacatccgaaaaccttgatcaagagccatcttcagattatcttgatttggccttgtctggagatcgaataacgcgggtccagacgcaggaacactgacgtttcttttgcacatttccctcaagttgttcaaaacgcctctagaactgtcaagtaaaggagaggacaggtttctcgtcacatagtaacttcttccctcatcacaaccaagctctccaaagtagctactaggaaaaggagaagtagcagatgaattaagttggcagtcgtaatataatgttagcaactctgtgtcagcactgaattgaaggactgtttcgatgagaggctcatcatttagtgggtttgggggacaaagatcgttgagatagtctgatctggcaagtcttttgttagaagagtcataactcatatttaagattctgaaattcacggaggctatgttaagctctgcgaatcctccgctacagtcaagcttgaagtcagggtggccacaatattctcgaccaggtatccaaaaggggtaatagagatttctctgattgccgcagctaaaccgttcactacagcggcgcctaagctcatcagctgaaacataaaacaaaaatgggatcacaaagagcatcatttgactttaagacagagaattcgtcaacaacagagatagcttgatcattttgttatactcttgttttgtttccttggaggccactcaataggattaggtgagaaacttaccgctaggttgatgttgtggtacgcaagtaactccaccagaaagtgaggttacgttgcagcatatctgtgtggtactgttgaaaccacagattccacgactggatgaacattcttgacacggtnnnnnnnnnnnnnnnnnnttcacttcaaaccctttttttaaaacactttccaaattggtcacattcaactctttctctttgtatcgaaactcgtaggaaccttcacggtgaaactggaacgacagctctcaggatttttttcagggctttcagacactgagatgggacctatctcaggacatgtatagctagaaaggttaggaagcaaagaggagcattggttgaatatagtgacgctcttgtaggacggtgaaagctcgaaagtttcgggaggcaaggttgtgtttgtgaatacagaggagcaaaaagaacctagaaggtcttgtttggtaagtgtaagagtgttagatgtttgatctagatggagaacagagtacttttggtttgagatgaataaagaggtgatgttgtttttgttgcagtgaagctccaatgatggatgaccgcattctttatgacgattcccacccgagaaggggaaaccagcggtgatgtttccgcactgaaacaaagtctcacaccagccaagtccttgattacttgaatcacaaggaagagggtgaaataaggagaggaggaagaatataactagacaagaagtgggaagatgatacatgattagttcggttcatgaaaaatgtgtcttcttagtttggtttgtgttgagagaagcagagtaaatgaattagtgagatacagacacagccagagagacaagaagcctcaggaccatgtcaagtgggagactgtcctgaggaccatgtcaagtgggggagagagaagcgtag

SEQ ID NO: 34978 - DNA, 10070 bp, Arabidopsis thaliana landsberg
  unsure (1)..(10070): unsure at all n locations
ctgatgaaatgagaagcaaaatatatggttggaatgattcgaggaggaatgggtgatcagaattggagtcgtttagttttctggttgattctgttttctgggttattggtaataactttggaagagaatccagaaaaagatgagatttttcttagtcaattcatggccccatcaacagggcaggtcaatgaacatatggtaaagatagtttttttgcttttcaagcttgtttgattattttgtagctctctagtgtacttttgatgggaaagttgcgagacattgctttttgtttcttgctgaaagctatgttttagagactgagattgcatttttgggtttgtatcatgttccctgtaagaatctaggtgtctgagaaagagaattatgatcattagcttgtatcctgctatataaagtcgatgggatttgaattatgtgttattcatgtaatagtcttgacttacgttttaatcaatggagtcatattcagagaacaatttgttgctgctaaagctttcagttcactcttgtcgctatcgtgatatttttgcgtttgtaaggcattcctatggtctgtgtgtgataaaactagaagatcaagtagctccgtagtagattttatccagacagaattgcgagtcatagcttgtttcttgctgaaaacttaggtttttagagacttagatcacattttttgtttttgattcatgttctctataagaaagctaagatcatctcagacgactcttgcaaaatagtttggattcgccatttgtaatcatacttggatttatagttggctctctcttatttactgctatgcttttcaaaatgttttgtagctcttatagttgtttctctcttgtttgtacaatgtttgacaggaagaaacatcatgggcgcagtgatgttggcaagattcagattgtgtgaaggaagctgtggcagcattcaatttatgttttccaggatcaaaggatagtagggaactatttggtttgaatcataccaatctgaagcagactcttcttgattgtatccaagaaaaaggaaagttaaatggtcataaccccaagtatctggagctcttatcatctatgcttgatattccgaggagaaatctagctactgaacctggctcttccccttcaccttcccgtcctcctaagcgtagtcgggggcctccgcgcccacctactcgaccaaaatccccacctcctcggaaatcatcttttccaccattaagatccccacctccgcgaaaatcatcttttccaccatcaagatctccgcctcctcctcctgctaagaaaaacgcttctaaaaattcaacttctgcacctgtttcacctgcgaaaaaaaaagaggatcatgagaaaacaatcatcattgctgttgttgtgactgcagtttctacgtttttgttggctgcattattcttcttatgctgcaccagggtttgtggaaatggttcaggaggcaggaaaaatgatgaacggcctcttctcagtttaagcagtagtgattactctgttggtaataatatctccactttctcactgtactaatctaacaagaaatttcttgaattatagagactaaaatgttttttaatgttttcaggttcctccatcaactatggtggttctgtcaaaggagataagcagggtcatcaatcttttaatatttattcaaaccaaggaaaaatgtcatctttcgatggaagtaactctgacacttcagattcgttagaagaacggctatcacacgaaggcctgcgaaataatagtattaccaatcacgggcttccacctttgaagcctccacctggaagaacagcttctgtactttcagggaagtccttttctggaaaagtggagcctcttccaccggaaccacccaaatttcttaaggtatcctcgaaaaaggcttctgctcctccaccgccagttccagcaccgccaatgccatcttctgctggtcctccacgaccgccccctccagctccgccacctggttctggtgggcctaagccaccacctcctcctggaccaaaaggaccacgtccgcctccaccaatgagtctgggcccaaaagcaccccgaccgccttctgggccagcagatgcattagatgatgatgctcccaaaacaaagctgaagccatttttctgggataaagtgcaagcaaacccagaacattcaatggtttggaatgatataagatcaggatcctttcagtgagtaaagttgttagctttttgcctcggtatactataaccatataactttggcatagttactgaataacttgtgatggttttccaggttcaatgaagagatgatagagtcgttatttggatatgcagcagcagacaagaataaaaacgacaagaaggggtcctctggacaagctgctttacctcagtttgttcagatcctcgaaccaaagaaaggacaaaatctatcaattcttttgcgtgctttgaatgcgacaactgaagaagtgtgtgatgcacttcgcgaaggtaaccttcttttctttctttttccttaggtggaaaataagattttgattttctggcaacattctcctatgtgttcgctaacataattttcgttgaattaggaaatgagcttcctgtagaattcattcagactctgttaaagatggcaccaacaccagaagaagaactaaaacttagattatactgcggtgaaatagctcaactgggatccgctgaacgattcctgaaagcagtcgttgatatcccttttgctttcaagcgtctagaagcacttctatttatgtgtacactccatgaagaaatggcttttgttaaagaatcatttcagacattggaggtacgtttcctaatcttttacaaaaactttgttctgaaaagaaaaacatattacagtttcttagtctttctcaagactctttcttctccaatctaaacgtatattctttggtgtatatgaaaggttgcttgtaaagaacttaggggaagtcggctgttcctgaagctcttagaggcagttcttaagaccggaaaccgaatgaatgatggtacatttaggggtggtgctcaagctttcaagctggacactcttttgaaattagcagacgtcaagggaacagatgggaaaacaacgctcctccactttgttgttcaagagataattaggactgaaggtgtaagagcggctcgtactatcagagagagccaaagtttctcaagtgttaaaacagaggatctcctagtcgaggaaacctctgaagagtcagaagagaattaccgtaatcttggacttgagaaagtttcaggcttgagcagtgagcttgaacatgtaaagaaatctgcaaacatagatgccgatggtttaacagggactgttcttaaaatgggtcatgctttgtcgaaagctcgagactttgtcaactcagagatgaaaagttcaggcgaggagagtgggtttcgtgaagcgcttgaagattttattcaaaatgctgaaggaagcatcatatccatactcgaggaagagaagagaataatggctttggtgaaaagtacaggggactatttccatggcaaagcaggaaaagacgaagggttgcgtttgtttgtgattgtgcgcgattttctgataatcttagataaatcctgcaaagaagtcagagaagcacgaggaagacccgtaaggatggccagaaaacaaggctcaacagcctcagcatcttctgaaactccaagacaaacgccttcattagatcctaggcagaagctgtttccagctattacagagagacgcgtggatcagtctagttcagattcagactaaaaagtacaaatctttggtttcgttacctgttaggacataattcatctgctgttttgctgagagctaatattccgcatgtgtgagggcactgtccttcatccaatcgagtttatcgagtcttggtctgaaattcgtaggatctccactgaaagtgatgttcaaacgagacaagaacaaattcattccactacgtagagactgaggagaagatgccgtgcaatccacggaaggttctccttcatacgcaataactttatctgccaaatacgtagccattatgaaatcgtgcaaaagccgccttcttcatctgaagaatgaatctctttatgactttggaagctataattctctgctccgaatcaagaaacgcgctcggttcatcgatcaagtagatatccgcagatttaccaaggcataaagctaaagcaaccctttgtttctctccacctgatagtttgttgaagcttttatccatgagctcctcgatcttgagcggtttcataacgtctgacacgaattggtgttctgcatatgcgttagggatcttcctgtgtatcaaatctctaacagtaatctcaaatttacggtttgacatatgttgattcttgtaagaaacagagaactgtggtatctcatgtacttgagatccttcttcatcaatatcaagcttcgaacccgcaagcattttgataaacgttgtcttccccgttccattctctcccaacataactataatctgagaatccgtgaattctccttggttcaatctcagcttgaagtcccctcgagttatagtcattgcagggtaattgtaccttgcataagaagctacttcttaggcttgcaacagtctgcgttgacgacagggattcgagtcatacgatctgccatctctttttcccgatgaatcgagtaagaagactcaacttggagaattgttttttaggtcaaagaacggacttgtagggttttattagtcataaaacaggggaaaaaacggagcacgtggaccgtggttcgaccgatccaaattagctaaatccggctctctactaaccaagaacaatccggttatgatgtataaaggaaaggaaagtagataaaggaaggtgagccactaaagtcatcgtcacctccgtagcttccgccgttgccgttcagatgaccacctctgagttaaatccatttccgtctcgctccgtttttctcggtgtcgacgttggcactggaagcgcccgtgccggtaatccttctgtcttattccccgagttaaaatctcgtcaattttgaaaaattgtagtcttcttagattcgtgagaatgatgattgatttagtggcgatgaaatttgatcagtctactaaaaatcgattctttttaatgttgaaaatcgaccagcaatgcaattttggttttgtagcttaagttgattatgatgcaggtttattcgatgataatgggaagcttctaggatctgctactagtccaatacagatttggaaggatggggactgtattgaggttattatgttggataagggagatcatggcttatttgtttagagattaactttgacattgataatattattggaacagcaatcttcaacagatatttggcatgcagtttgtgctgctgtgaaatctgcttgctctcttgcaaatgtttcggatgtggaagtgaaaggaataggctttgctgccacgtgctctctcggtgtgtagaatctgcttataaccgtctttgtgtttggctgaataagaggagcttaacggtgacaatgtaacgtttatttttgtttgtagtggcggttgatgctgagggatctcctgttacagtgtcgtggagtggtgattcaagaagaaacattattgtatggatggaccatagagctgtaaagcaggcagagagaatcaactcatttacttctccagtcttgcagtactgtggtggcggtgtttctccagaaatggagccaccaaaagtaggtacaactttcttataggggttctttatatgattgctttctttgtgtttgagcttgacgaaaaaagatttctccnnnnnnnnnnnnnnnnnnnnnnnnnnnnnnntaaggagtcttggtcaatggtgtataagtggatggacttgagtgattggctatcctacaggtgcctcaggcctttttttctttaaccttttgttccctatgagataattatctttgcatttcctgatttcttttgtttctccctagagctactggagatgatacacgtagtttgtgcaccacagtatgtaaatggacttatcttggccatgcacacatgcaccagatgactgagaaggcttctcgtgatatggaagcttgtggatgggatgatgagttctgggaagaaattggtttaggcgatttggtagatgggcaccatgctaagattggtatgcatctctctttgtttgccccagctgctcagaaaggctcttagaggaactgtgaaacctctactttttaccttctgacaatgttatttctattgttatacaggacgaagtgtagcttttcctggacatccactgggtaatggtctaactgcaaccgctgctaaggtaagttctttacagagcaaccactaaaaattaagaaaatagaggtatttagatacaagaacaatcgctttatttcttctgtgggtcttagagcatacttactacttcttaggtctatattttcattctgttacataattcccttttatcctattgttttcattattcacaggaactgggtctgttagctggaactcctgttgggacttcactcattgatgctcatgccggtggtgttggggtcatggaaagtaaattagaatcagactccttgacgaaaggtagacttacttttctataatagtatagcgtaacctgacatatgagtccctaagaattggcattttcagagtcagatgtggataccttgtgctctcgaatggtcttggtatgtggcacatcaacttgtcatatggctgtttcccgtgaaaagctgtttattcctggcgtgtgggggcctttttggtcaggtactgacacttttggtttctattcttacaatttgatatatgaaatctcactcttgtttctccaaaacaaacaactattgtagctatggttccggagtattggcttacagaaggaggacaaagtgctactggagctttacttgatcacatcatcgaaaatcatgttgcttctccccgtcttgcaaatcgtgctgcttcccagagtagaaaatcttcctctttccacttctcttggcgaaatatttgattgaatgctataattgtcttatagtttgttttgcacttgccattgtctcgatctcgtgcagaagtttctgtgtttgaactcctaaacaacattttgaaaacgatggctgaagatacaagttctccatttatatctgcccttacctcagacatgcatatccttcccgactttcacggaaacaggtgactaaaacagagaattctgctctgtttcttctcttttgagctatattgattcaaagttgtgttacagatctcccgttgcagacccaaattcgaaaggagtgatattcggaatgtctcttgacacgtccgagaagcagttggctcttctatacctcgccacaattcagggaatcgcatatggtacacgtcatatcgtagagcattgcaatactcatggtcacaaagtaagttttctccaactttcttcacacatcgttctatagaaacagtacaagacatttacttcctcaggaaacaaaacagcctcatatttctctgtctctctacctgtgatgttagattgatacactgcttgcttgtggcggcctttcaaagaacccattgtgcatccaagaacatgctgatatagtcggtatattaccaaccacactcgctttcctcttctatattcgaaccaatcactaaaatgatccaggagtaatcttactaaacctatctattcataggttgtccgattattcttcctcgagaaagcgagtctgttctcttaggagcagcaattcttggagcagttgctggcaagaactaccctagtctccatgatgccatgaaagctcttaacgcagctggacaagtatactctgatctaactactttgtttgagtaccccaattcatacattaatcatgttatttatgctatttcttttgatgaattttcaggtggttcatccctcatcagaccctaagatcaagaagtatcacgatgcaaagtaccgtattttccgcaacctctacgaacagcaattgtctcaccgttccatcatcgctgaagctcttgcataatgtttctgatcaacaaaaactgtatagttctctgcaacatttaccttcctttttctatacattcacagtaataataataatctgttttgattgctcttcttgactaatatgtatatagaataatacaataatgtcatgaaacttgggaaattggaagtaaaacaaagaccagtgtgagctaccgaaaccaaaaccgtaacaattcgctacatgttatatttggactcatttagacattctcttataaaaatatcgaaactcctgatgaataaaaaatttatcttgtttcgataatgtcaaaaggtgaataataaagaaaatgaaacatcgatatccaaacactgctggatgacttagttccaaaaaaaaaaaccaattatcgtttataaaatactggtattatactattgttaacgaaaagttcttaattttaaatcttcctacccaagacttttttagggtggccaatctatagtattaatattacctactatgcataaactataagttatacacataaaaaaatactagaatacatgcttaattattcacaaaatctaagaattcaaaacaaattcaagtgtggctatcataatcgaacatgtacaccacttaatcatagagttgacactttctcccttataatattaaaaaaatcataccaacaattttctcttcatgattcttccaagcttatataaaaccataagcaaataccatttgttcaagcctcacccaaaatggcttttcctagttgtgtttcggttgcaatcacggctatgatgctacttgtaacatgttgtcattgtgcaacataccaagaacaattcatgggtccacaaaacgcagcaagagctcatttaaggctcaaaccgctaaagtgggacgccaaattggcccgttacgcgcaatggtgggctaaccagagacgcggtgactgcgccttgacccattccaatggaccctatggtgagaatctcttttggggctcaggcaatagatggggtccatctcaagccgcctatggatggttgtctgaagcaaggagctataactatagatctaactcgtgcaactccgagatgtgtggccattacacacaaatcgtgtggaagaacacacaaaagattggttgcgctcacgtgatctgcaatggcggaggaggcgtattcttgacttgcaattatgatccaccggggaattttcttggtaggaagccttattgagtatgattttatttgtatatctaaaaaaactcatgctaaaagaggttgttcttacgtattaactttatctctttttgtaaacaatgttattttttattggtaacgtgagatcgggaaaccaccacaacgtatgtttctcccaacattatcttatgtgtgatttatgcgagggccttcttttgactaataagaccaacgaatcatattaatatcagattttggatcgtaatctaaccaaatagacaaatattagacatttctacaatcttcttggatttgaggtcttttttgatgaaactattttctcataattttgtttgcaaagttgaaatttctcaagttgacagaagtaaacagcaaaaagacaacttttacccaacagagaaacgagaggggagcaggaactcttaaaccattccatataattagatcattccttgcactgcaacagacatcacttgcccctgtaataagatatataagggattgagtttgtatctcaacattcatggagagacgaattgagagatatgggaaagaaaggatctgaagaggataataatgatacttacgcgttcatcatgagagttatgttgtctcctttaagcaaaatccgacctgaaaatccagtatttgcgagagtagcaccaaaacaac

SEQ ID NO: 34979 - DNA, 4332 bp, Arabidopsis thaliana landsberg
cgaaagaagacgggagagaagaagatttgaaataaccaccctcgcagtaagagtaagccagtgatgatcagaaaacatcgccggagataataacatcggcggtgacgacgccttcacggtgagaagaatatgaagaagaaagaagttgcaaaaagatttggggacactgaacagtttagttaggccggtgggttcgattcgaatatcgaattgggcttttaattaagggtaggcccatcaaatgtttttttgactcttaagttaaggccattaatggcgatgtctctgtatgttaggaagtagttttctttcaacttagtaaactctctgtagacatttacgcgtaatcagtgatgtagcgagtcaagtcccaagtctttcatttacaacaatctttagtttatttggcatccggattagaatatgatcggttcattcaattggttaaagaaggtactataccgaactacactatgttcacatatatgtacacattaagcataccagatgttacagaatatagatacataggtccggtctagtcgggctgggcaacggggtcctctgggacaccttactcgactaatccgattccaccatgaattgtccttaaatgggcataacaaggttcttcttgagtgaagacgtctaagcaggtccaacaaatgtgctttccacaccggcacttcatatggttacacccatcagtcttctctatcgtcgacttgcaaatcggacactcctttacgttcttcccttttgcccagtcctttagcgacaagtccggattttccttgaactttttgtacctttcacaagtgattaacgggtgatactcgaggtgacaccttgtgcatatttctgagtgacatgctccacagatgaatggctcaccagattcttgaggtccagctacacggtagacggaagggcaatcaggtgtggagcaaaacctgaactttccatcactggatgttacaaaagaggacaaggatgcgctgaagagttcatcgagcttctcttgtgataagagggctctcatatcagcgagtactattggagctccacagtctatgtgagaacaaagtattgggaatgcgtcaaagtttctcatcgatgcctcaaattgctccaacaaacaagctttgcagaagaggtgtgaacatccttcaagagagtagccatcatcaacttcagacaagcaaatggggcattcaagttcaatctcatctggtttttcacccagtgcactcttttctcgtgcaagttcattgaccatcttttgtacttcctgcctcatttctttgcttccatgaacctgaataacatggtaccgggtattgagcttgagatcaacaccatgcaccttttctttgataccttggagctccggaccaaaccgcttcacaacttccttcatgaggtcaggacggatctcaggacctcggaggtggatttcaagttgcttgctctcatgataatccataagtgactgaaccagttcttgttctgccttggcaattttctcacttgttccacaaatgcgtattgtgagattgtgcctatctaatagaatgtaagtttctgtctcttgttggatcttccgcatcagattaataccatctctggacataagatgctgcacgactctaggtgtgaagcctggatggtttatgggttttcctcttaagagttcttcaagctctctccgcatctccgcaacgggtcttgttgcataagcagtaattttaacacgataagccccgttatgagttggttccagacagcattcaccccctacaaaaatataaacaaacgttaatgcacatcaaaatttggacaagttcacaggaaaaataggacacataagcttatgcattcttcaaatatcccttaccctacacgattgttcttaatcaatatcggagtcagaagtagacattcagtaaggttatttgttgacagaaaattaaagagcaaaagatcaaatgttgtgtagaaattttacctttttgtctctcaaaccttgctaataaaacgttcaattgtcttttgacagtgttgtagatagaagcggagcagattatggagctctgaaacaattgttcgcactttatcttctgccatggaagacatccaggtaacacctccccatttaactcttgcaaagcttttgcagcttcgagatgtaatctcccgtcaaacttaattaacgctcgcatgaagtaattgtcttcttttggttcaaaaacttgaacttggacacagtttggctctggattctttgctgacatgcgcgcaaatattctcttatgaagctcttcttcgcaagccgtaggagatgggcactgcacactgtatttttttctgaatatgaaaaaattcagatctcttctctgcgttctgaattccaaaacatctaaaacttctgcttccgaaagatctccaagtccacttatcaagatagaatcatttgactgttgatctctctgaatatggacataatttgttcctatctcaaggctggatatatcaccaagtatacggtgaatatctccggaagggcacttaagacatcctctaccactgctttcccttctcggccaacgaatcttagctgtcacggaagagaaataaggcatcttgaaaattcctccaccagttgacagtgatggaaataatttgagcactgatcctttgaaataaaatttctgaatttctgttgccttcatagcagattctggagtgagaaaggttattctaccccacttctccttctcatcacagtcttgcttgttcgcagcaaacttgtatatagagcaaatagacccatcaatcttcttctccagaaacgtcagaagctctctgtcatcaacaacatcatcgccataataaagtacatcgactgtcagaaatctctgatcaacttcaagatgctttatctgagcaccagatccaaacagtgcaataggtacttgtccccgaccatgatatagatacttctccaaacattcattatgcatccatttcttttcacattccaatgcatcgttcacaagggctgacactttttccatgtcgaggggaggcgcatacagtcgaatctcattctgatcaacatcgacttgaataccaatcctttcatccgaacaaagagacctagcacgagaaacaattgaaagcagactacgattagatttcccacagaatcgttttagcacagtgctgctacaaccaaccacttttttaattcggagcctccgctcatccatctgggatgcatcaaaaggtggtggtggatcaagcatatacaaagcttcaaaatcaaacgcagttacacataccaagtactggtccacaatagatagaagttccccgaaaacaacccagcttggcttctggccaaatgctagcaatgaacacgatggatgtaactgaacttgttgaccagtcaatgccacctcgtatccaagctgattatagccagtgtacatcgccacgttttctgcaactcatgcaagtatacaccattttcaaatgcttgtcgtgtttagtaccctcatttggattccaatcgcacgtatctaggactgacaagagtagtttctctctcaatgcatatctccaattccttgactgtgtcttcacatctcctcattgatttggcattcaggctattttcccagcaccatttatttcttctatctcgtggcagaaatgcccattctttgtacaccgaaagaaaagtgaacaagtctccattctgattgcagaattgcaccttgaagatgacacagtaaaaaactttagaacatatttctaacaggttgtaagaagattttaaactacaaaagttcaaaacctgtgaataccagtaaatcaaaaatgtaaaataacaggaaagggtaatcattctatggaagaaaaataccacaataacaaaattaaccgggagctcagaatcatacctttaggcgatcagctttcatcttatcatcgaagttgccaactctgcaaaatatactactagcattagccatgacagcagcaagaacaatcccctctttgcccattctgtgtctgaagcagcctaaactgttctttccaagctttggttccagccccagcttgagtaaacaacgcccttcctgtgttagtccaagatctccgttcttctcaaagacggcgcccaactgcacgagattttggatagccattgcaatggctcccgggccaggcgcgtcaccaaactcaaaagccgctatgttgtctataaaaaaagcaagcatcctcgtaagtgctacaccaagatggaccctccgaatggaggtt

SEQ ID NO: 34980 - DNA, 2212 bp, Arabidopsis thaliana landsberg
caattctttgatggcttgttgctgagagggttgttggtcacttgttctcaaatattgtgaattaagaacaagacaacacaattgttaaatattaaagacctttgtcctctgaagcattatctcccctacgatataatgatcttcagacgaaggttatggaggacacgccttcatcacttaatgaatgaataagaatacacagagataatgaatgtagaccattgactcattcacatatgtatttcacaatgtacacatgaatattaacagaatttgcattacatttgaaagcatttaggccccaggatggttttagtgattaatgacaacgtaatattatatgtgactaacgagtgttttgcagagacaaatggtaagttaggtcgcattacaggaagatgtactacaatggtgaaaacaatcactgagataagaacttgaaacgacggctaaaacgacgaaacaaaagatgaaggtcttggtattctgagtgtcaaggatttgtggacactcgatatagagttaggtattttattttgttttagccatctataaagaggggttgtcgatgagtagtttgaccaagagagttctagtgtagtgttggtgcacaatcacactcacatatagtgctaggtgtcactctagaactcactcacaagttagaacaaaaaccgatttgaaaattagctgaaaaacaagaggtagggttactggccctggggaccagactgtccggtgcaccatctgccaggtgggaccaggccagcctaggggaaggtctccccgtgcagcaaaacccgagagcgactgccttcagaaatgaattatagtggcgcaccggacatcgcaccggactgtccggtgtgcaccggacagtggactgttcactgtccggtgtgcaccggacagtgagtccaacggctctgtgtcagaactagccgttggaagtgaccgttggcgcaccggtggcgcaccgttggcgcaacggtggcgcaccggactgtccggtcggccattgcgcagtgaaatgcctgtaacggctagttggtgggtgagggctatttataccccctccacccaccatattcaatgtcttgcactccacatttattccagcgtattgctagagcattgcaagcaccaaaagcctagtgaggagattaaagaatcataatcccgcatttgttcctcattagcgctagtgagagccacctagagcacacaccacttgcattaggcttctcttggtcaagcgaaagtctacgtcttgttactcttggtgatcggcatcacctagacggcttggtggcgttgggagctcggtgatcaccgtgaagatcttgttggtgacctgactcaagtttgtaagcggtctcgagggatccaccgcgccggagtggcaaaggatcatctcgtagtgagcacttggttcttgcgaggaccaagggggagcgatacccttgcgcgggtgctccaacgaggactagtggagagtgccgactcttcgatacctcgggaaaaaaattggaggagtcttctaaaccttgctttacattccgcacttaattcaagcactttacattgtgtatttgtttagcaagtatttgaagtattgtcttagcattgttgtatttctagtattattctcttagtgctagttgttggggtgaagttgggctcttgtttagctcttgcttaggttttaattagtgttgatttttagaaaagcccaattcaccccccctcttgggcatcgtgatcctttcacacttaaagttataaatcaaatcttttcttgcaatataaatagtatggtgagtaaaaacaatcataagagcaaagaacacagggacacaagattttcacctgaggttcggtcgcaccacaaaggtgccctacgtccccgttgaggagcccataaagggtcgggtgttttcaaccctaatcctcccttcgccgaccacaaaggtcaaggaaaattattttctcaaattttcttagagagcgggttcaaactttcttgaggttgtccacaagatcggagactctcaagtgacttcaaaccatctaggaacactaggttccaagagtacaaatccaccaagtcgatgtttcacaagctcatgtaagagagagagagagagagtgaaccaatgcataagacaaagtcgtcactgacacgaatgtttcgtcaatcttttgagaggag

SEQ ID NO: 34981 - DNA, 4070 bp, Arabidopsis thaliana landsberg
aaaagtcaactagtagagttatttttttttttaatagtacctatgtaaacttattctaatgtacctagtttcctttgttgtctcattttaatgcctatgcaaactcaaattaatgtatataataattttataaaaataattgcatatactcgcgacatgtttttttttttacatacttttgtcggtcaggacagatgatgattaataactattaatcatccaaggtgagattatcatgcaaaatatatactatcattgaaatgtatctattgaaaaattataattatattatgaagaagtcgttttcttttctatatttccttcggtggtagggttctcaaaaagctttcatatttataaagttgttccattactacatcatcaataatgtcgacaatctcaaatagtgataactcggacttttcaagtttagtttttttttttttttagctttctaaaaaagatttgaagttcatcttttctatatttgcagaactgtttactttttcagaatgtagtaagaaactcataagaacggataaaggctgaatacgcactgtagcttatcaaatcaatagaaaattcttaacaaagttgtatgtactatgaatcaattaatatgcgcgatatcttatataccatgcacgaatgttatatggcttattggctataataagggcttcacttaattcttaaatatcttagccaatacagataacagatgcactcaatctctcttttttgatgtgtgtgtggatgtgttacgaagttttgatatatgatatgattcttctatgacaaaaaaaagaaagaaagtattgcttatcaattgaaatcgtcttaacacggaataaccacttgtatatatttgtcccttacgcacaattctttatatcttcctcctctaggacctccaaactcgcacaaatttttctctagattttctatttgtcggcgtcaacttttttttttgttggttccttctccgatcccacccactaatagtttatgagctggaatcagatatcaacagcccaaaatattgaatggattttaataaatgccacaattaattccgaattaaaatactattatagtacaagtataaagagagagagtgaagaagtcgacaaatgttgaagaagaacaaaaataagtcgtacggaacaaaataatccagctgtctagctaagctatacagtatagcctatactgttcgtgttctcgacagcttggacccctttttgactacgattcacgaaccgcgtaacacgtttccgaaccgtgaccaaccaagggctcacgtgattcaattattacaccctgccaccatattataaggtattatatttaagtatgtctattcgtagtaaaaagtataatattactgactgactagtcgacaaaagaaaatacaaaaccagtaagacttgaaaaagctgtgacatgagatggaagaactagagcgaaggagaggaaagcgaatatgtctcttcacacgaacgagaccaaaggaaaaaacaaaatcttcagaaacatgaaaagctatgtctcaaataattgaccatttacatgtttatacacgccaatttttctagcgaccaagattaagtagtgtagcaaccattgatagagaaaatatactagtgatttagtaatatgtctaacagataaattagggtcgtaatatgggagatggtttttcagtctcttttacctttttccctaactgatttcagagcttggttggtgatgtcggtgtcaccatctgtggtttggataacttgttcaataacacattataggagattttgaattcatcaaactggaatctaagagaacgaatacacgaaaatatgttgacagttgtatatactctcatttatactttcttttgattgtgtgttattgtatttccaatcaaattctacaagattttgctgataatcgtttttttttgcttcttctattaaagttggattgtacttccacgtgttttatttcctcgggaacaataattttttcgaatttgcgtatacttgttcattagattttaattctatatatgtgaatataattaactatcttcgaatgtaataaactataactaaacgacaaaaaaaaagactacaactaaatacgaaaacaggaaaattgtgttccaaaacagaaaattttagtaaataaacattactaatcatatatatgaaagttggccaactctcttcataagattgacacatcatcactttagcatttgtcatgtgtctattaaataattaatgtaagctcttcaacttctaatttataggttaatgatttttttgtaatccaaactcaaagtatgagtgtataatagtcgtggattacttaatgatttgagttaattattctcttaaatgaatatttatataataaatctttgagggtgaaaaatacgtaaagagttccatcatcaaatttttaggtttctagaatccaacactaccctctcttaaattggtttaatacaaacatgatttatgaattatatgtatgatgcattgttgagaatgttattaagaaaaaatatttttaatattaaaaataattacttattgcattagtgaatgattagataaataaaagttatatttaaattaaacaatataaaaaatccaaaaaacccgcaccgtagcgcggatgatcacctaataataatgaaagtaaagcgtcaacacagatgggaacacaaacactaaactaataaaaaagacctaacgtaggacgtatatacagctgtctttctattaaagagcattaggtatatttatattagaattagttacactgttaattacttaattctagcttactatctcatgtttctcatgtggaactaatttctaggtaactacatctaaatatcactagtaaaaaggattaaacaacttatgctatgagctgcgtgctttccgacaaaactaaggcacttcatgccataaaataataacatggacgagtatagttttttttttttttttctctgaaagtgtctttcattaaaacttcaaagatacaggtcttacattgtgattgcagcagtggactttccacttacatttttgaaacataaaacacaaaaaggaaaacgattctatccatgatccaatttgtgaaacgaaaaggtacaaaaaacagcatttcataaactaggggtatgtcctaaccaaaaaccataccctgtccactgtcttattcaaacccagttgagctgcaattcttcaaacgtagcacctgtaaatcaaaaagtaatgacagaatcttgttgagtgattatctttttttggaaggtttcataatacctctcattctttgagccctttcttgttgattaaactgccttgcagtttcctctctttgtctcaattcgcaatcctcatgtcttgttgaagattctccaacttcaaacgatgatctgccttcttgattggttctatcattggccactagatatctgtttgaatctgagtagtgatgatgcctatgtagccttcttgtagaaacaaaacaagacatagctgctcttagttcatcatgattcaccggtggagttgctactcttggaagaggagttacaggggctggaaatgaattctcagtcaactgagactgagagttcatacttgatctcataacagtgtcacgaaacatagccctttcccttgcaatactgtgatgtctttgacgatagggacagtaatccctgttatgagtaatgcgaaaacagctactgcaaattctcttcagtcgctcatattggaatcgaatggttactgtctccccagaatcaaatatgactcgctgaaagaacatgaggcgatcattaattccaaaacgaactcttactcttatataagcgatttgagttgttgttgcttcctggaaatccaagtgaatgatttcccctagatcctgagcaatctccatagcagtttctttacagacatagatcaaaggaatacctcttatttgcacccatagatcaatcgttgtaacaaagtttatggcttgagcaggttcccatttag

SEQ ID NO: 34982 - DNA, 1338 bp, Arabidopsis thaliana landsberg
aaaaacttgactggaaactgctagatacgctagcatgaacactcaccttggcattggtaataccagttcatttagtttctaactttctaattattttaaagaacgtaattctggataggtaattgctattttattacagaacaaagtcgtagagatgatttggagtcacttggattcgttctcatgtacttcttaaaaggaaggtatgtacctctcttccgtacctgttggcatgttgctattggttctttttcggcggcatttggcttacttatccaatgtaatgcagtcttccttggcaaggactgaaagctggcaataagaagcaaaagtatgagaaaatcagtgaaaagaaagtatcgacatctattgaggtaaaataatgttctgatacctgtgttggtgacacctatggtttaatactgattaaatattctattcttcttttaggctttatgccgaggttatccatctgaatttgcatcttatttccattattgccgttctctgagatttgacgacaagccagactatgcctacctgaaacggcttttccgcgacctgtttattcgtgaaggtttggtccctcaatcacttatgttaattctagtcttgtgaagcaaatataacttggaccagttaatcaacatgttaatttgagtttgcgtcatctgcttatattaggcttccagtttgattatgtatttgattggacgatcttgaagtatcagcaatcacagatttctactcctcctcctcgtcatcatgtaagaatcagtttttcttttccgaatgtcatcgtcctacttaaactctgctgaatatgtacctttcttccagggtcctgtagttgggccaagctctgccctcccccctgccattaccagtgctgagaggccatcaggtagttccatctatttcgagtagtttttttccaaatttcattacgcatttggctatgttactctgttctataggggcatggttttcacccatctgatgtgttctttgcaggtggcgacgaagctagaccttctggctggtcatcaggaatccctagacgaaattctggacaaatttttaactcaggaagcttagctaaacaaaaagcaccagtttcaagtgatcctgcaatatctaaagatgtagtggtgagtacatagaattaccccccatgttacaggtatccaattctttagctgctgatttgaagaaataaacataaggttctgtattgcttgtatacacaaggattggcagctgaattttagtttcttggattcttgttctttgtattaatggtaactgagctgtttgtttttcttgtgacagtcttta

SEQ ID NO: 34983 - DNA, 2629 bp, Arabidopsis thaliana landsberg
gtgttgctcttccagattccagatcctgaagaaggtgaaatcttatctgtgatccattggaagattgaatcaagtaacagattcacttagttcacttgcgtattgcatgcccctgaagataacattttgaataatgttgatattgaattattacctataagctctggttcttgttgcttgtattggttctgggtatctactagtgaagaaaccatggcttttggttctcctaggaataattctatattagctgcggctggatttcctcggaaagtgtctacagttgcaattgctattggtggtttggcatcattctttgttttcggattgttgcttcgtctttcgtatccgaatagttcttcagttggtggcatattttatgggatagggaatcctgaacaagttcatgtccctttatctttgagcttccatactgtcaatatccttcagaagagtagggacatcaatgcgtttgataaaaatctgacttctgattctagctctggcttacctgttgttgttagcaaaagtataccacctccagatttcagtagtgataggaagttggagacacctttgacacaagaaaaagaggatttggtttcttcggatataactgaaaagactgatgttcaatcaggtgaacgtgaaaccaatgtttccaaggctgaagacactccaagtgcatcatctcctccagatgatgtctctgaaactgcttcagcagaaccaggtactgttgttatcttttaaacgcttatttccgtttacgtagcttttgtcgtatttggaacattttgagttatggtagcttaaatttcaataaacaaagactaagctagtgtgggaatgttatagaacatttagctttgcatttctatggaaaggcgtaagtttctgagaagttttaaagaaattcagcggctaaactcttagctatagacctactgtaattattctagccgaggactgaatatagcagattagagtaaaaacttgcattgagagcaaataacgacgtgcagagctagtcgaggggttctaacgaattgtattcgggattaataaatactaggacatctctggcgagctgtatgattactttacctgcgtatttattatatatatacaaatgcattctgaatactatgataattgaactgtgtgaagttgaaaaaaaaaaagaaaaaaaaaaagtaaattgacaggtaaacggaaacaactgccaaagcctaacggtatcgctgccttaaaacgtactttcggtcgtggaaaatgggcccacctcatcatccccacggctttcctacgctttctgactcagttccttcttggcccacaggcccataaccatattaaattaattacttttattttttatgacaaatcctaattactttaaatcaaaacagtgatggacttttataaaattagtgggatattgaacaagaagacaaattaactttaaatacctagtttaactatgattttttgtcctgtgcaaatgttatttttcccttttgttaactcatgagttatacttaacaaaaaaaattgcaagaaaatgaattgccacttattgtcggtactgataaaagagagggtaaaaaaagtatattgaaaaaggcatgattcttttgtcattatatgagttgctttttcttgcttcatatcattgctttataagttataaaccttgtgtttgagaaacaatatttataatatcattcggtgggatttaagcaattggctatcgtattacctttagaatatgaacataatatatgaacttctacacatcaatctttaattaaccacaaccaaaaagaaaagaaaaaaatttaatccaaagagacctaaaaaaccttggtaaaattttataatcattaatgtagtattagttaccacttatccctttatcgattttagatataataagtgatgataaaaaattgacaatccaacgcaatatgatcaagtcgattcatcccctcattaacaatcaaattatttatataaggcttatcctgtaaattttaagtactggcaaatgtttccacaatgttatttactatttctgttgttattgtaatttatctttttcatatccctatatcccgaaaaggaaaattgtagtatatgctttttgttatcgacttatcttgatgagtcatctctaagctccatatctttctttctttctttttttatcaacgagctcccatatcttcaaagaaccttattacattattaatatctcagaaggaagatttaaccatagtagtttgaaaaattggggttggatataattaaggagcctagtatctttaactagtaaaagaaaataaagaatatcggtgctgttttaataatttaaaaacgaatctgaagacggcgagatatcacaaataagtggaaattttgaaataagagacaatctagcattaacacgcccaaatccgcatggtttgcaaaaattctttaaaaagctagcatctaattttctctacgaaatcagaatattccaaggaaatcatgaaagtaaattaacccactaaaaatatatatgtgggatctcacacgtgcaagttattttttttgaattaagggaagaacattataaaaattc

SEQ ID NO: 34984 - DNA, 6140 bp, Arabidopsis thaliana landsberg
ttctacaaacatgtctccagatacatgctcgactcctttgatttaataggtacaacaaaaagtaggtttaagtggtagctatgaaactagcagtacttcaatatttatcaaatatattaattagtattgtatacctggataaaaaggagcttgggttaaaacttgagctaagtcgaaattaacacctttgatatgaggatacttagaagtgactaaacctaaaacagtgccatttcctcctccaacatccaccaaagtgttaacatcttcaaatcctctatatacgtctagaaccttcttcatgatcatggtggaaggttccgacattgcacgattaaacaactcagcaaatggttgatccgaatttatgtattcgaagattttcatgccgtgggcagagttgaatgcatctcttccttctagtatcacatctttaagatttgtcctatgaaacaaaaaaaatcattaaatggtcacttcgtgtacaaacgtaaacattaaggtttaattagtgagatggttaatgataactaatagagtgtgtatatagatagtccggtttagccggttaacttactatgtaattggtttattcggtttagagtagagtatataaacttcatacatgtacattctgttatttgagaaagatagaaaacgattcacaaatctctttgattcatgttctctatcatggtatcagagcattttttgcgtttttccagttgatttcatcttcaatcttcaattcttactcagtttcttcgattattcacttctctttacatcgattgttcttccgcgcgatcgattttgtgaaaatagtgaacaaaggtgggaaaatgaagaatctcagtgatactcctgacgatggtggttatgttgctcgatctactcgtaacttgatgattgctgaagatcctgaagttgcaagagcgcaacaacaactcaatcgaagattcgaaacttctgaggtccgtggatcgatgttgaagaacactgactctttcgacaatcaattggttctccattcataagatcatccaggtttaacgattgtatctcatattcttgatggaactaattacaacagttggtcgattgtgatgaaaattagcttagatgcaaagaacaagctaggcttagttgatggatcgttgttgagaccttttgaggatgatttgagtttccgcatatggagtagatgcaatagtatggtgaaatcatggattcttaatgtcgtgaacaaggagatctatgatagcatattgtattatcaggatgctatggaaatgtgggatgatctattcactaggttcaaggttactaatctgccaaggaagtatcaacttgaacaggctgttatgaccctcaagcagggagatctagatctgtcagcatacttcattaagaagaaaacattgtgggaacaattgtcaaacacaaggattcgtactgtgaagaaatgtgattatgatcaggttaaagaacttcttgaggaagcagagacaagtcgtgtgattcagtttttgatgggattgaatgataatttcaataacattcgtggttagatattgaatatgaaaccaagacctggattgaatgagatctataatatgctagatcaagatgagagtcaaagaattgttggatattcaagaccggtggtgtctactccttcaccctttcaagctcaggcaattctcactgaacaaaacaatattctgatggcacaagggaattcacagaaacctaagtgtctcattgctttcgtgttggtcataatatggacaaatgttataaagtacatggttatcctcctggtcatccaagggctaagaagaataattatgtgggcagtacaaacatgaccagctcagattcagtgttgcctcagactgattctttggtatatcagaaagagaatttgtctgaagagaagaatgcagacatgtcaccagatcaacttcaacaaatgatttcttatctaagttccaagctccggtcaaatactgtttttccatctcctgataaggctatagcctcgttttcaactcctgtgccatctatctcacagataactggtacattcctttctctttatgacttctcttattatgacatgttgacttcatctatacctccagaaactgagttgtctcatagagcttgggtaatagattcaggggctagtcatcacgtcacacatgatagggagatttatgttgattacaaagccttagatagaacatatgtccggttacctaatggccaaacagtgaaaattgagggtgctggttatattcaacttactgatgctttgtctttacataatgtgttgcatatccctgattttaaatttaatttgttaagtgtgagtgttgtgactaaaaatttgaaatctaaagtcagtttcacttctgatgcttgtaatattcaggcgcgttactcaggagttaatgattgggcaaggtagttaagttgcaaatctttatgtcctgaatattgataagtctcttagtcatatttctgagtcttctttaaaaggtatgtctgtttgtgctagtgttcatgttgagccttctgtctggcataatcgtttaggacatccatctttgaataaaattgatacactttttgaaatcctattgttgtctaaatagaagcttactaaaacacctcatcattgtcatgtttgtcatcttgctaaacagaaacatttaccctttaaattgtcatttcatatgcgaactaaaccgttgaattggttcatattgatacatggggtcctttttctgtgcctactgtcgatggttttagatatttcttgacaattgttgatgattttagtagagctacatggatttatatgcttaaacagaaatcttatgtcttacatgtttttcctggctttattaaacttgttgaaactcaatacaatactaaagtttgttcggttaggtcagataatgctaatgaattgaaatttgcatctttatatctggaaaaaggaattaaaagttttcattcttgtcatgaaacacctgaacaaaactctattgtagaaagaaagcatcagcatttgttgaatgtagctagggcactcatgtttcaatctattcttcctttagcatattggagtgattgcatattaacatctgtcttcctgataaatagaattccatcaaaagttttgaacaatttaactccttatgagatgttaacaaagaaagcacctgattactcttttctaaaatcgtttggttgcttgtgttatgtgtctactttacagaaagataggcataagttcagtcctagagcagataaatgtgtctttttaggctactcatctggatataaaggttacaaagttttacatttagactcgaacattgtatctgtctctaggaatgtcattttccatgaaaaagattttccattcaaaactgcaacacattccatccctgcatctgatatatttgataaatgtgttcttcctgcttctactcctgttgacattgattcgccatctcacattcatcatgatgcatctgacattcatacacctgcattacacacaacaccacactctagtgtcacagatcattcacaggaagctgtaacttcagacacgaccacagtttcattgcctacagtcagaccaaagcgaacttctaaagctccaggctacttatgtgactatcactgtgctctcatacaaacatcatcaccaccagacaaggtcacaactactccttatcatatttcctcttttctttcatatgaccaattttcaccagactatcaatccttcatatgcaatatttcgatagagacagccccgaatttttttaagcaagctattctctttaagaaaggctctcttccatgggtgtggaacttgggtctatggaacttaacaaaacatggagtgttgtttctttacctcagggtaagaatgtagtaggctgcaaatgagtttttactattaagtatgctgatggctctatagaaagatataaggccagattagtagcaaaggggtttacacaacaagaagggattgactattttgatactttctctcctgtggcaaaacttgcttgacattgactcaaatggatgtaactaatgcgttcttacatggtgttttagatgaagaagtatgcatgagttaaactcggggatatacaccagccaaccaaggaatgttacctcctaatgcagtctatcgcctacataagtccttatatggattgaagcaagcttcacgccaattgtaccattgtttctctatggtggtctttaaagctggtttccaacaatctccagctaacaatactttgtttgtcaaagtaactggtacatcattcattgcattacttgtgtatgttgatgatatcatgattgcttcaaattgtgatgtggagttgcagaagttaaagacagcattacatcaagttttcaagataaaggatatgggtgcaccaaagttttttcttggattggagatagcaaggaataccacaagtatctctatttgccaaagaaagtatgctttagatatacttgttactactagaatgctttcttgcaaatcatcttctgtactaatggatccattggttcatcttactaaagagagtggtgttcgactgactgatgtgaggccttatagggaaattattggtcgtcttctctagttaactatcacaagacctgatattacgtttgcagtcaataacttgagccagtttctttcgtgtcctactaatttacacatggaggcagcatatggagttcttagatatctcaagaacaattcgggacaaggtttgtcttatgttgcgattcaaaaccatgccttaatgcttttgttgatgcggattggggaacttgtacagactctaggcgatctgttactggtttatgtgaaacttgtatagactctagactctaggcatgctgatatattgactaaggcgctccaaccaggaccattttattcaatcaaaaatggcatgtctatttcaagcctcaatcctgcgcattaagagtcttgaagggcaggggggggggggcagggtgtattagatatgtgtatatagtataattgagtgtatatagtatagttggcatttacatgtgcatattcatacttgtatatatagttggttgtacacatactttacaattaatgagaatcacaagttatttaggtgaatcttaataggtttattccaaaaacgggccatgttgactcgttaaggcttcttcgtctctgttcatggctcttgacttgtacgagctcgattcttctccgtcggatcatctgagaatgacattttcgttaacttggaccgcaaaaaagaagattctttagttaacttcttcctcgagtagaagctctttggatcagtagtattactagtatagtttattttcttgtggattgtttgtttgtgtttatgtttgcacatcttaattgttgtttgactaagttgtgtaatttgttaacaattttaggtatgtgacatgcatgttatatacatgtaaacaacatgtgaataccaaatgctgatttggtttgattcgagcattttttacttcaattagtctggtgatggttgacttgatgattcagtcgaagatgcaacctctgaagttgttcttgtactaagtcaaagtacctcacgaagtagtttaggagaacagagcaacgtgaagcaaacatatggaaattagcaagtcggtctaagacggttagctatggatactagaagcttggagaagactctagaagactgaagagtttcctttacgtgagaggaaaaggaaacatgcagacaaaggataatttcgtattccataaagaaaaagaaaattgtctattcctattagtgttagaataaatagggtgcttaggcttgagagaagcctcaacacaaacaaaagagcataatgcttaagggtgctaaggggtttgtcttgagaggttcttggattgtgtaggaatccatgaacgtgagagattagataattgtttaactgaaacttgtaacctcactaaacatattttttattaaagaataaattagttttgaaaaagcccttgtccgagtttgtgactcagttcttga

SEQ ID NO: 34985 - DNA, 3629 bp, Arabidopsis thaliana landsberg
  unsure (1)..(3629): unsure at all n locations
agcctgaccgagccaagcttgtgtacatgattatttaaaatttgccatttgactttggaaggatgggttttgagcacattcttcagctggctctgaaaacggacacgaaactcttcctgccgttccccaatctgatctatcagttgatccagacgcaatgcccggttcagattcccgtcacccctcctgcctcctcagcgtcgaccaagcagaagaaggtgaagcagagtgcagcagcatatcgcaaggaatcagccaaccgaagggcaatgaggattgccatcgaaatcctgcaggctgctctcgatacaggtaagtgttctgtgcgatcttcttgctttatactacatatgtctgattgtttacatgatttttgactaagttatgtgctcaagcagggggagataaggccccttcggagtcagatgatgctgggggagattaacttgtgggggagctgtgtttttgtttcgtttctcttgttaagctcggttgtatttcagaccaaaacaacttctcttttgtttttgtttaaaccgatgattgtatcatcgtaaacatgggtctgtaatattttttccacacattgttcactttcagactaatcgttttatgatatttatactagatggtatttctacagtatgcctattagatgtgtggtgtgtctctcatttgagtttaaggttatatcaatgaaggaatgcttgagtatcaaactcagtcaaaaagggggagattgaagatgcagagttcaatcaatcagctgatggcgatcacagcgttgatggatttcaggaagctgcatcgagttttatcaaacgcttgagttgcagacatggatgcgagagcacacgtggcaagctaaggcggatgatgtggagagccaaggatggaagctgacttggcgtggtgtcaaagacaagaatcaccgagaagatatggaagatatcgtctcgaacaattaggaaggaataagcttggagaaaacaaaaaagatttcttaaaacgagattctcggagatcctaggtttacggttctggagagtaggtannnnnnnnnnnnnnnnnnnnnnnnnnnnnnnnnnnnnnnnnngaatactgttatacaattgtaaacttcagagcattgcaaaagcttgaaggtgagtgtgtagttctctttgccttcacgtgagagtgataaaaaacagagaagagaattaggcttaagtattcttagtcgggtttgatcttttgggtagtatagatcaagtaatatccgagataacacttgtaatcagtttgttatcaataagaatatagttataagcaattctctgtgttgtgttgatctctataccctcttaagagctgccaatggtgattcataagtctttcaactcttctctgtcaaacttgggcttagtacccgtttgattggggaaacaaaacaatccttccaagcgcttgattgatagcttataatcctgaccatacacagagaatcacaagaatcccaatccttcactttccaaatcatcaaaggtcataccttggtaaagctccacttgcagtgtggagaggaactgaatcgtttcttcctcgtaggctacatatgggtaagccatcagagtgtccaggtgacaactctggtacatgtgccgaacatcctccagtaatccaagctgtgccagcgtagttgagcagggatactttgtgttgtagaactcattcagcttgaagagtcagatatactcctcagctggcaataacccaggcttgtgtagaagttttgtggctctatgagaatgctcaggcatatactcgacctccaactcctcgtctatcagctcatacctctttgtcactgctctcttccctagagctatctcagctcttctcctgaaattctcatattccctctgttctctttccggtcttaaagatgaaaactcagcctcaaacaagttatagtcggaatcaattgacgaaccgccactatagttgctcataatgatcctgaaaaagattaagaactcaaaactcaaatgtcaataggttagtctcaaagaaaactatgaaaccgaaattgttctcaagaattaacaaaaaggactaaactggtcgagtgtaacccagtactcgagtaagctgacgtgttcacaagctcttctttcatgattggaatcaagttgcacagagtggtggtcgagtaaaactggtgatgtcgagtggatctgctaaatgatagcaccagcggtcgagtaaactctcagtcaaccggaattatcgtttggaatcttgaatctggtctagtgttcttgaggtttcgacggccaaactgattctactcgatggtgaatgagatggtgaactcgattgcggcggcgtagcggctgtcgagtgactcttcgaagttacttagattccagaggggatgaatgtgctatcgatggggttaaaactggtgctactcgaccaaggacgagtcggcgtactcgattgcgacggtgaaatacttctcttccgcagcagtcgagtaatcttgttgaaatcgagttttggagatggtgaacttgagaggcggcgaagtgtttattttcctcagaggtcgagtaaatttctttagtgttttgaaggaatgaaggcgatttcaaaaggaatggtggagattaaatttgtatttctctctccatcttatcctcagtgagaaaacgcgtgtggtccacgctctgttgttttgtcattaagctatgttcactgttgactggaaaaacctcaggaaatcccaaaatcctctataaatctctatagcctctattggtcgagtataatgtttaatcgtttgatcgaaacaacattatactcgatttcatcctctagtcgccatatggcttatgttggtcaagtacttggtcgagtataaaggctcaaaatcatcaagtttactcgattatatttcctcatcagcatgtggccagtgtgaatcgaatgacatgttgaacctccaagtgaaaccttgtttatactcgattgcacagagtcactcgatctctacatcatgtggtccaatgactctttgaggttgaatccattacacttaaacattggcagttatctcctgaaaacactagtaaaatgcatcaaaaataacaaggaaaacaaaaatatgtacagagaaaggcatagaattaaacccccccccccccaagtgagcttgttttaagtcattagcttgacttccttactcctttaatcatcaagaggttcctggagatgagccaaagtcacctcaggaaggatttgatctgctaagtatttcttgagcctttgaccattcaatgtgaaatccccactcttaccagctagagtgactgctcaataagggcggacttcagtgatatagaagggaccagccatctagacttaagcttccctggaaagagttatagtcgggatcaattcatccttttcatttttaacaacagtcattccaccttttttagggacgcatgcactagagaaacccaagtaccatcagaaatagggtatatgacaccagcatcaagcagtttcaaaatttattttttcactacatttttcaagttaggatttaacctcctctgtgcttcaatgctagaatagga

SEQ ID NO: 34986 - DNA, 1877 bp, Arabidopsis thaliana landsberg
  unsure (1)..(1877): unsure at all n locations
ctataaaatacaaaataatttatagtatagatataatttgcaaaccttttatatatacttattttaaaaaataaattgtttacgcggtataccgcgggttaaaatctagttaaacgaaaacactgttcattgattagagatgacgaaattcgcgtacgttttttttttttggtatcaacgtttagtaattagtgtacgtgtaatttgacgcccccccttaatatcagcagcagacaagnnnnnnnnnnnnnnnnnnnnnnnnnnnnnnnnnnnnnnnnnnnnnnncgtagctgaagttggtaattcaaaacgaagcgggagtcctaaatataatgagcgtgctaagaccccacgtctggatccaaaactcggatctccgttgctgttgttgtctccagaagagggtggttttcgtctgtacaacccagaagatggtagggtttacgagccgaagagtgacttttccgggtatcgattcctgggaagctcaggtaagtggtttctggtggtagattctcgaatgaaactctatattatagatgtatttagcgagaagaggatcgaacttccaccactagaatcatttaagggtagcctttttaagattttgcgtgacggagaggagaatgtcaagcatatgcaaatggctgataacgatccatttcgtgatgaatttcctcatgctgccgaagatctgagaggtcgtttgtgggttgaagacaagaatggaaactacgttgttgtctggcagtttgaaaagaaccaatttctagggttttgcaggacaggggatgatcattaccgcgagattccaacacagctcgaggttcagagggagttacgaggtttatacgatatggtacttaaaggttacaatctttacgtctatgccacccgtgagttcattcgacacttggatttgtctggacaagatgaagatggtttcaagaatgtatccgagaaacataggcttccaatgtggaggccaagtatgacaatgaaggaacgtgaacgtatgaagcaaaggaggtctatcccatctaacaaaggcattgctgttacaagagcaggtcaagttttgcttgtctttacgtacgatttaggtacctctgaaagtcacaggatgttccatctgtacaagagggatcctaaagatcttgacccgaaaaccctcgacacccggcttcttgaggtacattcgttaggtgatgaggccctcttctatgatttgggtatcaccgtgcctgctgaccatacccttggtatagaaccaaactctatctatttcactcgtgatgatcgtatctgtcacaataaattgtcatgcctcgacatcggtgtcttcaatcttataccaaagaccgtcaaacgcttccacggtctctccaacttcaacttcaacgatgctcagtggtttcttccttcttgattcttgccttcctagctcatggttgatcccttttggtcttgctctgttgtccttataaataaattttaaaatagaaaatgttcatagttcacttgtacgttgatgataacataaacttagtgtccgacagctaagtgtctgctaaggcatttgatgttagagtgttatggattacaagtttacaacgatcatgttgttgttatgcaagacataaaagataattatcaagctttttctctctctctaaagggcgaaaagtggtttccttctcttctagcttccggcgtctccagcggcgccggctcctcctctcgccgggctcggcaggccctcccctcctcatggggaagcaaaagcgcctcaagtcgttctctccttcggggagctcgtctccctcggtctcttccgccgcctctctggtggctatctcctcgccgtctcctccgcg

SEQ ID NO: 34987 - DNA, 1724 bp, Arabidopsis thaliana landsberg
atgtaatattgaccaaagaggcaaagatatagaacacaccaaaaaagaggcaaatatatagaaaacatactatttagattttttataaattttggtagatatcttaaattattctagcaaatctccttcaattgttttttttaacagcaaatctcctttaattacatcaaatccgtaaaggttgaaaaaaaaaataacaatagaattttagtaatgaattaatgaccaatacttgacccaaacccgaacctaaacaccagatccatcgtcatcatccatccaatcaaattgactcatcgtgttgtgacctcccagtgattaagccgcgactcctcctaactcgtaatccctcacgtctctgagaattctcagtttcttcagtttcattgcaattcaattcccgatctgatccgttcctgcttagatcggagcaaaacaatggcggagatggcggataaggcgaaagtggaggagatggattgggaaggtattgatggagttcgtatgacttggaacctttggcctcgcactaaggttgaagcaagcaagtgtgtgattcctctcgccgcttcaatttcaccgatccgtcgtcacccccttatccttgatctcccttatgctcctctcgattgcaagacttgtaaagctcttctcaacgccttcgctcgtgttgatttcgccgctatgaactgggtctgtcctttttgctatcataggaatcatttcccttctcattaccattcgatctctgagattaatctccctggtgagctttatccccagtacactactgttgagtacacgttgcctcctgatccgtctcgtgtgcctccaccacctgtgtttgtgtttgttctcgatacgtgcatgattgaggaagaattgggatatgccaaatcggctcttaagcaggcgatcgggttgcttccggagaatgctttggttgggtttgtgtcgtttggtactcaggctcatgtgcatgaattggggttctctgagatgtctaaagtttttgtctttaaaggcaataaagaagttaccaaggatcaaattttggatcagttggggcttgggtcttcttcgaggagagctcctacttctgggttttctaaaggagcgcaaaacggattccagagttccggtgttgacagattcctgctgcccgcttcggagtgtgaatacacactggacttggtgggtaatggttttggtttggatagatttacgtctatgtttgttttaatttaactcgtgtttgttgtcaattttcaatcggattcttctgcttctaaatgattcgttatttgtaacatggatttgaacactggtgtggctgatttttggtatgcagcttttggatgagctccaatcagaccagtggcctgttcagccaggtcatcgtccccaacgatgcacaggggttgcattgagtgtagctgcaggattgcttggagcttgcttacctggaactggtgctagaattgtagctttggttggaggtccatgtacagagggccctggaacggttagtgcttattgattcctcggttgatggcactctcaagttttatcgctccatattttgaaccatatttgttatattctgaatcaaattttctttcttttgtcttttcagattatctcaaaggatttgtcagatcctgtgcgctcccacaaagatctagataaagacgctgctccttattataaaaaagctgtaaagt

SEQ ID NO: 34988 - DNA, 3668 bp, Arabidopsis thaliana landsberg
agtcttttcaatcccagaatccatttgttgacccgacgaatcctcctggtaatagctttgatttcacgagttttctgattcttattagtgtttgttctttcgcgttttgtttagtttcgattccagaaaaactttccttattcgaattttggtaatcatttcgtaagcgttgacgattacaagggtttgattttttctatatcatacagtagatatggctagccaaggcgggccaagacggagcttatccgttacgactgcgtcattgcacggaaagaagaaatccatggatatggccgaacgaggtctcgatactggccggagatctcttactgtttctcgttctcctttgtaagtctcagctgggtctcaatcttatatataaaccctagtttatgctcgtattcaattcatagagaacatctagctcctcaggtttaccttatttcttttccattgaagctattgtgatttggttttaacttttttctctcatctgtatatggagcaggggtttaacaggaggcgagcggactgtgaaacggttaaggctatcgaaagcacttacagtaccagcaacaacaactatatatgaagcttgtaaaaggatggcttcacgacgagttgatgccttgttgttgactgactctaatgaaatgctttgtggtattcttactgataaggtatgccactattcgctaagtgtagttaaaaagttagaaacagattggaagaaggaaatggagacttcattgatctgtgtgtatgtgtgtcttttttggattttcaggacatagctacaagagtgatttcacaggaacttaatgtcgaggaaacacctgtatctaaggttatgacgaagaacccaatgtttgttctctcagaaacacttgctgttgaagctctccaaaagatggtccaaggtttgtctcattgtttttaagctagagaaacttgatgtttatctgattgctgtgtctagatccttaatgaggctatatcttaaccttacctactgcaggaaaattcagacatttgccggttgttgaaaatggcgaagttattgctttattagatatagcaaagtgtttgtatgatgcaattgctcgtatggagagggctgctgagaaaggtaaggcaatagctgctgctgttgaaggtgttgaaaaaagttgggggacaaacacttcaggtaggcgaggaactgctgcaatctcatttgttgtttgcttcttattttctcggattttgaatgtccaaaatgttgattttttcatgtagttcccaacacttttattgaaacgctacgagaccggatgtttagaccttctttatcaacaattataccagatgatacaaagtaggtaatctcttatttttctaatgaaattctttttacaatcttgattgagtgtttcctgtctcatttgttgttttaacttaacaccgctgtttgttcagggttttgaaagtctcaccaactgacacagtgttgactgtagcaaagaagatggttgaatttcaatcaagctgtgcagtcgtgataatcgaggacaagcttcgagggatatttacgtgagttctcccttctgaaagcctttgaagttttgtcttctttaccctatagatcctgaaagccttacatccatcctcattaatcggctaaagtgtttctcctaaatttcattctgatactataatattagtttactgataggactatttacttctgcaaagacccttacatgaactagaacaggtcaatttgttctagagaaccacatttaccagatgaaatttgttctaacgaacttgatagatagattatgcgttggctaaactcttctgtctttctttttgaatatattatcactaactttcaagagttctgttttttcatttatctagttccaaggatatactgatgcgggttgtggctgaaaatcttcctccatctgagactctagtggaaacggtaagattaaaagattagtctccagggtcttgtattattcaaccatcttagactcttatttccagcttagtgatagttgctcctttttcctgaatttaaccatttgttcgtattcattaatgcataggttatgactcagaatccagaatctacgatagttgacacaccaattgttgaagctctacacatcatgcacgagggaaaattcttacaccttcccgttactgacaaaggtgagaattctgaaaccttttcaattgtaaagtcttacaaaaactaaaaaggcaaacgcatgtaaaccataaatgggtttctgattgcagaaggagatgtagttgctgttgtcgatgtaatccatgtcactcacgctgctgttgccacagtaactcccatctcttgaaccgtctgtaaattttttcgtttagaacatccactgttctcttttttctagatacatgtttcaatcttgtagttattttgatgtgttcaggctggaactactgcgggaataggtaatgaggcgacaaacacaatgatgcaaaagttttgggattcagctatggcattgtctcctaatgaggacgatgaggactcgcgaaggttattagctagtcttacttgttccactatttatcgagtttcttttcaaagaaagctttggttttgctgactttgttgacaacatggggaacaatttgtttcagtgagagctccatgaaggttgcttccgaagctgagacaggaaaatctttcccttttgcaaatacattttctttcaaaattgaagacaaaaagcacaggaaacacagattcataagcggtaaaaataattttgatttttattcatcaagtaaatagttgtagtcttgcttttacttaactgaattggttctttttgcagacactcggagtttgacagaggtgataaccgcgatcattcagagggtaggggatgatatcgatccagataacttcccccaaattttggtaaatattttcttttacataaagactatgatgcaatcattatctaattcttctcttgtcaccccctgaattgttaaaatgatggttataatgtgcagtatgaagatgaagaccacgataaagtgttgttggcttcagatagtgaccttcaagcagccatagagcatgcaaaatcaattggctggaaggtaaaaagaacgatttcctcctgcttgaaacttttggttgataagcaacaagaaccaaagtcgaagatgaaaccttcatgagattgcccataaaccccttttgctttctgaattgatttgatcattataaattgcagagtctgagattacatttggatgattcaagagaaggcaaaggaagaagaaggagaagagcatcaggatcagcagaatcaatggagtatgtagagacagacgcttgggctgctgcttatagtggagttgcggctggtgcagcattagtagctggtcttggttttatggcttttctcagaaaattcggtcattgattcctcagaaacactacaagaagtgtttctttaacagatcaatacaaacaaaaaagaaaaacagacacagggtttgaaggttttgtctgaaatatttttatatacaaaagtcattttaaattatattttggcttcatgatatcaaaataacaaatatctaaaactaatacatggagtaattcaagaaca

SEQ ID NO: 34989 - DNA, 1324 bp, Arabidopsis thaliana landsberg
  unsure (1)..(1324): unsure at all n locations
cccataacctcgaagaaccatctccataacttatacttttcattctatgctcaaacaatccttccacagacgtggggcctattgttgatcctagaaatatcaacaaaccaacctgagtctgtcctttgatcaaatcactcgctctaaccaacgctcctggccccgacacatcttcaagaatcgagatcacgatcgtggtgttacagataatgatagcatttgcaaacactactgagaacaccaaaccaactaagatagctccataggcattaaaatcaggagagaatccgagaacatagaaagagctacaaaccgcgacgagaaacacgcagaaggaagtgagacaaacaacaatcacagtacaaatccacaagtaagtgatcacaagacgtttccatagtctctgcattatcaccacaaacttagtcnnnnnnnnnnnnnnnnnnnnnnnnnngcaatcaacagagtaaaccacagcagctctagacaagagtgacaaagtgatgaacaaagggaaacacattgcagaagaaacagctgtctcagagaatttctgacaagagtttctaacaaaaggcaataaaggaagaccacttgatttggaaactaagagaagcctcactgtaagtgaattaacaactgattgatcaactaaaaggtttggtaatagaatagcggaaacaggacagatcaaaagaagagcgattaacatgaaagcaccaagattataccggagaattctaacggtttctctcaagatctcaagagcattcatcgaatgaaacttatgatcagaggatgatgatggtgatgatgatgatgattctatctcaaatttccgtaattttgaatttgatcctccatgattcatcatcccagataaacccatttccatgattgctctgttttacaacgaaaaggtttggattttttttcccaaagtttggattttgatgttgtaattaagcaaacccaaaatatgggattagcgttttggtaatcatgaagagagagggttagtgtacttgttagcggcgcgtttaaagcatggaaggtgtcacgaaagcaatgagaagaaagatggggaatttttggagagcgtgaagaaacagaaatcacgcagaaagggcttggaggaatgaaccgggtcgactggagaaaggtgacggtgacgaaagagtattagcgtcagattcggtgttactatatccaatccgggtacgggtctgggtttgggtcccagtctgggtcataacagaatcaagaaggaaagacgcgttgatgaaaataggaaatgttgccatctggcgcaaattctctaaag

SEQ ID NO: 34990 - DNA, 1790 bp, Arabidopsis thaliana landsberg
aggtcatttcgtgatggtacaaagttagtcaccgttcatgaaccgatttctcttgattacggtaaccttgaacttgctttgcatggatctttccttccaggttcgattttgatctttgtattctacagttagctttttattttttctggactattttgcttagttagttaaagtagtaatattgttaatgtgaagagattatgacttgttttgtagttccttcattggataaatttccagaagttcatgaggatgtaattattcctggtgatatgaaatatggagatggaagtataattatcaatcatggaaggaaagcagtagtcttgaaagtagtgaacactggagatagaccagtgcaggtttgttaaattttcatttcttgcttcttttgtgttttcaaattactgtaagattctttatttttgaaaccttattggtatggagataggttcatgaaatcagttgtagttaatttatcaagtcctttttaggttggaagtcactaccattttattgaagtgaatccattgttggtgtttgacagacgtaaagctcttggtatgcgtttaaacatacccgctggaacagctgttcgctttgaggttggatttctcatcttttttttatatgtctcggctaaataatgaccagcttttagtcatgtcagtgaaatttatatgttttcttttgtagccaggagaaagaaaaagcgttgtacttgtgaatattggtggaaataaagtgataaggggtggaaatggaattgttgacggtctagttgatgatgtcaattggacagttttaatggaaacaatggagagaagaggctttaagcacctggaagatgttgatgctaggttaactcctattccccctacttacatattcaaaagatatcaagttttaattaatctctttgcagtgaggggatagcaggggaagatcctcgatttacgactacgatttctcgtgaaaagtatgcaaatatgtatggtcctaccactggcgacaagcttcgtttaggtgataccaacttgtatgcaagaattgaaaaagattatactgtttatggagatgaatgtgtatttggaggtggaaaagttctaagagaaggcatgggacaaggcatagagcaagctgaagctctttctttggatactgtcattaccaatagtgtgataattgattattcaggaatatataaggcagatattggcattaaaaatggtcatattgttggtattggaaaagcaggcaatccagataccatgcatggtgtgcagaacaatatgcttattggggtaatttatttcactgtataaacacagtaaataccattttggagtagttacttaccttctcttgtttattttcttagaataagactgaggttattgctggagaaggaatgattgtaactgcaggagctattgattgtcatgtgcatttcatatgtccacaattggtatatgaagcagtctcaagcggtgagtagagtagcccgactgaatataaagcataagtttgcaaagtgttttagaaactgatttagatcacttgccttctaattaataattatatgcaggcattacaacaatggttggaggagggacagggcctgcttacggtacacgtgctactacgtgtaccccttctccgttcgatatgaagttaatgctgcagtccacggatagcctgccactaaactttggatttacaggaaaggttggatatgtttcttcttgatactgatatgcatggtatccatgtaattcatctgtattacc

SEQ ID NO: 34991 - DNA, 535 bp, Arabidopsis thaliana landsberg
  unsure (1)..(535): unsure at all n locations
atccattttctttgtgatatgtataaacccctatatataacactcactatatataccattacaatagcaaaaaatcccatttcaccttagtttattgtttttaagtgttaaattgaattgaagtctaaagtttggttgcactagactacaacactcatagtatttgaacaaaatgcttttaaagaagctcttaaaaatttgtaaaaaatatcggccaacattttacatagaaaatgtgtgtacccataacaaaaggttgcgcgaaattaaaacttttacagagtaaagataaatcacataacttcatagagttttgacatttaagcagagcaataaagagaaattcatacttttcttgtattctctttgtttccagtcaaaatcagaagacataggaagaagctatgctaccatttcagactgagagagtaagattcattctaaaacataatgaacgatacagataaatgaaaacagtaaaactcgcacaatatataataagttcattccctagcaacacangagctcccataag

SEQ ID NO: 34992 - DNA, 1493 bp, Arabidopsis thaliana landsberg
caaggaccccagagatcacagtgtattctctctagaggtctagtagctacaaaagttgaagcagaaaaagggagtctaacatttttcccaagctggcaagactcacacaccatcttggtacttttatttccaacactgatagatttgtttgcagatagcacttgaaggacttgagagtgaggatgccccagtcgttgatgccatatatcttcactcgctccttgctgtcttgaagagtagagtgcttgaactggtgagtccttcaacacataaagtcccttactgtgctttccctttgtcaacagtttccttgttgccttatcatagattcgaacatcatcacagtcaaattgaaatacgcagggatagtcattggtgagcttggaaactgaaaacaagggtttagagatatcaggacacacaagaacatcatttaaaggtaagttacatgaagtagaaggaagactgcctaatcatgtgtgtgttatgggaagaaagtttccatttcccaccattactgagtcacttccttcatacagctgagtctgactgagcttgtgaggtgcattggtgatgtgagcagtagagccagagtcacctacccattcaccaccggattgatctgtgacatcagttatcctgagtgttgcaagagctgctggcagatcctcatcttggtagctgttgttgaaccgatgccaacacttcaaagcatgatgaccaggtttgccacagatctgacaaatgactctttctccatttgagttttgtgaaatttattgatgaaaacctctaccacgtgtggagaatgaatctttgctttttccactcccaaatctttagttgccttttcctcggttgttgttgttgttgtagtaaccagaggagtctgatcttgaagcattgaaagccatgtgaggtgaagtttcagtatcaggaccatagctgttcagcctatcagcaaatcctgtcagccttgaaatcacactctcaaaggtaggtggtggctgagtatccattgaaccttctacagatgttttgataggctcatactctctacctaacccatgaagtgcagcaaatatcttcatctgttcactaacaggactgcctatggaagctagctgttcacaaaccctctttatctccttaaggtaagtttccatggatttatcatgtttatctatggtttgaagctttctctgtagctcaaagagtcgtgataaagataccttattgcagtgttgagccaaagcattccagacttgataggaggtggcacagttgacaacttcccgcatgatgtcttcattcagagatcccaacagccaggctcggactacttggtcagatctgttccaggtatgatactctggatttggtacctcagtagtaagaccatcgatgttgttgaatggagttgttgcaggaggaggcttgagtgacccattgacaaagcctagaaggttttggccagaaagaaaggactcaaa

SEQ ID NO: 34993 - DNA, 3252 bp, Arabidopsis thaliana landsberg
atgggattgagtttatgaatccataagatgtaaaaacattaggaaaggatttcgagaacaaaaaaagttttcttctagaactccaacctgtgtttgtttatgaactagctcttcacaagcttgtttgtacatggaaagagtggtttgcacttctttccttagctgctctacctcagctcttacacctgactgcaaaaacagatcttggatcaaaatcatatgcattttgtgtcacagagaatcaaaatggtcatatatttaatgcttcacctttggtgtttttaagtgaggtctaggatccatctgtattttactagtggaaacagtactatgcctaaggatagaacgactgtgttcgtcatcgaccaaaacaatatcagttgaagaagactgtgcatcagaatacactcgagaggtcggatgactatgcggtaaagagccaggccttccaattctcatcctgcctgaagatgttatagatgaagcagacaaccctgtcttatcagagcgtgtgcgactgaaagattctgtataagcttcagctccttctggtatacggaaactagatgatgaatctgttgaaaatttcacacagaaacaaaaaccacaggggaaatcaataaaacttgtatttttttccttcttgacttcagattttagatcaatgcaattgaaacatacctgcggtaaactgattcgtcgatttggttaagattctatctttacaaacaacatatatctcacatgtctctggagcttctcctagcaccgttaatggcatttcttgtccttttttcctgtcaaaaccaatccaaacgtctaagcaagatcataccatatacaaacacatactagatatcaaatcccattatgtaacattaccttgtgaggaaattagaagagcaagagccaatcactaaacactcaacatcagtatctgacatatacttcaaaagagcctttgcaggatcatgatgttccaacaacaaagtctcaacctaaacatttaaccagtaaaattattccataagccttctccaaaacttccaaaatcagtatcataaatttagctttcacagaaactcactttgttggatttgcagatcctcttaaacggaacaaaaacttgttcaaattcttttctcaaatctcgcttatacatagacacaacactctcatccaattcctctattggaatcttcgatccagcttttaaatcaaacaaaaactagtgtcaaattttcatgaatctcgaaattgatttaacaaaaaaattcgaatcgagacttacaaggagatggaatagtagtaactgtaggcatgacatgaacaagaactaatctatcgattttaggaaggaaattttcgattgtccaacgaagagcacgacgactagcagttcctcctacggcgtcaccgacggatcctttaacagcgacggatactgaagaatacgacggagctccgccgattaattcgaagaatttgttcgtcatcaccaccatgaaaatgaaacttgttgctctttttctcagatggattttgtgaggaaatgggttttggagaagaagacccgcgtttttagttgacttggatagaaaaagtgggtgatgtatttattgactgttgtgaaaattgaaagcgcctactttattagaaaagtctttttcgaaaaaattgttatgttgggacttatatttttgtgaaatttaagatatggtcgttttattgataattttgaaggttttaattgatataattgtgagaaaaatattagaaagaatgttctatattatttcaaggggttgacattaataaagatatataattcattttgaataaaatgtgcaaatagcgaatttagaagtgattttattgactagtaattgttttcttaaagggttaagaagaagtttcattggattgattaatttaattgataattatgtggtgcttgttcttagattctgtatgtgatgcaacgaacatatacttgttctctgttcttgttaatattagattaatgattaaagacggcacactaaccacttgtagtttcactaatccaaaattagcagtttcttgtttataaataatgtgtatagattattgagtaatttgcacttaggaacacgaaagtgatcatatttaaaataaatggcaatcgtaaacaatataagcgaaataaattgataaaaattaaaagcatgtgttgaacatttttactcttgttgatttaaacatttctcggtcactaaccacaaaacaaagactgatttttttcttttcgtttccatctccatttcgatcactccttagattctatacatgtttgtttccaacttcctagtaacccacataccattctttgatcgattattcagataaatcaacatatatatacacaaacctaagagttgataagtaaatcatactttgagataggtttttatcatggttgctccggttggatcagagatgagatgattgatgagaccttttctcaaattgtttggtgaaatgacgaacatgtataaagcaaagagaacgagatctcctgatgttaatgttgatcctagaaacccttgccacatccccagtaagtgaaaagaagaatcaattttcttgtttacggtaacattgttatgaatcacgaatcagtgtcttgcttaccattttggaaggcggaagaaagtacggaagaagcttctaatgccttcggtatcgaattgaactatgagtgcaagaccaaagagaaagaatgctctctgtcttttcctttctggtggccataaagtatcccaagctgccaaaaaatagaaaatcacaagttttaaaagtttctcattgtgtgaaagaacagcatagttaactttgtggtttatatagagctcaccttgtcttgaaatattactgttgatctgtttggtagtctcttctcttagtatctctgcgatgactgatgcatattttggagcttcagacaaagatctcacaactgaatagcctgtttaattgggggaaagctaagtcagagatggtacagattcaagatgtgaataaaagtacatcgggtcaaggcttcttgctcttactacctgttgcgggatgtaccatgctagcggcagcaccaaaggcgagattcttttgttcggtgtttggcaaggaaccaccaactgggatataggaccactcctacagttttatattaaacgaattaaaaaagcaaataagaagtttctatgtgatatg

SEQ ID NO: 34994 - DNA, 1756 bp, Arabidopsis thaliana landsberg
tgtaatagatgtcaggaaaatgctaggtttataacattaacatgttacgtatatgttacacaatgattctgtgaaggatcatctcgaagttaagagcataaacatcaatgtcacaactttctataaaatgtggtgctcagagttcgaagttaagaactcataaactcaagagaacacaaaaggaaagaatctatcaaagttatcatcattgcattgagttatgcaatcttactgtccatagttcgccaatgaagcgttggtttttcaccttaactaatccgacctcttgatcttgactcaggttctgacgaaagtaaatatctcatcatcaatttgtcatcatcttcctcgatcaagctaactccagtcggttttttcactcttgtatcatcaaacatcttccttactttctgcaccccgtcccactgacctgtggaagcatatatgttggatagtaacacataatcaccactctcgtcctttctcatactgagcagtttctcatttgcagacttccctaactcgacattcccataaatcttacaagcacataatagcgttcgccatacaatagcgttaggctcaatcttcatcgactccacaaacataaatgcctcgtctaatagccctgctcgtcccaacatgtctaccatacaaccataatgctttatgtttggttcaatattatacatatccctcataaggctgaaatacttacgcccttcatcaactctccccgaatggctgcaagctaatataactccaatgaaagtcacctcatttggccagactttcaatctttgcatttcttcgaacatttcaattgatccctctgcatgatgcaaggccaaaccaactatcaaagtattccatgttgacaagtcccgatctttcactcctctgaacacttcaattgctctatctatgcttccacactttgcatacatgtcaattaaagcattccaaataggagtgcctacatatatggagcttgaaaccgaagccgtttccaagatgtagatatgaagtctcttcccagtttccaaatctcccaaaactgcacaagcagataacaaactcagtatcgtcacaacatctgggtgttcaccagcatccctcatctccttgaatatacttagtgcctccttagggtacccacaattcacatatccagagatcattgcattccaagtcacaacatctttctctgtaaacctatcaaatagctctcttgctgactccatctccttacatttcaaccaaccagtaatcatcacattccaagctacctgatctttgtcaggcatttcatcgaaaagcctcatcgcctcatctatcttccctctcttcgcatacccagaagtcatagaagaccaagcaaccttatgagctttagcagaatcatcaaaaagctcgcttgcaatccccaaatctccacaattagcatgaaaaagaatcaaagcattcttaacatattcattccacacaaacccatgtctcaccactttcccatgaaacgcaaaaccattacttctccactcaagcttcgaacacgccttgagaacaaacgtaaacgtatacctatcaggcgacacacctcgtttctccatctcagtatacaaagaaaccgttttttcaggtttcatgctctgagcagagccacgcaaaacacggttacaaatagatacgtctggtttaggaattatagtcgaacaacttgtgtgcatacttaagcgcaccaggaacggacaaggaa

SEQ ID NO: 34995 - DNA, 6235 bp, Arabidopsis thaliana landsberg
  unsure (1)..(6235): unsure at all n locations
aaagcagaggtggctttactgagatatttaatctccataaacatgaacccaagatattgaggctggatagagatgatttcttaccctgctaagcccagaaagaagaatgacaagagaaggcttttattcattggagttctgatctttctacatacatgaaagacgaacactgttcactgattagattttgaaaacttgaacattcaaagtttgagagtggtctcgcttaaacttgacgcattacaacctcttaaaccattctttcttttactgatagaactagacaagcctagctcgagaaaccagatcctacttatcccaaaacccaaagaagagacatggaactcagagaatattatcaaagacattgtatctactaacagtggaagtaaacggaacatagatctcaacttaagtctaggcacattgctccaaatctgaaatctagttcttctataatgcagatctcattgactttaaatcatcaggcgaacttatacagattcatccgagaaaacccctaaagcaaaatccgaaaatccatactaatggatcaggcaataacaagggcactgtgtatagttctcacttcatatgtaaacccacaaatggatcataaaaccaggaaaccattgaaacccatctcgagaattcagaactaaaaacagaggaaacaaaaatagttgaaaaagatgannnnnnnnnnnnnnnnnnnnaagaggagcgagaatagagagagcaagaagatcacgacatacacagaagacaagctggttgactccaacattaagagctacttttgtaatcacatggtatccaccattaaagagctgaacaaacgcccatagccgtgtgcgccattcgagggttttttttcgccggcggatcggttccgggtcaggatcatcggcgccgtcatctttccgatttactcggcccctctctgacttgttgttataagttatttctaaagcaaagactaaaaaagtaagatcctttacttcgttagcaacgaatctgcttcttctatttgtcgagtcctataggttctgtgcaaattttcatatacaatatctaggagatttaattctcaaatcgatctacttttatttgagtctgtatcattttattaaaatatattcgtgtattattaaatctggttaggacatcaggctcatactcataggctgcctaatttaggcattaaaaattgaattttcataagtattttgaataaaccatttgactcaaattttaattgaaatacgttaaaatttgtaaataaagtaatcaaactagggccagcatgaaatccgaaaaccgaaaaccgcatccgacgacttcaaatcttcaaaactgctcctctcttctctctttaaaatctttcagagagataatgttagtcatcggttaggaatctcttccgggttttcccggatctgtaaatatctctctttgtaagatttaaataatttctgattctttgttggattctgaataccggctaagtccggttttttgtttctcgcttctgcgagatagatctcttcctttacgcggattgaagactctgttttactttaaatctctgccaatctcaccaatatttcgtggagtaatatcttcatcaattccttatgcccatagagtatggagcaaagaaccaactacatcaaatttggtgttgtcaatgatggagcttccctggagtttggatatgctcgaagatttttgaagccaatcctcattcgacccagagattctcgatgtcttagccttgggtttgagatcaccagaaggacggaggttttttatcgctatttggccgattgacggtggatcatcggactttcagcggtggtcggtaatttcagcggtggagctaaatgcctagacacgtggcgtaggatcgtgatacatccttgatacgtgatgtagatcgcgacacgtcatctacaagtgtcattaaatcaatttgcgttaatgtttatcttttcttagattgattttgggtctgggcctaacttgctgtattcctctatggacttctgtaacttgcccatttgggatttaatgaaataagccgacaaaaaaaaaaaaaaaactggaaactgtaaaacgatatgaataatctggctccgaaaccgaacatataaagaattctcctatccaaattaccggaaccgaattcgactcgaatcaaaaaccgaacgaatatctgctaatccgaaataaaattatatatctaaaaatattagttatatttagttatactttatacccaaaaaatactaaataactaaaacatctgagataatttttatatccgaaatttttaaattatatttgttataattatataatattttgcaaaattaaactaaattttagtaaaattaaacaatttttttgttttttctttctaaaaaactgattcaaaaacgaatcgaatccaacaccatccaaactgaaaccaaaccgaataatcatataattcaaatggataataaactccctcatcctgattattcgaattcgaaaatattcaagccaaatccgatccaaaatctgagtacacaagcttaaatcaaacaatagaaataaataactaatcacagttgcaaattagatattttttgaatataaagtttacaaattgaaattctaaagaaacggagggagtaattaaaattaaattgaggtatttcaataaccaaaaagcccatcattgggtaaatcttcacatcgggacatggacggcgaaggggaagggagcggaatacgcctgacgcaagagattcgccggcgggaaggtcaccggcggtagcttagaagtcgattacaagaccaaatccggtaccgattggagccactctttcctgaatcagaagccatggcatcctcttttttatcccaatcagcaccgcaaatggatcgccgagcagactcatgcccaacacgatcgaagagcggaagaggtggctcgcgaggtacttcatcgcacatcgtctccaatttcattgtgttattgattcaattcgtgttttccttactccttttttcgtggatttgcagtttgcgcaagagcaggaatttttcaagcaagcagctcttatctcgaagaaagaaagagagaaggttagtttttctgagtaagattagggtttatgttattcagatcttgttaggagttcagtttcgaggataactttgttcacaagtgccctaatgcatcagattaggtttctgtagtctggtgatgatagttttgaattcttaggctgaattgtaatatccacttgttgctgactcttaccaatcagaatccatttgagctatgtcttaactcttttgatccttagttagatgtcaaaacctatacaattattgaaatttggtgaaactagtgattttacttagttttgtgttacatgatgttgattcctgagattaatgcgcagatcgaaacgatgaaagctgtgagctttatgtatgttcgtccacctggctatgatcctgaaagtgccaaagcagcagaatacaaggatgagaaacacaagggtcagggttcttcaactcaggatccagtggcggacgacaatgttggttctaggtatgttgacagaaacagatatttggtttgacaaattattgctaggacgatattaagttaaatccttgtggttgaaatttgacaatattctctctttgacgcaatgcagaccagaagaatcacaaggtgggggagaacgcacacaggaaaggaagaaaccacgacccaaagatgtgtttggtcgtgctcttcctactgaagaagaatttgaggttcttaaaaatgcaccaaggtatgccatattcttttttactctttcaaatatgctaattgttaagtgctccagtgtcattgtgaaattttgcaacatgcaaatgaaaattttctcatcacatactatgattggaattgtgcaggatggagactggtattcctgggagagtaaagccatttgcagttgaagtgcgtaatgtgaaatgtctgagatgtggaaactttgggcaccaaagcggtgatcgtgactgcccattaaaggatgcagtaatgccaaatgaagaacttcgattgaaaagagatgacccgttgactgctatcattgcacatacagatcctagtgaggttggtcttaatttctcttaattctcatctttcagaatcgtttagctggcttaggtttcaacaactgaagtttgaatggtttatgtatcattaacctgaaatgctctttaacttcttgcagcctctgaagtgggaattaaaacaaaagccgggcttgagtcctcctcgtggtggttttgatcctgatgatccaaatcaacaaatcgtcgctgaagatatatttgacgaatatggaggtgaatattttaattccttaaaggttttttttttcacaaatcccatctcattttctacatacttatttcttttgatacctcagggttccttgagggcagcatcccaatagaaatactgaagagtatgtcgtcggataagaaaagaaaatccaaaaagaacaaaaggcacaagaagcattcatctcggactgttgaggaaactgatgaatcttcaacaggctcagaagatagtagagagaagaggggatcaaagaagcgcaagaaacttaagaagaagagcaagaagcagtatgattctgattcactctcctttgaaggttcaggctctgatagttaccgtctaagtaggagaagacacaccaagcatgtagatccatctgcctcattaaaatctgaggtttaccatcaaggaaacagtcacagagaaaagcattactacgacgagaagcaccagaaacggaaggaaatcgtggatagaccgtctgcttcatccgatgattcagattattatagaagtaacagtagtagaaagaaaagatcagaagatgattacaaaagccatcacagggagagaaagcaagtgcatagtaacgatcctgtttcagagaaaagtcagaaacagcattattcggagtctggaaagattcagagagtcgagaaagagcatagatatgatgagagaagacacagatacgtcgatatggagtctgaaaatcgtaatagatccgagaagaaaccgagatatgatgatcgtgattctgagaagcatcacaggagtgtgaagggcaaagaaaagcatgtgtatgaagcatctgatgatcctgaagagttttctgacagatacagaagcacaaagaaaactgaatctgattcggaatcaaaccgtagaagtagaaagaagaagcatgagttgtcttccgaagaagaagaaggggagtctcgtaagcatcgatacagcactaatagaaggagaaactgagtctatgctatgtcaattgtcctggaccaagagttatggttccggtctgaatgagattgcgagataatgtagtaatgtacgattgttttttttttggtctatgtatactgggtttataaaagcttaatgagtccatgactctttttattattcgataaagctaaaaaaaaagattacgttcaggaacaacgaataaaacggtgcattttaactgttactttcccgccaggagtcattggagagcaagtgagaaaatccatgtccttgattcaccgacggatatatcgtatatctggattatcgtctgttaatgcttggaatttgcagatacgagaagcgttaatagaaatgatccggtgaatcacttcttctgtttcgagaaatgaagcgcggaggatttgaaccgaacaactttacttttccatttgtggcgaaggcgtgtgctaggctcgctgatgttgggtgctgtgagatggttcatgcacatttgataaagtctccgttttggtctgatgtgttcgttgggacagcgacggttgacatgtttgtgaaatgtaattctgtggattatgccgccaaggtgtttgagagaatgcctgagagagatgctaccacttggaacgcaatgctgtctggtttctgtcagtcgggtcacacggataaggcgttttctctatttcgtgaaatgagactcaacgagattacacctgattctgtgactgttatgaccttgattcaatctgcatcgtttgaaaaaagtttgaagcttttggaggctatgcatgcggttgggatacgtttaggtgtagatgtacaagttacagttgccaatacttggatttctactta

SEQ ID NO: 34996 - DNA, 4993 bp, Arabidopsis thaliana landsberg
gtagaagaagaatcaatggttcataacatagtagaggagtttcccgatgtgtttaaggagcctatagaattaccacccttttgagctaaacatgatcataaatcaaactgttgaagagtgctaatccggtgaacaaaggccttattggtatgcggttcatcagaagaacaagattgataagattgtagaagacatgctcagcaatggtactatttaagtgagctcaagtccgtacgcttctccagtggtgttagtgaaaaagaaagatggtacttggcggttatgtgtggattatagggaactgaatggcatgacggtgaaggacagattccctataccactaattgaagatctgatggatgagttcggtggtgctatggcgttttctaaaatttacttacgggctggttatcatcaagtgtgtatggatactgaagataaacataagacagctttcaagactcatagcagacattatgaatatttggtaatgccatttggtcttaccaatgctcctgcaacttttcagagtcccatgaattcagcctttaaagatttcttaaggaagtttgtgctagttttttttgatgacatatttgtgtatagctcttctgtcgaggaacataagaagcatttgcgtatggtttttgaagtgatgaggaagcagaagctgtatgcaaagatgagtaactgtgcgtttgcagtgccttaggtggagtacttgggtcacttcatcagtgggaacggtatagaaacaagtccggctaagataaaagcggtgcaagaatggcctgtaatagtgaatgttaaacaattcagtgggttccttggcttagctgggtattacagaagatttgttaagggttttggtgtaatagcaagaccgtcgcatgcaataaccaaaactgattcttttgtttggtcacaggaatgacaagaagcttttgtgttgcttaagaaagctttgtgtaatgctccggtgttagcattacccttgtttgacaaaccgtttgtagtggagacagacgcttgtgggcaaggaattggagcggtgttgatgcaagagggtcatccgttggcctatcttaggaggcagctgaagggtaagcagttacatttatcaataaatgagaaggagttgttggctgaaatttttgctgttaacaagtggagacattaatgttatcaaatcactttgtgattaaaacggatcagagaagcttgaagtacttgttggagcaaagattgaacacaccaatatagcaacaatggttaccaaaacttttggagttcgattatgagattcagtataggcagggcaaagaaaacttagtagcagatgccttgtctagggtggagggtgctgaagttttacatatggcgttatcagtagtggaatgtgacttgcttaaggatattcaaaagggttaggataaagatgtggtgttgaaggacattatcgaagcactaaagaagaatcctgaagctaagaagcattattcctggtgccagaatgtgttaagaagaaagagtaagatcgttgtaccatcggatgtggctattaaaaataccttgttgtactggctacattgttcaggagtaggtggtcactctagtagggatgttactcatcaacgagtaaaaagactttttttataggaagggaatggtaaaggatattcaagcttatattcagagttgtagtacttgtcagcagtgcaagagtgataatgcggcttctctaggtttgttacaacctctaccagttcatgataaactttggagtgatgtgtccatggactttatagatggcctacctttatctattgggaaatctgtgatcatggtggtagtagattgtcttagtaagtcagtccattttattgccttggctcacccctatagtgctttatctgttgcacaagcatatttggacaatgttttcaaactccatgggtctcctaattcgattgtgagcgatagagataatgtgtttacaagtgagttttggaaggagtttttgacacttcagggagttgagttgaagatgaccagtgcttatcatcctcatggagacggtcaaactgaagttgttaatcgctgcctcgaaacttatttatgttgtatgtgtcatgcaaggccaacattgtggagtaagtggttgcccttggctgaatattggtacaataccaattatcatacctctagccgcatgataccatttgaggttgtatatggacaagcacatccaattcatttgccttacttgctgagggaatcaaaagttgcagtggtggctcgttctttacaagaaagggaggatatgttgtcgtttctttaaagtttcatctgatgcaagctcaacatcaaatgaaacaatttgcagatcaacacaggacagagcatgagtttgatattggtgaatatgtctatgtgaagctggagctttataagcagcagtctgtggtgatgcgggtaaatcagaagttggctccaaagtattttggtccatataagattatcgagaagtttggtgaagtggcgtataagcttcagttaccttcatcgtcttaggtgcatcatgtttttcatgtttctcagctaaaggttctagtgggcaatgtacctacaactactcacttcttcttcagtgatccaagatgtgtttgtgaaggcacctaacatgatttcggagaggaagatggtaaacagacaaggtcgagctgtaactaaggttttggtgaaatggattaatgaacccttggaagaggcgacttgggaatttctttttgatcttcagacaaagtttccagactttgttgcttgaaaccttgtggtcaaggttctgctaaaggagggagatgtgatgaagaaccccacacgtgtggttgtcacgtggaaatcaagtggaataaagatgggatcaggagtcgacacgtggcgtgtgaaggctggccgattcaagtttgccgttagaccaactatatgagccgactctgcttttctctttcattatcgaaaaatcatttgtataacattgaatcttaaaatctttgcaagctaggtttctctcatcttgagagctagggattgtcatttgggtgtttcatgaacattgatttgactgactggtgacggagtttgttaattggaagtatttttcagttaatcggaggaatccatagtttctctgtattatccacacggccatcaaatccatctccatcaccgtttgaagatgaagtctttgttagagaaaatgacactgcatcgcggctacctgagctgaagaagctcttggttgtgttgagagagaagagagttaaaggctgcaaaggcggtgattgtggacccggagatgtgtatcttctggggacaggacaaggagatcctgagcttttgacttttaaaactgtaagagttattcaaagtgtcgatctttttctttaggacaggcttgtctccaatgacgtcttggagttggttgtgacgtaaaagaatcctaagtactttgactagaacaagaccacaactccaataaagacactttattagaacaatcttcacactaatcaatcacagataagtttggacagagttacgcaacatcaacaacccgatttgctcctgtcagattctaaagctacccagctcacaaacacaacaacagccgtgtactctctttgttcactcaccaatgaaacccacaagacaagttcttcttaacttttctaatcttccacttttcacatgtaaagtgactaaccttaataagagaacaacgcttcacttatatcttgtcgtggaaaaggaggatgcttcactttatccaacaggtacaagaatagctcctcatcattttctagatactaggcccacgtcctatacctaacgacttcgtctcctttgtctaaagtgatacgtcttttcttcactccaaccaacacgccacgctggcaaaagcaactgctacttccctcttcctctgttctgctctatgttgcttcagacatgcatgctgaactttagacactctatttcttcaggttgctcctgatgctagacatctttatgtcggcaaaactgctggttatcatagtagaactcaggtaatgcctaagtccttgttttgattgcttagccggatcatattgtccatgataagatcattggttttgaattggttgcttagccggagtaataagccttttgatcattctactccagtttatgcatatgatgatggcctcttgtgattttgtgctgctgaaactttaccttatcaaaatttacgattttgattgcaggaataactgcggcgtcgaggatagcagcggagttggggattccactaacacatcgaggtgttgcaactagtgtaaggcttctcattggtcattcaaggaagggagggacataccctctgtttgttgtagagaatgcaactgacccggatacaacacttgtcgtttatatgggtttcaaaactttaccttctcttccacaaaaactaatggaccatggtctcccttttgatacaccaactgttgcggttgaacgtggaaccactcctctactcaactacaacgtacaataagcaaccaaaccgtactttcttgataggaaccaacgatcaagagatggtatgttacttgagttcttaaggcttttgggatattttaaaggtttttgctgagcttaaagattttgcaactgagattcaatcagctggattggtgtcaccaacacccattatcatagggaaagtcgtcgagctctcgcctttatggccacattgtatgaaagaatcctcctgccttgtagagatccaatagatatttcactcttattttacgggcgactggcttccatcgacatgacggtgaagttttaggaggtatggagctataaaggttgagagatgtaattaacaaaaaagaaagctgatattttttttatgtcccgtgtccttcaattgttttgggacaatgac

SEQ ID NO: 34997 - DNA, 4510 bp, Arabidopsis thaliana landsberg
atcgtgactaacacagactgtaggaatggactttacattttacttctcgtttgagtattaacatggagttaggaacaacgtggacaagcaagcatgttaataacaggaacgttgctaacgcaaaaagatccacagttgtgaaaattatagtcttaaagataacggttttccgaaaaagtgatcacagagatctagcagcactgagtagcacaaaatttcacacactaggaacaccgagtagagaggtaatattatcacagaatcaacaaactgtttgcaagaatgaagatgctgatatggagtagcctaagaaaatatcatatataaatgctagcatcaaattttgacaagtatatgcttacagtgggttaggaagttaagcaaaaagattgtttaaacaagaaatatcaccttcttgcgatgacgatcagtgtgagacatatattccaatggaacacgagcacccctagaaagctttgaaagaacagatactaaatctccaagactggaaatatcctcattagcaaccttctttatgatacaaaaatggttgcagatacaatttccatcttacttatcctcactcctaaacttaacaactgcatacaagtagccaatgcacaaagtaatatctagctactttaaggaaatatacccaagagggatctagaatgtcaattgcatagagtccatggtcatcatcagggaccaatacttcaatattatcatccaacggctctgtataacctgccaacaaaataacattcaagttcaagatctgcttcataactcacttttctaaaagtccatgacttcaacagtaatctaaattccgaaatcctctctattatcaagctcaaataaacatttctataaatatcaagaaaggttcaaaatttaccagttttgggattatagagagaccagaggctctgcttaaaggcaaggttagctagaaatattcggacccaaacccgaatttcagactttgaattcttcttcttagaatgcagaatagagcctccaattccagatactagaagcaccggatcacgatccgccacctcgccggcgttttcatcgtcgttggttccccagcacggacacggaatccagcccatcaaagcgggtcaggtttcgggtccgaaatattcaattcggatctttctacagagttcaggagaaaatggtaagtgggacttatcagaggtacattagtcaacaatgaggatttctgagaatatgccatctgtgactgtgactgtctacacgcaagcttcacgtgctcctcacgtgtcaccttctagatacctgacttatcgctctgatcttccgtcttcaaacgacaacgtctgatctctgatcttccgttttaaaacgacatcaaggtgttactgtccaatttcagattgggttagaacatcttgtaatatctacaaacttgagggtgttttacacgaatatttcttaattaagaggcttaacgttggcgtttttgacgaaaatggagcaaccaatgtcgccgggaacgaagtcggtggatctccgagaatgcatggaatcacttctccgttttagtctgagatctcatttaaacgaatctgttccaagtttcgatcttgacctgaccagagatttttgtcttcatctccttggggaagctacagattcaacaggtacgttttgctaattaggaagcaaattatgaaacttgaatgctggagagaaataactgaaattttctcataaatgtttcaattaacagaaaaatctgcggtgtacaagcttttagcaacggttttgactgaatgtctagcttccgagggtgataaaaattctaacttggaaaaatacatcaaactgattcatggcttgggatatgacttaataaatgtaagtctatatgaaaactttagttctcaactattattgcatcaaaacagagtgggaaaagttagtttttggaatttttacacagaaaaggttctttgtttcagatgttgaaggaggtgaactttgagcttcatgtccaagagccttacttcacccaattgaaaggtacattttctggttacttgattgtagtattacaattatatttgctcaatctcacttttatttccgggtgcctctcaatttgtcagatggtttgaaaactgttgaaggaagatgcgcagtgggagactacatgaggtctgatgtttttatctttgtgcaaatgttaattcacattcatctcttgtgcttgcttttccgggttttctgttttgctgattccaatagctttagattgtcttattgacttcaaaattggtttactcacagaattagttcaggagcttttcttttgttcaataaatgcttgctgcttgaagttcaggtagtcatcaatcttgtatctctgtcaattcttccttgtgaggcaaacactatacctcttgttactaaccattttgatgagggcaggacgttcaccgttatacttcattctcagaaatgctgaaagtggagggtcttgccaaagttcttcctggagttgaaagtatagaagaaggtttgaagatctttaccataacatagaacgtttggaaagcgtctcttttgctatgtggactttgttctaacctgaaatgatgttctatctgcaggtgttcaagtttaccgaaacttttattctgaagagaaggaaagaatgaacggtgttgtagctattcgtgttgcaaaaccagctaatcagccttctgcagctttggcaggagtattgtctgtgagtttctggcagcaagtcaaactccagaagctttcgttagtcttcaatgtatgcatcatatagctttcttttcggttcttcttttgtaggaactgaagtccagtgggatcaaaagcctgttggatgaatacacagctggggttacctcgtagctgcatctgaaaacctttgtgcgcagagaaactactcaatttgaagggttttgatttctctacactcggatgatgttaaatttgtgtttatttgtgtgtacgagtagctaaatcacagaagatcacatcttttcttacttattgagcacctcacaaggcaacaaaacatttttcgacgctttggtagttatttaacaatcaaactagcaaacaaacaccaaccacatctacggactaaggctcaaccaaccacatctatgtgtatcttctagagaatcagcttcagtttgttttagtcttcttcccgaacagtaaatcccacgagtatgtgttgcctttcttttccgcgacctccacacgctttcctccaacctgcaagccgttcattttaatcaaaagactgctttcaacagagtaataactgcccctgttttctctttgtcagatgtgtttgtcacattataatggaaacaaaacgacatctcataccggtaacttttgaagaaaattaatggatgagcaaagtaccttgtccatgagccagaagccaagggaaggcatgtactgcactagatacatcacgagtagtactggctgaaaaacagtgaaaataacatcgtatatcactcatctaaactgagtgaagacatatgcgattttgacaaacacttacctgatatgaaatccaagcttccttcaagctatgaaacgcggagactatagtcggatctgcatatcattcaaatgacacacgcttttgtgttgcaaaagaaaagcatctttgcgtgaaaataaaaagaaaaagagccggagatagaagatcctaatttaaaagaaagaggattctatgtgtctacaagactgattagttgcttaaaggaaaggtacgagtacaaaaaactgacaacttaatcaacaaatcacaatcagttaccccccctcatgagacttcttgtcttccgaagttgatgttcctgtaccattcaacgtttctattggaccaggaataacgacggtcactttgattccctcctgacagaactgaaaccataggcagattgtgaaccaactgtgaattgttactttatggtgctattctcagcaattagtgaaaaggaatgtaaaagaaaaaatcaaatcagaaaactctgaggtagctgtgagttttctattgtgactttcaataagtcattagctgccaaataattagcaagcaccacagtttctttaacttttaacatacctcagaacgcaagctgtggaagtagccgtgcagagcatgttttgaagcagaatatatagcctgtccaggtgatggtacctttcctgcagcactgcttatctatagactgacgtgaattattaatcatgacatttaacccaaggaaatggaaaattaacacatacaagaatagctaaccgtagtttgacttctcaagatgtgtatacggtaacatgatttggaatttagcaagcacaagacaaaaatacaaaagaaaccttaaactatctatacatagctttaaagccctaagattaacatataaaaaacgcaatgtatatccatatccataaactatgatatgaa

SEQ ID NO: 34998 - DNA, 2515 bp, Arabidopsis thaliana landsberg
atgacgagtcccgtcagcagtctcttgaagctgaagtgcgaattcgagattccacaaaacatctcccattgtcggccgttctaatccactatcgttaagacacttctccgccgtgtctgcaaatttcttcaaacactctgcattgatcttccctttcagattcggatcgattatatcctctaaattcccttttcgtttgcaattcattgcccagtctccgagactcacttgttccttaggcaaactcgggtttaacgctggtcttgcgcataagatttcgaacagaacaactccgaatgagtaaacgtctgatttctcagtcagttgttgtcttctgaagtattcaggatctaaataaccgaagcttcctttgacgacggttgttacatggcctccattcatgttaggtccagttttggataacccaaagtctgaaactttggctacccagttctcatctacgaggatgttagttgttttaacgtctctgtgtataatcgtgtactttgctcctgtgtgaaggtaatgtaatcctcttgctgctccaatagctatctctagccttcgtttccaagttaattgtggtttctttgtgttgtatagatgctcacggagtgttccaaatgccatgtaatcgtatacgagacacatttctcctccctcgtcgcagtatcctatcaaggagactaagtgtttgtgtcttagtcttgagaggagttcgatttctgtctcgaattcgttgagtccttgttctgaatttgggtttgatttttttaccgctactttagttgtgccgtctataactcctttgtagactttaccaaaccctccaactccaatgacgttggaatcatcgaagttttgtgttccgtgtttgatttctggtaaagagaatctacggcataaacctgctgcgagattggataggtgacttccattgttgctcttccctgagatggttgatttggttcctgatgtggtagagtttccatatataggaagccaacttgatgtgtgagagtcgcctccttgatatccttgtttcttcttgtaggccgtgaaacacaaggcaccgattaaaaccgctaaaactcctccggccgaaccaatgatgaaagcgtgtctcttttcgttcttgaattcttttttaacctcttcctcagcttgcataggcgatggctcggggtttggacccgcaagatttttcatggtgtccatcttgaaaatctctaacccgttaagagatgaatcataatattccggttgaccaaaagttgatggagtcacctgaagtgtaatctcttcgcctccgttgttggcatcaacatatatcgcgtagacataatacatcgggattcctttctctcctgtccaccctattatatctgcaggagtagtatctgcctgcgctgttctgttattgatgtaaatgttgaaaaccttctggttgatcttggaaagctggaattcgcagaaatggagtctcaaaatgtaggtgaagttcttatcgatttggaacatccatgtaagattggatttgaggttgatatctccgtttgggccttgagatcttgcggttttgtatatatcggctggagctatagacaccggcatgttctggtagttgatcctaaaattgttgcttgcttgaagtgtaacaccaagacccgcactaaagatgtaaggtgcatcattataccaagttcttgtcaacccaccggagtcttggcttccagggatgtcctgaccaccaacattaagtctaaacattgactgaagattcgcagtcttggcatccattgcttggtctgtgaaaccaacaggagccgccgtgtcaaacaattccggcatctgaatcacctcgataccgtttataaaggcaaatgcgtctcggtatttatctgaaggggtaaacttgatgctcaaaacatctttgtcagtgggtgcaagagagtattctttaaccagataagcttgagtcaaagcttgacatgtgatagctgcactaaaattgctgagaagggtaagatcattagcttccacagtgaaataagagtcgagaatgttgagtcctgtgtatgttgatggatagaaatgtaagcggagcatatgtcttttgtcgcctttaaccgggatctcatactttgctggagctgtaaagattcttgatgtcatgtaaggaaccgttgaaagaagtgaaggatcttgataagtagctggtgcatgaaccgtgtttggtgttttcaagaatttggtatcgggttcccattttttcttgtcttgatcaacagctggttctgatgctccgcagctcaaggagatgtcttggccattagattgggatggagaaactagaagaacatagaagaaacagaggaaggagaacagaatccggagtttctcgttcatggctgaaagatatgaaacatgtttttaatttcttaggcatacatgaaatctattgcactaagaatagcaagagaagcttagttttctatgtagacattacctcaac

SEQ ID NO: 34999 - DNA, 1920 bp, Arabidopsis thaliana landsberg
aagggcacaggtggatagagcctgagggcttcacaaaccgcgccgtgtaaatacaccaacttctttacctcttggggattgaatgaatcagaatcataagaaacagaaccgtcgtcggtcttgtttcttggaaatagatttgtgttgatttcttgacgaatcttggtcatggcttcttggttattgcatagaagccagaagaaccaagtgagcgctgagcctgttgtgtctctaccagctaacatgaaggacaagattgtgtctctaaggaatctgtcatcacttggattcaacaacttgtacttagtcgtgtcaacatttatagaagacatcaacaaatctttagaagaagaagaatcaatcccttggctgatctcatctctcttagaagctatgcacttagagcaaacacgatcgaaaatcgcgtgagctcttttcagcttcaactcagctccaaccccaatcaatctttgcatcttccacaccacctccggcttgaaatgtctgtagaaaatagcttcctctgcatcgtctaaggctcttgcaaactcgatttccggcatttccaccgagagacaacctggatcatacccggttgctaaaacaaaggtagtgtcaaacgtgaatctttggaaaacatcttgtaagtccacgacgagtttctctttagcaacatgatcaagaagtggcacaagccctttctctagcttactcaagcttgtagctaatgaaaacctttgaaaatcgggatgattcatcatgctttgagaagatttccttagatccttccacaaatctgaatccgcgttgaaaatcccatctcccaaaacgtcaaataacttcttgaattcggttcctttcgggtaattcgcaaagtttgagctcatgatgtgatggatattagcaggatcaacggtgaacaacatgtcgatgccccctaaaaaagggcctatgaaaagatagtttaagttgccgtcctcaagaacctcggttataaagtcgtaaactcgaaggagcacggtaagtaaacccggaagcatgcccaggagcggccagtttgtgagaaatgaacggtgtggtttcttgctgatcaggaaaattcgaaagataaggaaacaaaagaaagcaatggagatttcaagtaagctgaccaaagccattagtgagaattgagaaatttgggggaatacactaaataggtgaagcttgatttttatctagctatgttttcattcatacactaaggagagaacatatatatgaatataaactagaaagcatcatattatgtgtcctatatattggttatttgtcgttgtcgtttcaataatcataacacgagggatcgtaccttatctttggtgactatgtcctattttgtttgtttggtattgtagctctgtgggaagtcaaaaacctcttttgaaaacaacggtccattgcatgcgacatattacgtacaataattagttatttgtcccaatataagataattgtccagctagatttgtcttacaaaaacaaaaacaaaaaaaaaactttttgaagaaagttaatagaaaataaatagtatattagtaagtttaattttaatgggccagtatttattttctttatgaaaattaagttacttttacataaagtattacggtttatcacgcttgaaaggaatttgcggtagatataaattaatggttatgttgatatttaagaaatagcaaaaatattttcagtccaaaataagttgaaatgagaagcctaaataagaagttagttagctttaacgggaaatattgtatatactgtcattttcttaacttctaatagctttcacatatgtacttgttgataccattagaactcatgaatcaatataattcgtattaattgatatgaaagcaataataattgaacaggggg

SEQ ID NO: 35000 - DNA, 5190 bp, Arabidopsis thaliana landsberg
  unsure (1)..(5190): unsure at all n locations
ggttctcgaactcaaactatgattttagagtaaccggtggtgttccgcaaaattctctatacttagagctaagataaccggagaagccgagaaatcctatactaaagcatgcattattatcaagtttgattagttcacctagtatctaaaccagagcccttctatgagcctacctgttctttcttaaatgcataggctcctctatgatggttcaaacaacaagtacctatggtggacatacctatgatctaatatcaagttttagttagctactctagaactaacattaagaacaatcaagatgaagaatcctacagataacctagcaagggggcaatctattaaatcatccaaatccctaatgaaataccctaaacctaacaagaaaactactcaagcatgatgaatgaagcaaacaacatgattgaataagaaatcaatgaataaaacaagaagagattaaggtatagaaagattttctctaaagggagtctccaaggttttgcttccaagtacaaaagagataaggagattagcctctccaagcttaggtttaaacaatgaccttaaaactatatatatgacctaaaacacgtgatgggccttctttagaaataggataaagttctgagccgaatttggaaatcttcaaaacatcaataagttgcgtcttcgaattgccgtcaggtattggtgtcgcgcgacacctatgcggattttggtctgcgaactgcttctgcaacttaagttgtgtgttttgctccagcatgctccataatctccaaatgcatcccaaacatgtaaagatctgaaaaagactagaagcgactctagaaataacaaaaggactctaaaacctataccaaaatcaaagctaaaaacagtaaaaatatggatatatcattgtttcttgatcacatcttgctgtagcagcttatgcaccttcttgccaccgttaagtaggtagacgaggtgtccgattgttcgccgcacaatagccttacacgttgccacgggtcgagcatatgtctaccgtagtagggacatccgccatcgtgggtcgagtatatgtcttccacagtcgggcacacgccagtatgggtcgctcacgcatagcttactgactgttcacggtaaggttctcgattagtttctcgccccgaatctaaaatctaccgacccaaacttaattttttttgcccaacttctatttctctcacctaaatcctatttttactcaataacaacccttactttacctattcctgatgagtggtgtcaccttacccttttggcgacacttccaagcgtttccgacttagaattcttatcttctcaacactccttcttcttaagtcttcctaatgcttccccaaactgttccaaaacaacttcttacttaactcttttcgatcccttttgattctttagcttcgatcaacttttggtgatggactccgccaaagcgagtcttagtctaaggtgaggaatgttacattttcattcctcgaatttttatgacttagtgactacccactgttcaccttgctttgatgtggtagcttctataatcttctcctattttcttgcaacctctttgaacttcttgtcctttagagaggttgacgatttccttttatttgtcatgcctcgccattcttcttgtcatgattcattttagcatcattcctcccatttgattcttctatatatatatttaagatgttccattgtgcaagactttgtactacctcctttttatacttcttcatacaacctcacttcctttctacttcaccaaatctagtctatttctcttatcctacttgggaattgttaaatattgttctttgagttaannnnnnnnnnnnnnnnnnacgttatcaagaaaatttgggcaatgcacacaccatctactcaatgattcaatttccttgggatttatgagttccaattctaaaagtactaaaggttccacctattcttctaagtttttttttttggatttttgaaacttatgcttgtacttagaataggtttttctaactcttaacatctaaatggttttctacgccgattcctttgtttgcgtttcacacacacacaataaaacatatataaacgtaaacaaaatatcagaaaatataaatatagaaaattacatcataatattagacatcaagttcatacatcatttaagttacaatcttttaagttatacattacattcctaaattgttatgttatacatattgcattttctaattatacaagtatacccatcctaaaaattatacaagtacaaaccatcttaaaagtaatataactaggcgaagggctttattggtccacactagacttctaagccactatactacaataagagggttagtaccctacataccttcgctttggacttgttatggtgaacttaactgtaaatattcctacacataatacaaggacacctagaactagtccagtaatcctccatagattccgaggtggatgcatcagtcatagtggaaggaaacatacgagacgagccctcaggtggtcctgctatgactatcagacacacactagcatagtttccagtcccgtcacacaaacggaaccaaatcaccagatctccatatgggcgataaaaacgacacatccttggacagtgtcccagttccccacatgtgttacaatatggttcccaaagtacgagcgcaagagtcgcaagcactcccatctccgtctctatagcatcccctcgtcgcatacaatcataatctctccatagtgaggtgagtggcgaatcaggcaagttcggatatgtgaaggatggaacaatgggtgacatcacggatgtactcagaacaatctgatctccatcgtcatttgataatagaacaagataaaactccgtcccaacgccaagaagagtcgagtccagacaaatagagactggagaacaaggtaatctctaactaaacaaaacgtataaaacgtatataaacgtaaacaaaatatcacaaatgtaaacgtaaacaacgtaatctttccaccgagtttcatcatgtgcaagctctaactcaatcatcacataatcatccatgttgagattggggataggcgcctcaataagctccacctccttcttaaaataactcacaaacgatcctatcccccacagtcgtctcatccttaagaccattcaaactcgccatcctttgtgatgcaattggaaatgattcacgaacggattttagatttgggacaagaaagtaatcaaagaccttaccatgaacggtctgtgagcgatgcgtgagcgacccgtactagcgtatgctcgattgcggcggacatctgctcgacccacgatggcgtgtgcccgaccgcggtggacatatgctcaacccatgccggcgtgtgcggttattgtgcggccaacaatcggacacctcgtcgacctgcttaacgacagcgagcaggtacataagttgctacgacaatatgtgggcgagaaacgaccatgtctcgcctgcgggtaacatgtcgacaagggaaatgactcatgtcagggtgtcaacttcacgatgctcccagtctggttgttaatcaacggacgctgcttggtgttgacaatcgtgactcagtgatacatgttgtcggaagagacatgattagtggaggacctaacggcgaagcagcttagtaaaccgccttagctctctatataaaccttcgactcccattagaaattcctcaccctagaaacgctctaagttagtttcgctaaggaatcctgagaaaagttctgatttggaagtcggtaagttttccgatcgtagtttatttttagcaatcgccaattagtccctaatcaagtatgattatggtatgttagataaccaaataggagaaaaataccaatggattcaaggggtaggaatagctgtttcccaaggatgcgcggagcacctataagtttcgtaagttccggacatgtgttgtagcacatgttaatgtgtttatttattttaaataattatgaaacttaggaggttagtagatcatacttggcgataattattgagtgattcattgttttatattatgattgcattatgttcaaatatggtataaacgttatgctgcccaaattccgacaaagataacagttatcttgtccgatttacggtaacataactgtggtgctgtccgattacttgggaactttttgttgtttatttgttcttggttaggagtggatagctaattagcattagtcgaatcatgtcttccgatccgtctgctgttctttgcgtgaaactccgtagcattatagcttacaaaggctcggggctactttgcaattgaccgggcgcaacatgacgatgtagtattgagggatgcgatctcttttagaatttcgtgtttaggagtgtgtggcaatgccttgagggatgatctgaattcgtagaggcctaaaaactaggatggaatagaagtttgttcgtttaagtcttttagtgcatttattgttgtttcgagttttgcttgttgcttgtttaggtatagtttgggaatcaatagcagtaagagtaaaaccttagagaccctggactaacttactaatctgagtaattttgtaaagttttttaaaagatttacaaaggtattaaaacagttctaaaaaaatttacaaaaaatttttaaatgcaaatttgggcggtgaattgttatgccggaagaaaaaaattgtgcgaagaactttttttttctggcaaggaaaaaataattatggcgtgaattctttttttttgtgggaaaagtaaaattttggcaaaaaaaattcaatttctaattacatgttgtcattagatgatggataatttggtcattttgttcaagaaaatgggtctttttaaaaataaccaacataaaaaaatattattgcaaaaaggcagtaaaatttttttaatatacttatcggtacatgtaatatcaccaaaagctaatcaaattttaatattgtttttagatcttatataaagttctagtcctagtaaatttaataagaatcttcttttaaaaaaagtctgataaaccaaattttaggacatttacgtaagaattattctcgaatgaactgttataagtagtaaatgttgtaaagaaaataaaaaacttaaaaaa

SEQ ID NO: 35001 - DNA, 2126 bp, Arabidopsis thaliana landsberg
tccagactctgatagatgttgcaaagtaatgaaaaagactacttaatgaaagagtcgtcgctcattcatttaacgcagaaaatataagagtaatttaaaatgcaaattggaccgacctttagtcgaaaagtttaacgcagaaaaataaaaagtaatttaaatgctattacaaattgaaacaaagaatcagattatttgacgagcaacagtatatacaaatgacatgaaagtgaaatggggcgaatgtatctgaaagctctcctaatcaaggagtcaacaatcacctatttaagaatgtacgtttagtcagttcgtttcactaccgcaagcggcacgtccacgacgagaggctacggcaggctctatactggaccgcaagttgtagtacgactcgtcgccgctgccgcagccgttgccgctaccgctgccgcatgatttatgttcgtttagttgacgctgccgttgccgctgccgttaccgctgccgttgccgctgctgcaagtcactatgttcgttttgtcgctgctgcgttagttttcacttaattctttttttatttttagaattttgtataattatatgttgaataaaaaataatgtaatttaaatatatttacatctataacatttttttttgagtactaatttttagctaattatgtaattataacaataaaatttttgtgataaatcattaacataattgaaacaaaaataataaactaaatcatttaactaaaaatagtacaccaagtcataaaggatagacaaagtcgataattaaaataataaaccaagtcactaaaataaacatatctaataaggtaaacgacctctattgcattcgttcgtgatgttgtcacgcaaagcttccatcgctctatcaccggtcggctcatatgcaacatgttcttcttcatcttcttcttcttcatcatcatcatcatcaacacgatattcttctgtgttttgccactgtaaaaaatcatgatcttctcgatgtaaattccttatgaagttgtgtaatgccattatcgctgttacaagcttaatccactttgtcagaccatattttggatgcctacgatctagaattcttgatttgaatttatagaaaatataaaaaggcaaaaaaaccatcacaggaagtgaacaaaacagacccttatataacagataaaccaacatttaattataagaatgaaatcatttgagagcgtgatccaagctatcacatgaattttttttttgataaacaaccataaaagtcaccatatagttgaccctaagagtaaacaaatcatatctctgtattgattgcttataacagattagaaaaatgaggaagacatgtttgatactcatcctaaattgtaagacagcttatgataatcacaaaggaactcaagtatatcaaagagaagacttattttttcctcaagccaatgggtgaacaagcagagtcaaactttatagacttcaaaaataagaaatcacaatcaaaaagtccatgtaacactgatattttccacagaacaagtttattcacaaccacgattagttatttgaacatgacatgattaatcatcaacacagatgaaccaaactcaagaacatgtcaatgcacagtaaaaaaggtcaaaagatctgttcttttaagaaatcgattaaaaacatacacatcaagagaccattataagcgaatatacttccatcaagtcaatgccaaacctaggattagaaaaataagatagccagctcaacctcagataaaactaattagcatcaaccttaaaaacttagagaaggcaagctccataataattagagattcaacggaaagaaaaatccatcaaattgaaagtagctacataaggtaagagaacacaaatcaaaatttccaagagatttcaatagctgtgaataatgaaactaccatgctttgttttgtgtctggagattcttcttcaagcagagaacttcaaaagctcttcagggtcaagaagagagctgcagaaacaaaacccactacgtcgaatcgccaattttattttgaaggcaccgagcagatccaagagatttcagatccttccggagaagacgagaaaatttcagagcagaaataa

SEQ ID NO: 35002 - DNA, 1828 bp, Arabidopsis thaliana landsberg
caatacaacatatatatatataagatcaataacttggtgatcaagttattaattgataaggtgataagatacactttacttttattggggacaaagttaatgagacgcggagagagttatgatggataattatccatattttcaacactcccccttaattatctctcatttttgatgaagtacgcactgcttcgttaacccattgggataaaaatcatgacaatggaaaaagagtacagtgacgtgaactctccctcgaaaagacttcacaagtctcgtaagtgacgcattccaatactttgaacatgctttctaaatgtagaagttggaagcgcgtttgtgaatagatctgctgcattgtcacttgaacgaatgtattgaacgtcgacttcctaattcttctcgagttcttgagtgtaggagaagaatcgtggaggtatatgcttcgctttgtcactcttgatatatccttctttgatttgagcaacacatgcaacattatcttcatatattcgtgttggctctcttttgatgcctaatccgcttgcttcttgaatatggttagtcatggatctaaaccaaacacattctctacatgcttcataaagagcaattatttctgcgtagtttgatgaagtggcgactatagtctgcttttgagaacgccacgagattgcagttcctccaatggtaaaaacatatctgttttgtgatctaaacttatgagggtccgatagataccctgcatctgcaaaactaaccagaccaaactcggattttctaggataatgtaatctaaatcaatagtacctcgaagataacggaagatgtgttttatctcattccaatgccttcgagtaggggatgaattgtaccttccaagcaaattagtagcaaaagcaatatctggtctaatacaatttgcaagatacataagtccaccgatggcactcatgtaaggtacttcgggaccaagaaaatcttcgttatcctcacaaggtctaaatggatcacttttaacatttaacgatctattgaccattggagtacttaaaggatttgctttatccatatcaaagcgcttaaaaatcctttttgtataattggattgatgcacaaatataccatcttggaaatgctcaatttggagcccaagacaaaattttgtctttccaagatctttcatttcgaactcttctttcatatgagttcgtgcatcatcaatctcctttggagttccaattatatttaggtcatcaacataaacaacaatgatcacagtttccgaagcgtatttcttaatgaagacgcaagggcagatttcattattcacataccctttcttaagtagataatcacttaaacgattataccacatgcatccggattgtttcaatccgtaaagtgattgatgtattttgaccgcatatatatctttagactttgatgagtctaatgcctcaagaatttaatccttccgagattttcatatatatatatatatatatatatatatatcattatcaagagatccatataaataagttgtcactacatccataaggtacatatctaaattattagataccgaaaggctcattaagtacctgaatgtaattgcatccatgacccgagaatatgtttcttcataatcaactcctggtctttgagagaaaccttgtgcaacaagtcgggctttatatcgtgtgatctcatctttttcatttctttttcgcacgaacacccactcgtatccaacaggttttacactctcaaatgcagtgacaatacgtccaaagacatttcttttattaagggagtgcaactc

SEQ ID NO: 35003 - DNA, 5004 bp, Arabidopsis thaliana landsberg
  unsure (1)..(5004): unsure at all n locations
catttgttagtcccaaaatttgttctccctttagaagcttatgaagattcttcattccaacatgtgctagtcggcgatgccagagccagcccatgttagtcttagcaattaagcaagtgtcgagttcagctctatcaaaatctactaagtatagctgaccctctaacactcccttaaatgttattgaatcatcacttcttctaaagacagtaacacctacatctgtgaaaagacagttgtagcccattttgcataattgagaaacggaaagcaaattgtaatctaaggaatctacaagaaaaacattggaaatagaatggtcaggagatatagcaattttacccaatcctttgaccaaaccttgatttccatccccgattgtaatagctcgttggggatcttggtttttctcgtaggannnnnnnnnnnnnnnnnnccctgtcatgtggtttgtgcacccgctgtcgagtatccaacttgagcccccggatgcataaacctacaaaacaagtttagttcttgactttaggtacccaaatggttttgggtcctttggcattagacacaagaactttgggtacccaaacacaagtctttgaccccttgtgcttgcccccaacatatttggcaactaccttgccggatttgttagttaaaacataggatgcatcaaaagtcttaaatgaaatgctatgttcatttgatgcattaggaattttcttcttaggcaacttagcacgagttggttgcctagagctagatgtctcacccttatacataaaagcatgattagggccagagtgagacttcctagagtgaatcctcctaattttgctctcgggataaccggcaggtacaaaatgtaaccctcgttatcttgaggcatgggagccttgcccttgacaaaattagacaatcttttaggaggggcattaagtttgacattgtctcccctttggaagccaatgccatccttgatgccagggcgtctcccattataaagcatactatgagcaaatttaaaattttcattctctaagttatgctcggcaattttagcatctaattttgctatatgatcatttttgtcggcgtttcgagacaggggggtccctaagccgacgagtgagtgtgctgcgtgccccagcccagatgggtcgagcgcgtgggcgagcgcaaaggggggagaggcgaggtggccggagtcgagcgtgagagaggtggaagtcccgcggccttcgtgttcgtcccgcgcccaggtcgggtgcgcttgcagtaggggggttacaagcgtccacgcgggtgagggaagcgagcggccccaagagagcgcctgtcccgtcctcgtccccgcgcggccaaccttctctaagaaggccctggtccttccttttatagtcgtaaggagaggatccaggtgtacaatgggggtgtagcagagtgctacgtgtctagcggagggagagctagcgcccttgagtacatgccaatgtggcagccggagagatcttggcacccagctggcgtgatgtcgtggctgtcggaggagcaacggagcctggcggagggacagctgtcggagcggttgagtccttgttgacgtccctctgcttccgtaagggagctgagagccgccgtcgtcacagggctagcggggcgccatcattgcctatctggcggactagccagatgggaaccggtcttgttctctgcggcccgagtcggctcggggcagggtgatgatggcgcctcctgttgacgtggctggcctgcgccctaggttgggcgatgcggaggctcctccgaagccgaggtcgagtctgtcttccgtggccgaggccgagtccgagcccctgggtcgggcgaggcggaggtcgtcggctgaggccagggctgagtccgagccctgtggtcgggcgaacggacgttcgtcgtcttctgggacttagctcgagtccgagccctgggtcgggcggagcggagttcgccgtcttccgggacttagcccgagtccgagccctgggtctggcggagcggagttcgccgtcttcgcgggacttagcccgagtccgagccctgggtcgggcggagcggagttcgtcgtcttccgtgcttagcccgagtccgagccctgggtcgggcggagcggagttcgccgtcttccggggcttagcccgagtccgagccctgggtcgggcggagcggagttcgccgtctttcgggcttagcccgagtccgagcctggtcgggcggagcggagcttcctatggtgcctgaggccgggcctgactgcctgtcagcctcactctgtcaagtggcactgcagtcggtacggcgcaggcggcgctgtccttctgtcaggccggtcagtggagcggcgaagtgactgcagtcacttcggctctgtcgactgaaggcgncgtaaggataaaggtgtcaggccaccctttgcattaaatgctcctgcgatttggtcggtcggcgcggcgattcggtcagggttgcttcttggcgaagatagggcctcggcgagccggaaatatgttcgccgctggaggagggcctcgggcgaggcagagatcctccggggtcggctgcccttgtccgaggctaggctcgggcgaggcgtgatcgcgtccctcgaatggaccgatccctaacttaatcgcacccatcaggcctttgcagctttgtgctgatgggggtcaccagctgagatttaggagtcttgagggtaccctaattatggtcaccgacagtagcccccgagcctcgaagggagtgttagcactcgcttggaggcttttgtcgcacttttttgcaaggggaccagcctttctcggttgcgttttgtttcggtgggtgcgcacgagcgacagcctgggtgtagcccctgaggcctcggagcagtggtttgactccttcaaggtcttaatgcctcgcgcaatgcttcggctggtctggttgttcctcatgcgagctggccgtagcccgggtgcacggtcgggtcccaagttctcgggctggtatgttgacgctgtcaacggtttggccggagccgggtttgcgagacagcccccgagcccctgcacagagcgagaggacggtcaaggacagactcgacttttttacatacgcccctgcgtcaactttccgcaagaggacgggggaaaaagcgccatgttgcccttggaggcggttgaacatggtgtctccagtgagctgctgacgggtaatccgagtggacgtccgtgccccgttcgttgggggtcggctaggggcccggaggcacgcccaaaagtacctgcgggtgatttgccggacccggtcccctggcgacggggtccgagggctcgatgcctccctccgatgggattctgttacaagatcgctcccgctggtctcggaaatgtcctagggtacctcgggagcgcagccgagccttggttatgtatcgaacgtacccctggtcatccctcgctcggtgtctgaggcgactgtgaacccttcgggggccagccttcgaacccctgatcagtaatgggcgcggagcccgagtagcctgaggcggtcgtggagcccttcggggggccggccttcgaacctctgaccagtagtgggtgtagggcccacgcgatctgaggcggctgttgaacccctcggagggccagccttcgaacctctgatcagtaggggggctcggagcctggttccttcactgggaaggatccttttcggggtatccccctttcccggtccctgttgcaagagatagagaaagagganaaaaggaaaaggatacgaaatcgaatgacgtggcgtaccttttttgatgcggtcattatggcgaaggtgaagcatcgctcgcttctcttgccagagggccggctatcccgccgcggagttaatgcgacggggcgagcggtttcgcggggcggccgttgcgcgtgccggagtcgttcgaggaacggccgtttcgccttgggtttttgaatcccgcggcgggtccgggcgaaacgttgaacgggtctcgcctcggtctttatatactcgggggagggtctggcgacggttctttgctccacttctcgcctccttcttaggttttcgcaacctgagaggtttagccggagaaaaggaaaccgcccacccagtcctttccgccgccaccccttttgctcggtgatggccgaccgggtgaccatcgtctcgccgcgtgatccatggcctttctccacagtcacggcggatgacctggaggatcttgttgctgagggtttatgatgtagctgaggggcccgatctttcggcgagtagagataattccgatttggcggaagatgacccttgcgatccgactacgacgagcaagcccgaggcgccaatgcaatcgctgaaccaactccctgtggttaccgaccttgctgatgcgagatcggcctgatcacgaagatcgtttcctgtgcgcaatcgaagaacgaacaagaacaagatgcgagcaatctaatctattactcgagggtggagttctgaatacacgaagacagcgcagatttgcgcgtgttcgagagtagctaaggctaacgtaaaacaaaactcaggaaataaaggaggcgcagctcctgaataaatagagacgggcgcagcccctaggggcggccaaccctaggtcgtccattatgggccgcaattgggctggtcgtctattcttccgggccttcgttctttaacaacatgatgtagttcaattctcttgcacgggcccgagtcactggcccaggtggaaggggtggcgcctgggctggagaaggtgctgctggtgtagatgtgctcatgttggtgttgatgtccgcatcatcctccccttcttgaactgaagtcgtcctcgacggcaactcctcatcttctcccgcatacggtttcaaatctgcaacattaaaactagtggaaacaccaaactccgcaggtaggtcgagggtataagcattatcattactcttggtt

SEQ ID NO: 35004 - DNA, 2183 bp, Arabidopsis thaliana landsberg
  unsure (1)..(2183): unsure at all n locations
gaaatcaaggatcacggccttctgaaattctgaaccttgggttcccatttcataatcacgagcttgattattactagtattggaaagtaaaataagatgattaaacaagtgattttctcaattacgtgtcactaacactaagggtaattatgatgaccaatgggtgacatctcgattttatcaaacgtcccttatttttttcgacgtcgagattttataaaccagtaaaggcattctctttcacttttttcattccctcatttttatagaatcagtttaagtttttcaattgctaagggaatcgnnnnnnnnnnnnnnnnnnnnnnnnnnnnnnnnnaagctcatctgaggcaagaaaacaaaataaaatgattcaaaaactacatcaaaaaaaagtaatggacatgaaatgattcaaaaaaagtttttgttgctatttttgtctgcacgaatgtcacgtttgagaatcttatcccttcataaattccccaagtgtcaaatgtcatgcttcttgttgctcataaagacccttttagattccctgagatggaccccccaaaaatgtgtttcttattaggttgagattctctaacttaccctttcaaaagcctatgggcctgaaagcccataaaagtcaaaatttccaaagttggcccaaaacagaaagatacttctgcgtagacattctacaaagtcaacgcttaaatatgtcctattcttttactaattcaaatcccaagttactagagaagcaactcgtcggccatcaccaagaacgtggctccaagttatatatgattcggccgaattttgaaaacttcttcaaaacatatagacttgttctatcattttattgacaacttccatttcaccaccattcctataaataccattcaatagttttcttcattgtcacacaactcaggcaatctctcgctattcctgtaaacacaaaaacttgtaattcccgacgaaatggcgcggttcagtctggttgtagtcgtggctcttagccttgccatctctatgttccctgacacaaccactgctcaactcaaaaccaatttctacggaaactcatgtccgaatgttgaacaaatcgtgaaaaaagtcgtccaagaaaaaatcaaacagaccttcgtcaccatcccagctactctccgcctcttcttccacgattgcttcgtcaatgtaatgctcaaacttttgttgatttttgtattagaaaccttttatgcaatgatttcttaaaaattttggttggtatgtataaatagggatgtgatgcgtcggtcatgattcaatcaacgcctaccaacaaagccgagaaggatcatccagacaatatttctttggccggagatggatttgacgttgtgatcaaagccaagaaagctcttgacgctatcccaagttgcaaaaacaaagtctcttgtgctgatattcttgctttagccacccgtgatgttgttgtcgccgtaagttatatatttcattttcttccaatcagtataaaagtgtttttggggaaaagaaataaaaaccatatgttaaatattaaaacatgtgttatctattatacaacaatgattaagtggtgtacgtgtacgcaattttcaaaaaaaagttcggatgtgtgtaggccggaggaccgtcctatgaagttgaactcggtaggttcgatggtttggtatcaaccgcgactagtgtcgaagggaacttaccaggaccttcggacaatgtagacaaacttaacgctcttttcacgaaaaacaaacttacccaagaagatatgatcgctctttcaggtaaaccaaaatttaaaacaaaacatcttatatgcatatatatcatcaaaatgtatcgatatctaaaccgatagattcataatgtagcggctcacacccttggattcgcacattgcggtaaggtctttaaaagaatccacaaattcaacggcatcaactccgtggacccaactctaaacaaggcttacgctattgagcttcaaaaggcttgtcctaagaatgtggacccaagaattgcaatcaacatggacccagtcacgcccaagacgtttgacaacacttacttcaacaatcttcaacaaggcaaaggtctcttcacctccaatcaagttctcttcacggatggtcgctctaggcccaccgttaatgcttggc

SEQ ID NO: 35005 - DNA, 3892 bp, Arabidopsis thaliana landsberg
aaaccaagaaatgttcattggtttcaaggatatttatgaacagaaacttaggaggcgaaagctgccgggataaacttgatactaacatgagaaaactaaaaatatttataaaagactaatctataagggaataccttgaaaccagcatctttagccaagcagaagcagtcagctacagcagcaacagtatgacctctatttgtgtcacgggcaacatcttcatatgtgctctggacacctatctctagccgggtgcaaccgtaaatcagcatttgtcgtaaatgaggtccaaggcagtaatctggcctcctggtgaatttttaaaacagattagagaatgtattctgatatttgaatcttcagagattagagactagactccataatgaatgatcaatgaaaataacaaggactgattcacacaaacaattggtgttagatttttatatatattttcacaatttcactcagcttgaccatttccacaaagtgccacaaagaatacaatgaaatcaatatatagatactatgaaggcttttagagaaaacattgaggcaaaaaagacagatttcaaatttagatgttgtgcatgattactgcatcgaactcacgtttcaattgtcatcccaatgcatttagttgcactatgtgcagagtaagcaactgcctcttcaacgttggcttaagtgtgtcctgataaagcattatgaagattccgtatgaagaaatcccgatactcagcaggcagtgacatgaaagtacctcccatcaaaatgaactcaacctgtcattcatataatcaggagtaatcctctaggctaagagactggtaaaaagaacgaaaataatactcacaggttactagaaatatcaaactctaaccttatctacactgtgacccaacctcttcagctgatctatcctgcttcttgcctgaacatatggattgtacctaagaccataaacagggctttagcaaaatcaatttaaacatgaaacgtgcatccttctcatcacatgaacagcaaactgagtccataatttcaatctaagaattctatgtctttttaattcactcataaagaagaataaactttccagcttatagcattttccttatggattttttagcagctgtgttatcaagcaagtctacattctcatctataatctagatctttttctcatttcataaacatttcttgtaatctacaatgtttgaattctagcaatcattttgagtcctaaatatcaaagcacaaacaaactaactatgaccctaagcaaagttctcaattgaagctttcatgaagctatccacacaacatagtccccaaaactatctaccacctattgtcagcaactgaaactaagttcaaactccggtggtagattgggtcagaaatcacaaatttcacccaaaactacctaaaccccaaaccctttactagatcaatccagaagctgtaatacaagtttcaattccataacacagaagacactcttcacctggctcgaatagctcgcatgctggtaggctcatatccagtgtaagactgagtactatactcaaagtcagagtcaggtccaccgggacaataaacgcatatattccccgtcgtagctatatgcgggcacctatgaggcttcgacataaccgccacaacggcgatccctgaagctgttcgaaccggtttggcacggagcttcgggagaagagtctctctctctgaatcaggaagcgcagcaatcatctccacgagcttaggcgcacgtgctaggccgtattccggcaagcggcggttttaattgcgtttaggtcaacattctagttcaggtgtgaacgctcaatcatggtgctaacaatctcagatatggcgcgaactcgagcttcttcttcagttaatccacggccttgatagccgcatttacatggccgaggttgctttttcagctagccgttcatcactaccgcagtcgccatagtcaccaaaacctcagaccaaaattacgggaaaatagcgaactcgttgaacgcagattttgtgttaatgaaatcctttaaacgacatcgttttaatctgtttaactttttttttgtcaacgcttcaattttttttttgatgcaacagaaaagacataaaatggtgtggaaccaaaatctatatgaagattcagtctccttaagatgctgaagcaccagccttttgtgttagacaatgatgtgcagtgataacttgggttttgaggcagtcatctttgagaatgactccatgaatcgtaatggcatatatatgtgccgacgtaatagccaagatggcttatagctgttggagataatagtcctctccaactattgtggagaaggagtaccaaaacatataatcctatcttttgggaattaaatcttgatttacaaatcttccatcataattttatatcagccaattacattcaagtgttatccaacttctcctatcattcaaattctcacaaaagaaagaacaataaatgaaaaaatctcagatcctgctcatgggagagtctaagtgatgagaaatactcctatctttttcctaacttcctgtgcgtagccttcgtagagaagcccgtctacgagatctttctttgccatctgtaaaactcaggtgttatgttaccaactccatcagcacttgttttttatgcaaaaagtgtagtgagtactatacgatataaccacttacctcttgtcactcttccagatgcaagtaaagcctcttcggccattgctctccattgttctgcacacgaataattaactcccatcccaacactgagtcctcttaacagaaccacagtgcgaagtacagagaacagttcctctggaaatgtctaccgacaaagaacacattcaagttagtttggtatatattattacctgtagaacacacaacttttttttactttgtgaccatcaatggagctttacttacctcaacggctatctttttaatcgaagagtcatctgagaaaggttgcaaaactgtctgaccagtaggcatctttgtatcaaaaagtgtttgtgctaaccgcagaagttcttgctgctcattctcacacttggccactgtatgtaaacccatttccctgaacattcacagccacaataacttaaggaatttagtgctgcagtaatccaaactgttgacagtgaatattccaatattggacaaaaaaaaacgttttcttatcactttcaatcataataatccaccacatacttgcctcaaaacagttctcacatactaaactattcaatttaaaagtggcaaagccgttttttgaacataatgatcaagtacttaatcttcatagcctaaacaaaatgaaatcctcgctcacaaaataacttttgtggtaacaaatggtttcaccttttatggactggttcttattggaatatctttctcaaaagaaaaagatttgctaatgacaaaaatgcttttgagccacaaaacagatgatatgaacaaaaacgaacaatttagatcacaaagttacttcagtagtgcatggagatttaatgagttttgagttaccaaaagctctgtgatactcgtgaagcattgttatcagccatggcaatgaccaaatttgcataaccaagtctcaacttgttgggtagttccttcacttgaccatagtccagcaatgcaacctaatgacgggaaacaagattacaactcagactatatagacgggcaagttctgccagaaggtaacactaagcgaattaagaaactaccaaataatgactacaagcaaaataccacttgcctcttgacctttgcaaatcaagatataaccaggatgtggatccgcatgaaagaaaccactttcgagtatcat

SEQ ID NO: 35006 - DNA, 4633 bp, Arabidopsis thaliana landsberg
ccagaactaaagctaactgatttgatcggtaacctaattgttttacggccttataatgatgtaaatgggctcaacatttggcccaacaaaagagcagtttcctaatttcatctgattttggcagcaaacattttttagaaaactgatcgtaacttggattctgtctgtgattgagtaggtagtcattcataaatctggagcttcgaaaatctctctgatttaggtaattactgtcgcttataatgatttattgctctaaatccaacttttgaaattttccaattacgaccaattctctataaatttctcagcaaaaatcacggcgggaatatgaggcggctaccaccgtggatgctcggtggcgcgtcaaccggtgaagcagctgcacgcaatggttcacaacccgaagctcccaaaacaaagggtgaaaaacgaccaaaaagagtccaaaaacccaaagagaaagacttaaatctcaagtcagatgaacctaaacgagttcgcaggaagattagggaagaagctaagcgtagcccggaggtgattcaatcagtgactgttcctgaagatgatgatctcacagttgatgacttattaagctttgctaatgaggtaatgtaatacttcagttccacagtttttactattaaggatttgtgaatttacttaacaatgaatctcagtatgtccaacgtgatgaggaaggaacaagaaaggagcgtgaaagaagcttgtcagtgtctgaaactacgctagttctcgatgaaaccaatatgactacatcatctcaaggaggaaccaaagattcaacagcagaagacatgttacaattgctaatgggtcctttttacaagaaacgttagaatggaatcacaactgagttttcaagtgcctcaacattttttctttttactgttttgagttctgttccagagatccgacatctttataaaaactgtgtttttatctcgaggaccaaaaatattatagaatgtaggagctactgagttcataagcccatagaaagagcaaacgaaagcattgtgctcgtgaaaattagattttctcgattttggcagctaaaaggaccgaaagcaccactttttcaagcgcatcagtgacgtgctgccttaactaactcaatcacaaacctaaagataaaaatctcaaagagcttgagaatcaaagacactgactaacttgaatattcccacagttacgatggctattattggttaagagtggggatgggtgtatatatagtgacggccacatgtagaaaaccctagttgatctctttgtagggactaataatgggcttgtttgttatttcctttattgggcttgtaagaataaatcacttggtcttagtagtttgtaagttagtggttacgtccactcaatgaatgtctttgtaattgttagtggctaacaaaaatgaatgtgaagcatgcttaagaaaacaaggcaaaatgtaaaaatgagaagaagagaatcaataaagacatttaccctcctaatcaatctttcataaactgtatatgaattttttttagggggttttctgaccccaacagaatttaaagtaaaataaaattgatcatatgaaagtttaaggaataattaaacaggttgtatcgccggaggttgtttccgtttacctctctcacacctatttctcttcttctatccgacattcgaaagctctctctctctatctctctttttaccgcgcttcctacacattgtggcagacatcaactcctacctaaatctggtagcagcccattttcggatcgaattgaccccaaggagatcacatcaggtataagaatctcaagttagctcgtatcgtcttctttagctttcactgcgtttcccgttgcttaaacatgttcaatttcgatttattcgagtgtgatctggatcggcttcgttctcaatttcgtttttttcccttctctgagtttggatccagtcaagtgattttgatgcgataaagctgggattgttgagagagaagatcaattctggttaatattgactatatttggctcttctgtgatttgcagtttttgggggttttgaggaatgaatttcttgcttcgatctgcttcttccgctactcatcggcctccggtgatcgaaccaccagctacgccgcctcaacctccccctgaaacagcgaagcccggagttactttggaagggctgattgctgaagagcatttcccacaatatccatcagtagatgaagatctcgatcgtgtgggtgatggatctggagaccttgatggtaatggagagtcaaatgctaagtctggtggctctggtatggagagattctctgatgtgtctgaggaacaaggatggatcgccattccatacagtatataacttactctctctacttaaaaagtttttaatttgaagttattcaattagagagccttttgttacttatccatgattcggtgatttttcattacagaggagatccctgataactggtctgagtcagtggatattcattctttacggtcgttggatcgttcctttgtttttcctgggatgctgtttctcatattctcatctcaccatttacttttaaagtgcccttagtgattgaacaccgcgacattttgtaccatcctataggggagcagattcaaatccttgcatgcttatctgagagtaaaggagacacagagattattaccccttttaaggttgctgaggtaatgatcagacatgaaacaatgagaggtctctgacaatcaaaatggagatatgtctgatggggcgagtacgccatcaggggatggagaaatgagtcctgatgctcaatttgctactcagaatggtgacagtccttgtaaagagagtttggattcacaaaaagacttatctgatggtgaatcaatcttgaggatggaagatcataagagacgaacagaagatttgctttccaggtttcagaagtctcatttctttgttaggattgcagagtctggtgagccactttggtcaaagaaaagttctctggtcgcagatacagagatggatgaagagaggaaaagaacaaaaagtagaccttgtgtcagtgcttttgtagatagaggagacttcgatcctaatgtttctggaggtgtagctagaagtaaggcaaaatgctgtgccttaccaaatggagatatagtggtatgtgatggtaaatttgttactttcttttttcgtaataaaactaggatagtctgtttgaattgatttatgaaccagtgaaattcctcttcttgtgtaatgcattgtctgatttatgtgaatttaccaccctactcgttcagatattctgaactttgataaccgagttgatggacctactgattcttagacaacacctttgtttggaaggatgcaggtctctttacaagtttatattgtcgactgtcccaaagaacccatcatagagatactgcagtttgagaagcatcaggaccaggaccaaaatcctgagaacgataaggatccatatgggaatcttttaaagtggttgataccgctggataacactatttctcagcaaccccgttctttaccacctccaataacccctagcccaagtatcagtagcactgcacacaagccagcgatatcttctacctcaggctctcaactcttctcatttggtcattttagaagctactcaatgtccgctctgcctccaaacactgcaccagttactggacccataaaaacacagagctctaaaccatcatttgatattgaagattgggacagttactcaggccaaacggtacgaaacggtcagaagtctgggactgaagagctcttgtcttttcggggtgtcgcattggagcgggataggttttctgttcgttgtggactcgaaggcatctacatccctggtagaaggtggaggaggaaactcgagatcattcaacctattgagataaactcttttgcagctgactgcaatacagatgatcttctctgcgttcagataaaggtttgtctctgcatctctgttaatttttggtgttattgtggtcaattttttttctgggatgcatcctaacttaccttttttactggcagaatgtggctcctacccatgctccagatattgtaatatacatagacgccataacaattgtttttgaagaagcagggaaaaatgcttccccttcttcagtaccaatagcatgcattgaagctggaaacgagcacagtttgccaaatttaactctcaggttagctttttttcttaaattcctcgtaattattttattttgtattgaaattctcccatcaatcttcttgataaaaattgatagatttagatatcagcattttgctttagtccagtaagtctcagaagtcttcagtgatgtccaatacaaaataacccataatattaggtaatcttgggtagtgaccaagaaaccatagaacaagttattgaatctaacaagtctctgagagtaactattctcaacaagcaccgtggtttggaggctaaaacagctagaataccctttcaggaacattatagactgcagttacccacccttaggttttccttgcaatctttcaggataaggtgaggagcact

SEQ ID NO: 35007 - DNA, 4844 bp, Arabidopsis thaliana landsberg
  unsure (1)..(4844): unsure at all n locations
ttttattcacatccaaatcttcatggcaaatactaggcgtggtcatttccaaattatgctgttgggtaattcttctaacgtttacgcaattgccttgatgcgtatacgataacactccccttttgcatcagtacgcatcctagtcccactatggatgcgtctgtataaaccgtatatggctcaccttcctccggtaagaccaatactggtgcattagtcaacatggcctttaactccaggaagcttttctcgcattcatccgaccagttgaatgcggtgtcttttccggtcagtcgagacaagggttgggccatgctcgcaaaactccttacgaaccttcggtaataccccgctagtccgagaaaactcctaatctcggtggcattccttggtcgtggccactcctttatcgaccgtattttctccggatcaaccgatactccttggtccgagataacatgaccaagaaaaccaacgctcctttgccaaaatgagcatttacttaacttcgcaaatagctcatgttcccttagccgttccagcaccgcccttagatgttcttggtgagcttcccaatatttcgagtaaacaaggatatcgtcaatgaagatgataacaaactcgtctaagaaatcccggaataccccattcatcattttcatgaagnnnnnnnnnnnnnnnnnnnnnnnnnntggcatgaccacaaactcaaagtggccgtaccttgtccggaaagccgttttcctcacgtccgttggctctatgggaatttggtgatatcctgaggccaagtcgatttttgaaaaccactgtgcacctccaagttgatccatcaactcatctatccggggtaaaggatatttgtttttcacagtaactttattcaatccccgataatcgatgcatagcctaaagctaccatctttctttttcacaaacagaaccggcgcaccccatggtgagctactcggcctgatgaatcctttatccaacaactcctccaactgtttctttagctccgccatttccgccggtgccatccggtacggagctttagatatgggggttgtcccgggctcgagttctatcgtgaacgggtctgaccggtccggtggtacgccactaacggccgcaaacacgtccgagaactcgttgacgatcggaatgtctttcaactccgcactcgcccccacttccttggttgtgatcgtggctaaatatgcctcacatcctttgcctcacatcctttcccgagcatcctttcagcctggattgccgagattaccaagcttcccgaggttgttcttattccttggaattttaacataccctcgtccctctcgaattgtatccgtcctcggtgacaatctatgtgagccttgtacttccccaaccagtccatccctaagataacatcatgtttctttagtggaacaatgattaggtccgcgggcatattgacaccgttcactacaaccgagatgccccgaacaagtccggtcggatacattgcctgtccgccggccgctcgtaccattccataatcggtgtttggttctttcctgaacccacctgtttcaaccaattccggactaacaaaacaatgtgtagccccagaatcaaatagagtgtgcgttactacgtcacctactctcaaggtccctacacattcccttagaatgctgagtacctcccctttcccatatgcatgatgcaatgcaaatgcagttattgaaataatgaatagggagttgtgagaacgtaccagtgatcgccctgaagtttccggcatcgttagcttcctccgacaactcataaactcgcggtgccacggcttgccgctttgggggaggcggcagtccatttcccccgcgattgtccctttgtccggcctgcttctccgcagtcaacttagggcactctcgctttagatgtccagtctttccgcaatagaaacaagtccttgtctcttcaccgagaaccttggactgccctggttccattctcgggcaactttggatcgcatggtccttgcttccacaccggccacatgcacctatggccttccagcaagttccgctgtggctcttaccacaggtcacgcattccccggtcttagcatcggacttagtgttatccaccttgtcaaatttccttttcttatccgcgggtttggtggattgattgttccggatcggtgctttctcccggttcaagtacctctcctcctcgatcccttcctcaatcattgctgccctttcaaccaattcggaaaccgagttgaatgtccggaccaaacaatggttgcggatctctatccttagtccgcggataaatcggcgcaccaaggcttgttcctcctcaagttcacgtcccacataacgccttaagcggttaaattcctcatcatattcacgcaccgtgcggttcccttgaactaggtcgaggtacgcacattcaagcctatcccaagcctccggtggaaagtacttcttgttaaactcgtcttcgaaatccgcaaaggaccggacctcgtcccctctgcgtttctcgacggttaaccaccaattatgggcgtctccttccaggaaatggaccgcaatgtccctttggtaatcctcagggcagcgggtagacttgaagttcctcttgagtctactcctccactcatcggccacaatcgggtccgtactgcccatgaagtgtctcgtgcccagccttgagacatgttcgagaagactcagatagtctcctcttttccgcccataattcggttgtggattcacttccacaacttccgagtcatcgtccttttggttatccccttttaggaccaccggatctgctacaacggccttggtcaatgtggctagttgcgccatcattcccttcatcaaatcccactgttcttgggccgttggagtattgttccggttatccgtgatgtcccttgcaccactactctccggtgcttcctcatttatggacttcttcccggcctcaggtccggccgagtctgtcccatcgaacatcgtcccgactctggttttctcgttgatcatcgtttcctcctcaaccaaagtctcctcgacaatgaccttgtcctttttattctttcccgttttgctgctgttacccatatgcgaaacctccaaagttattccacataactcctagtaaaatggcaaaagagtaaagagcaactactacgagattctcaagccgacgagtggtgataccccttaacccaacacctagtcctagaaccaagcatgctctgataccaacttgaaaggctccgatccggactgcctaaagtccgaacgagttctctcgacccaagccactaagtgactcggccttaaccgtttatgaggttctttcctagtctaatccgttccatatgattccgtgattcaatatatgagacgaatagagtaaacaaacaatcggatactttattgattaagcaaaggattcgatacaacctatgagtttgcatataagctattacaagtcatataatctatccctagatatccgaactatcaccacccatcatcccgaccttgaatctctcgcgcctaagccaagtccttcccacgatcaccattcattcctgaaagtcatagagccataagtaatctcatttacttaatcatatgcaagtccatgcaatgctctatatgccatacactactcgaatccgtggagagaattcaaagaggggaagatcgcgcatcagcccggccgattctcggcaggtcagttaagacccgccggtcctccgccgagccgcgtccccgcctcagccgatccctacccggaccgagtcttgtgtaggatgcacatgacccggatactaccctgccctctagtcgatctttcaaggatccgactactaactcacatcctagaacccttagactcaaagtctacgatcctttaccttccttctcgaggttaggtcgatccgaccctccttctttattgccggccacagcccggctaccgaatcctaagactatttattctcccaagagggagagagttttaatggtgagtttcttgtgttttcggtgtgttgtggtgagtggaatggtcctgggcgccctcccttatatagggggcgaatggatgcttcccgaatcaacacatccgttccttgcacctttccgaagagttgcacctttccgaagagttgcgcccttccgaagagttgcacctttccgaagagttgtatctcttcgcccataaccgcccagctagtccgtcactcgtccagctacctcgagctcgtccgtcactcgtccagctacctcgagctcgtccgtcactcgtccagctacctcgagctcaaccgtcactccttccagctgcccgagctggactgtcactcgacctgagtaaccgtcactccttccagctgagcttgagctttgggcgagctgacccaagtgatttctttacaatcctagcttagcctgcatgatttctcctttgtccgagcttatggccagctccttctcacttgtctgagactacaccttcttctctcggaccaagtcctagccaacgatcctattgaggatcgcgggcgttacaagtctcccccccttgaattggatttgtcctcgaatccgcatcaagttgatctttacccatctccttgaaccactccggaaaattggccttcatcttattctcggttttccaagtgtattcttcacggcctccacaattccacaagacttttaacaaatccttcaatttcccgagtcctttcgtcaccggccatgatcgtacggcatgatccaccgcatgtcccttaaccgggagtatac

SEQ ID NO: 35008 - DNA, 7361 bp, Arabidopsis thaliana landsberg
aaaggaatatgaatatagattgtttgtactgctaatctctcaaatggaaatcgatttttttagtgggcttgttgttagcgttaagatctttgatttcagaccgatcgacaacctgacccattacatctgtatagacaaagagaataaatatatgaatatattgactatataagagataatgcatgtatgttcaaaagtaaaatgaaaacttgaagctaaccatgcaagatatttgagttagcggatccagagaggatcacgtcaaacttagcaagtgagagaaacaaagcatcgaaaacggtatcacatggagagaccgtggttttgaaaacaaaaccaatcttgtatttcaagtcagaaatacgatactgaccacttgtaggatttagagtgatggtcgtaatgatcttccaaacaccctcggttaagcacctttcaaacttctcgatctgctctcttctcacaggagtatacatcttatcaccctatatgacaaaaataaatggataataattaatatatgaaaatgatgattgaacacactataaggctggaccaaatataaagtttaaactataaaacgtacagcttcatcaaccaaaatcatttcgatggattcaccagcctttacagaatattgcctccaaacatgaagcaatttaacctgaatacgccaagcgttcttgtaaggttttagcgatttcaagggagtgaatggaagaggattgtcgagcattgaaaatgaaactgtgtgagtgtaagctgagtgagtagattgaaatgaggcgtccgatatttataagaatgagtggttaggtcaaaaaaatatgcgcaaaagatattatccttggaattcaagtttattccatatcaaaaaacagtaaattataggaaaatatttatcattttccgtaaaagtaggtatgaatataggattatggagaaatgtaaaataattccaaaagaagatcgcaaagaaatattagatgtgctataattatggagaaaatgtaagataattccaaaagaagatccaaacgaaatattatatgtgctataattatgaagaaaatgtaagataattctcaaagaagatccacacgaaatactgtttcatcgtggtcgacgaaaatacgcaataaattaaatgaaattaatacgattattttcctgaaatatagtcagataatttttttgcatgaaactacaaaatctgacggcttgaaatatttctattcaacggccggtattaataggagactcccatatttttaaaaaaggaaatgacgaagcgcgtgtttttttaagcgaactacgaaaccgaacggctaaaaacaattcaattgaatgaccaaaattataacgtataacccaaaagttgtaaacccgggtcaaaaggattcgcgtgttctttaagtgaaggcgagagatcgaacggacacaaacacttcaatcgaatggccaagattataacgtatgacctaaaaattgtaaacccgggtcataaggatccgcgtgtttttttagtgaaggcgagagatcgaacggacacaaacacttcaatcgaatggccaagattataacgtatgacccaataattgtaaactcgagtcataaggatccgcgtgttttttaagtgaaggctcgagatcggacggtcaaaacaattcaagcgaacggccaagattataacgtaacttaagttattctcagtaaaaggtaaactttttcatgacattaaccatttaaacatatgatttaaaggtaaaaaaaaaatttaaccgagaatcacttaacgtacgtctcaaataatagagtagattgaaattaaaatcataatttacttgaatcaatacaaaccataagtaactatatttcataaaccgacaaaacaaaattagacaccgggtaatcaaactgaatttattgtgaaagtcgtctggccagtcccttttttgcaaagaggaagccaaaaaatccttgtaaaaaacagaaataattttttttttcttttcaatccgaaataaacggatattactagtatatccccatccgaacccattaattaccagaaaaaccatggttcgtttccgaaccaaaccacccaaaccacttttactttttatttgaaaattaaataaaaaaaacctaatattttcagggatttcccaattcaaatttcattctttttctcattacaaccgttttcgatttttcttcttcttctccttagtaaccgctgaaattaaccgcaacattccctatttctttaaattcaatcgatcgttcttcttcctttcaccagtatttccgttctctttccgattcgaaatcagtcatgccgcctaagacgcgtgaaggaggtcaagggaaaaaaaaggagatagaagcgccggcgccggcgaagacatagaaagttaaggcgtcggcggagaaaccgaaggttcaggcgccggcgaagaaagataaagagaaagtgccggttgaggagcagtcgccggcacaaacgactgcgacggcgatggcaaccaatgcggctccaacgacagcggctccaacgacaacggctccaacgacggctccaacgacggagagcctgatgcttgatgattctacgttttatgatgctctgaagcatattcctgctgaagaaattcaagagaatatgcaaactgatgaggtagaagatgaaaatgaaaaagaagaaacaagtgaataagaagaatcagggagtagtagccgaaccttgggctccgattccgattcagaggagacggagacaaacaaagaactcgcgtgtgctaatcccgtggatgaggcggagagacaagatgacggcctagccgttatcgaggaggaggaggagaggagctccgcgagcgacgaggacgtcaatgtgaaaaagtccgtggaggatgagggagacgaggacgagagagacgaggacgtgatagtggaaaaacccgtggaggagatgactatagacgaggacatcgcaaatgtggtaagtattccatttcgtaataccgatctaattgggtaataatgcaattgtgaactgtggacagtactagtaacattggaaaatgctatgttgatatttaggtaatattggcggatgtgggtaataccttagagtaatactacaattgtgatttatcgatagttagtactagtaactttgagaaatactacatagtaaaataggagtatctgtgtaatactggtaattacggggaatacttctgagaaatacagagtaatactgtggcagtactatttacaattgactaatatatgaatagtaggatttgtgtaatactggtaatttcggggaatactttttggaaatacagtgtaatactgtggtagtactatttacaattgagtgatatatgaatgaatgtttgtttctttcaggatatggaggaagcgatggcaatgcagccacttggtatgcacttcccggcgtcggagtataccaagaagatgaagttagcaacgaggtgttatatctcggaggtgttgaagaccttcgctgacttggaacatcctctaacgcatgttgagaagaattattttatggagcatccgaatttcaagcacatctaccacctgccttccagatatacccacaaattaatggggatgtggatgctttttcttcgaacggcatctattgagaagaagaaggaggtttggttcgttgttaatggagttcccatccgctatggtattagggagcatgctttgatctctggtttcaactgcaaggcctatccagctaattatcagagtgctggtaatatgaacttcgccaacaggtacttcaaaaccggggtaattagacgtgaagacgtgaaaaccaagctaatggagatggaaccggctagatcaaaggataggttgcggatggcggtcctctattttctaacaagcatcattgccgtgcctactaagactggagaaagggctagtccaattgatgatttctgtgttagggctgcaagtgatcttacgttttgtaagacatttccatgggggagatattcatttgagtacatgttaaaatcgatctcacacacattggatcattttaacggtgtcgtcccgaacactcagtcaccatggcctgttcccggattctgtgtgccgcttgaggtaagtcttttgctttatccttgttacattttcgtaattgaagctaacaattaaatttcatgtgttttgtgtagtttttagcatttgaggccattccatcacttagggaaagattcatagaagaaaaagagggtgcacatgccggttgtccaaggatgtgcaaggtgaatttcaagaggaccgagatgaaagggtttacccttgagcaaatcaaccatgtactcggaacaactgaggttaggaattcctattattccttgagcaaatatgagcaaatatgattttatttctttctaatatttcattgtctattatttccataggtcattgagagtataattagagagaaggctgaagaagtaccccttttggctgaaatcacgggagtagaggatgatgttgataagcacgatgttgtagttgatagttggatgaagcgtcttggtcaagggcgtgaaattagatttgaggaggtgtacaacgaggatgtgcatgcacgaatggaagccccaaatgaagaggaagttcccacagctgttggaccgggagacccgacgttagttgatgtaatggagaagctccattccatcaatgacaagctgaatgaagctttgttggcgcttatggaaatggaggaaaaacaagcaacgttcgaagcatttatggatgagatgaaagccaaggtaaatctgggtaataccggatatactgttccataattggtaatatcgcgtaatactaaggtttaactaaattaacaatgcagatgtctcagaacccaccagatgaggaggaatcaacaatcaaggaaaatgcggctgctccttttgtgcccaaacgagtgacccgttcaacccgtgcaaagtctagtaacgtgtgaaaactattcgtgtaacttctccggatttgtattttgatttcttgtactttgactttgttttaggatttcgcaagtactcgtaaaactatatttggattcaattaatgtattaggatgttttatgatattgttaactgaaatacgggaaatacctcgtgctattactacgaagatattaaattttactgaaatactggaaatacctcgtgctactacgactaagagatatactggaaatacaaaaggctactacgactaagagatatactgaaaatatcaaacaaaacaaacttggtattacgaaacaaatagaagtcttacaatggaaggaaaagtcttacaaagcatacggatagtcttacaaagcatagagaaagtcttacacgcaaattaacaataggataacacattacttccttagaacaataggagaacggaataccactttgctcacgtttacaatctttgcacggtgggctttcaattccttttgcatttcttctatgagatactcatgacttagaactttcttccgattgtaatcgacactctctcttaagctagtcacctcttcttccataggcttttcccaaagtttacggatgagtatcaaatcatttctatcatcctacaaaataccaaatatttatcaaaaataaatctagatctacaaaaactagaaaaactagtgcagtattacttgttctaagcagtattaccaaaaaaactagaaaaacgggaaatagtttgaaataccaaatagatctagatctacaaaaactagaaaaacttgtgcagtattacttgttctaggcagtattaccaaaaacgggaaatacttttaaataccaaatagatctagatctagatctacaaaacctagaaaaacttgttctcttcatcaacataccttaaacttctcgcattgatagtatctcttttcatcctttcgagtgtcgacaatgctaccaccacatggacaaaacttaggaatcccttccatcatcgcaatcattttcatttgctcaatggctcttttcgccgctttcaaatcatcgtagtaggggtctttctcactctctctatccatggtagaaagatgaaagaaagatgagagatgagagagaaatcgagaagagagatgagagatgtgggagatgagagatgaaagaaaaagaggaaagaatatgaaagatgaaagatgaaagatgaaagaagagaaggagagagatcgaaaatgaaagaggtaaaagaaaaaattaaattttttggttttggaaggaaactcaaaatttgttaggcgggaaaatttttgggggaagaccaaaaatttaattccccatgtgtgcgccgttattttggagatttttgacatgtgcgcaacctttttacagcatactatttcctgaggttttggtagtgccaatttctcaaatagtattactttccatgtttttcatgtttaacagtatttcctatatttacaatttgtttatttagtagtacactggattgaactttataaatatagaggtttaaatattttgtgcaattataaattaaatatatgtagcaatatgaattttttcattttaagttggtgataatattaaaagtgagcttaaaagtataagggatatgttgtattgagtctactaaagataagttaaaacgatttaatattaaaatttctaacttaattaagtataaatgattaataatacattttaatctgttaataactcactgtattcattttcattgagttttgaggtaaacaaattcgaactccatcacaccaatttagtattaccaatagtactaatatgaccacaaattcgacagaaacagacatgatattacttgctataaccagtattacaaaaaaacaatagaaacagacatagtattacagaaggggaaatacaatattgcatagtatgttcatactatcaaaacaacaaatcactgcagaaacaatgtaaaatactcaggtaggcgtattcccaaataataaccattgacacgattgccttggacgccttttgttttgcgtcctttgtcgttttggccgcttttccccggttgatggaaactttagcatttttttccttcctttcttcagttttttagacagcggaactatcttcaacgcctttacttcatttggtacttcccactgcgacctatccggaacaaaataaatagtcctataataggtcaatgcccacaactccgcccaataatattttgtaacaaaatcatgtaactccaaaccttttctacgatcttcatcatccatattgttaatgaaagcggc

SEQ ID NO: 35009 - DNA, 2941 bp, Arabidopsis thaliana landsberg
  unsure (1)..(2941): unsure at all n locations
tattacttcacaacacatatacacacattatgatacatacatatatagagagatatgattgtgggtctgtgaaacatgatgtcatcaaaagtgggtctctttctgattcttgtaaggaaagtgatctcaactgttgcttttttattttccttctcatgaatttgtggggattaagagatatgattctcttcacacattggtggtccaacaatagttcaaaattctaatagctgctggtagtttgattttggtagagtttgttgagtttaaaattgagagatttcacaaaagtaaaaactgaagttcatatcgacaaatacatgctataattgaataagaatacaaatttcaatggtaaatgtgttaaacttgaataaaacatcaaagaatgaaacaagctttaaatctaagatctaagctaatatctcctctatacatagttgtgattagaatttcttatattacataatcatcaaattctagttatagatccactgatccagttcaaaaaaaaaaaaagatccaaaaatctggcaaattattaagtccaaaacctttttaatgtgaacttgtccattttccaatgggaaacattacaaaaaggtttgagaaaactcatctaaaattgaataaatgaaattgctctatatatcataccctcaagagattattatgttggtttttaagtgaaaaaccagggaagaatatgaacctgaggactccgtttagttgtccgtttgatgtgttttcgggttttccactttaagtcattaactgctgcatcagtcgcgaccattcttgtccgtctttggttcagagacggtctctctggctctgttgctctgttaatagatatcaatcaaacaaatgggttcagaaaaatgggaggaagtgtagagtatcttaacgaatctgtaaacattctcggttcaagccactaagcctaacagaaaccacacaatcagtagcttttgattgtgacctaaactaatgagtgaagcaaaagtatagaggtttcaagaaagtatgcttttaaaaatctaagatcgatgtgaatacaagtgtgtagcaatgtggtttagagtaagcttttattgcaaaggaacaaacctggcgggatcgatctgtggagtggtttctgccagtggacagcaagcggagcagacataagccttaggccgccaatgaagctttaaacaataggtgtgataccattcgccacattgactacaagaaaccatggatcttgagttgtatggctttagacaaatgcagtgtaacatactccgagctcgtaaagactgcattaatttaccatgatacaaacagttttagataacagtaaggttatgtgttaagctttgctaacattcatttcatattaacctgaagttcctgctctgcatgaacaggtaagttttcaccctcagaaataagctcgaaaacatctttccaaggcaagagcacctgaatctgtcaccacctgcagataaaaccaatagcttctcgtttttattaaacattccatagagactttacgcgatcaactgagaaaacgtgtgctggttatgtacctttctagctcgttttgcccactccagtccagtgtcttttaactccatgagtctcttgcctaagtaatactcttcaggcaatatttcaagtgtttgtccctgtcaataagaatgacgaaactcacaaaccagatcactgtggtttccttgaaaatccaaagagaaggataatgcttaaannnnnnnnnnnnnnnnnnnnnnnnnnggaagttaatatattatccgaacatacctcttttaagtgctgctgaatatgctgtaacgagggctttccaacatcttctagcaactgccatttaaagacgcacttaaaacaattaaacgggatacataaccacactgagtgtcacgaaccaattaaaattcagaaatctatttgtacctcagaggtaggtgagctagagcttaacgtgatggtcttacaacaccatcctagttttagacttgcagttcgaagtttgggaagttcatcgaaattgagaccaagggccagaccagatctcctagcggagtccactctggttatcaaatccattatcttcggaaggatattgctatgcgtgccatcatctattttcgcattgtccaacaaatcttcagtttcttgcaagagctgatgattatcacactgccacctctcgcagttaagcaacaatgtttcaagaattcgtggctcttgaagctgaacattgagcaatttagactgagtaactagatcctgcaaaaaattaaagcattaaattctccaaaaatcaaatcagttacaaaaacataaacagaaaccaaagtaggcacaggaggcagacaaacctttaatacaggaagttcaagcatagaacatggagatgatgccatagaggaagtggctgatagaaaaggctcagatttctgaagccaagtttcagccgacgagattgtgttctctatgccttgcagagtaggtaaaaccgcatcaatgttgactgacatcctaggaacaaacatcttttgataaataaaagacttaagaaaaactaagcatgggctgaagtaaaaaaatttacaagcctgaacaattatataccttacgagatctttaagctcgtacatctgagtttcattttcaaggatagtgcttgctctttcctcccaacaccgtgctgttgacaaaattcccgagatctcaacaaatatctcctcctcttcgatgtgtagtctggaaatagaatgtttggcatgttaataaaaaatcaaagtagaatgcatattacatattctataatcgatataggggacaacatacataacagcttccgagagcagttggtcaatgaaaaccaaagatttttttggcgtataaccctcataaattcacacacaataaaact

SEQ ID NO: 35010 - DNA, 768 bp, Arabidopsis thaliana landsberg
tgatgtttggtgttttatgtattttcaatttcaaaatgtatccattttcctatttctgaaaaatattgttttctgtttttaaaatgttttgccttgcgtattgttttggtttccataaaacataaagtataataaagagaaatattatatatatatttatttatttatatataatactctagtgataataatagcatgatgacaaaagaatgtatatgccaaacttaaatgaagggtgtagctgaaaattcgacgattaaaatccacatgggaccgtgatttatgagtggtcactaactgttttcctcttgtagtcaaagcttagccgtttgatttgagcaaacgtgggatccccaataaagcggagaaagtgagcaaagctcatgtttcttcttcttcctcttctcattcatgtttttaaaaagttttagattacctaaactatcctttaatctcatcaagaaaagtgcacatttataagggtaattaagtccatcaaaccttaaaaatagctggatagtgacgagatgcacgctaaattgattctcttaattcgtgaaaacacttttctaaaaccccacttgcaacaattattattaatttaactatagtatcggcaacttcttagcttttgaataattatccagcttgtgaatgtgtgatcaaacataaacatccatgcatgcatgttggtgtctcatgctgacgaatatatgtgtctatgtgtgtacgcatgtgtttctattttaatttgtgttatgattttga

SEQ ID NO: 35011 - DNA, 2792 bp, Arabidopsis thaliana landsberg
tcttatcaatacggattgattcctcaaataatttttgttcggacagaagatcaaaacgtaggagttttttttatagaaagcaaaagggcgacaaacaaaggaattttgcgtcattggaagttcacgctaagatttaaacatcggagaagcaaactctgaagttttgatcgtcttctcgtccaaaccgccaagtctatcaaattgagaaaattttgtttctaacccgtttaaaattgaatgctttaacttatgagctgtcttcttaaatataaacggtttttaccaacatatatatgatgtgtgtcttttcattctaatcaaaaagagttatggttttctcctttgtcaagtagtaaaacggggttaccgtcggaaattacttcaatgtcggaaacaatattatgatgggcttttattttcagtacaacgtaaaattctacaacttcagaactattttttgtagctaatttatgagagaacctattaaatacgtattttctttgattccctgatttttcttttcgttactaaaaaataaaataattataaaatgggtccatctaaccaccatgactcataaatggcaggtgctctttctccgtaacctcgccttactaacaacactggggcgcgggtctcgacttacttggccgtgattctattatcactgttagaaaatttggcattagtcatataaaagaaaaatatggatcgaatcggatgataaatacttacaaagtttacggttttggtatggccaagttgaagctgcataagatgaaatcaccaatgagagagccaaaaacaaagcaatcagccacaaatttctcttcattttctttctgtcgttgtgttgtatagctgtagttaaaaatagttctatgtatgttttatgtgtatttataccagatttaaaaaaaaaaaaaaaaaagtttggaacgaggcagcgtgtggaaaacatataatctgactgactttcaaaacaataatagtctacgacgaagacaaaaaaaaaacaagggaaaccttttctgttgaattgttatacaaatatgttatgaatccaaattttaaatatgatgtagaataatatataagagatatgaatcaattcacttacttttgtataggggagtcttggttactgatcataaaatggttaaagtagaatctgtttataaatatccatatccatattatccaaacgtagaattttgttcgacatagatcaaaggaactgtagaaaagactaggtcctaattctttgaaataaacgtaaaatatggagatataactagagaagactaggtcttcattcttatgattgtacgtacgtatagattattgacgtactcttctagtatttttgttcaaaaaactgagctcatctagtcgtacgtagtttataaaaaaaaaggtcgaatgcaaagaaaaatctatagcgtattttgaaatggtcaaaaatgtagtcagacacgacaccaacattgtcttttcatctgaaccctacccgtgaacacatatgcttgacattgctcatcttcaacattggtccatgcaacacgttattagtttttgaatactggatgatattgtttgaaatccatatgtagctagcacatggaaagaaaaaagaatagctcatatacatttgaagactgtaaattaagcgtctgatcggtagatatgttacgtatgtatatagtgtttttaatagaattctccttttccatgaaatacggacatataaatagaaatctatgtctaaaagtgaccaattataaaagcggtatatatattgtacttgtgaaaaagaagttatactctcgtcgcaaagtacaaaactccaatcttctttcagtatatatatatatatatatatcttccaaaagaacattacaaattacattatactttatcatgttcggttaactaattaaattaaaacattatcactgctaatgatcatatgtaaaaagaaaaaactacaaacaattttacaattttctaaacatgtatgtctaaccgccagtgcctctgggtggagtctttttacatgaatatgatgcccttatgtctgctggctgaaatgttttaatacagtgccttgcgggtggtgatatactacgttgtgttgcgattttttcatctataagaaagttaatgtaggaaattagaaatataacaatgactatatatatttgatttaaactctttttttttacttcacaccatagacacccaatctttcttgatattatctctggaatttgattctttttcttttcatttttctcttgcagttattacacatggagattgacacaaacatttagatgataactgatttagaaaaaaattttttagtaaataaaataaataaaaatactcaccgaactcacgggatttgtgttgaggtacgagcatttgggacgaatatgcagaagaaaaaacaagaaggaaagttatcaaccacaagactctttgcatttgtatgggttttctttatctgtaaacttacaaaatttagtgcaatataatacattgtggatccatcacttaatgggtatttatatcgatcaagtcgctgcgaaagctacaacattagtcaagtttgataatgatgattattactttggggactataaatttccaagaaaaaataagtacacacaaataaaaagcaagagaagcttttttttttttttttttttctaagcgggattgtaatttcaataacacgcgcgatggtggaattttaaaattggtgattggatctcgataaaatcaaa

SEQ ID NO: 35012 - DNA, 4612 bp, Arabidopsis thaliana landsberg
  unsure (1)..(4612): unsure at all n locations
cttcttccataaacctcgtacagtggtcggagtaacaccagacggtgattgagcagcgaaagggtcaacagatctgctgaaacaccatttcttccctttgatcggaaaaaccaccaatctcgctctcatgatcacttaactacgaaaaagctccgatctttacttatgaaatgtcaatttgtcatctgggtattgctttaaacaacgtgggtttcgtatattcaaaggaaaaatcgaaactttaaggtaatgagaccgacaaagcctaaaatattcaagaggaaagacgaaaagaagcggcggcgcgtctcttggcatatatggacaagtttttatacataagggtctttgaaatcgacttaaaattttggtataacaaaggttgtctctttaaaaggcagtaatgacaaatggtgtactatttgcaatcatgtcaaatggttaatgacagattagaaggcagtaataacaaatggttagtactatttgctataactgaagcaatgataaactgacacatcactaatctcagattatattagaagaaactgtagcatggcttttactgtatgatatacactagtaaactatgcacataaagaagaagacaattaggctgttttgtgatgagaactcacacgacagagactaatttacgtgttactctttttattcatgatctgctataaaattaggctgctcgtttgcgcagagatactcatcgcattctgaagcggttccccaatcttttctgagtcttaggatatcctctgtaaaagttgagcccgaggcaccaatgaacacgcttgacaatgcgcatatcgtcttatccaacattgcttccacctttaaaataagataatgccatgtatcattttgttggcatatgtatcaattcattcaatacgaaggaggaaagaaaacacacctgtgagtcgccctcgagaccatgtctgtataacaatgcatcccatttctcagctgaatcacgagctggtcgtttcacaagggggacagtctttccattcagtatcaacagtgattgtagcagaccagtttcgctttcggctgcatcagtagaaaggtataaaaccggtgcctcgaccttctcaatcagacgagtgatgcagctagcagcttgaggaatggggaaaaagcaacttggattcttggcattactggcacaccaagaaaatttcttagctaaggttcctgatttaatcttcgtaatgaaatgaactgagctacaccaaaagctactatgaaaattaaaaacaatccatcttacacaccatattcttcgtacaagtgatataaactcataatgctcatacttattcataaatgataacttggtcaatggaattcgcctaagctagttagatgtgcaactccaattatctattcacaaaagtacagccgcaattctaaatggttactataccaatactgctattatctgatcaagattaagatacctacattgtcatcaaatgtagagtgtagctatgcacaaagttctttaccattatacaagagaacttagaagagtgaaggtcaagcataaaattctcactttcagttaccatctacggctactaccagagaagtagaaaatagatcataccaaaacttcaagaatccatgcctgcggaaatgaagagcaatgtagttcttgccaaggaaagtctggataaatctctgtgcagtgagtaaaataagccggtttggttcaatcaaagttctgcacttgtgagcaacaggaccaccaggctgcatcacccactctctctcaacattagcatagaacacatccccaatcgcaataacatcgtcatctgatctaaaattagcctccacttcctcagctgtcttgttgcttggcctcgcaatatcttcttcccatggtgtgtctagcttccctccaacagtgatccccaaagctttcaactttgtaatatgctctttatctacataacacggttccggtttcgagaagtaacatatgaatctattaatatgaacatgatgatgcttcttcctattcttatccttcttccaaaactcctcaaaagaaaccacaacagtccttcccaaacaagtattgattcgatcaatatcgatgattctactgtaatggtaatcaaatctatgactagggatcacaagaacacgtttcagcaatgctgcaaagaacatatgcttctccaagcaaatcaagtggttactcatttgaccagacaaacaaatggcgaatagaaacttatccggcctcggcttccattgaatcgtcttcctcccattcaacttctggtccactttccggcaacttccgccggcgaagtaaccatctgatgatccaccgatatcaacatttccagttttatgcggcgatagtaatgcattttggatctgtctattcaacgaaatctgccggaaaactgcagatttcacgtcgtcgatcgttgataaatttgatacagtgtggttccagatagagaagagatcgctctcttgcttcctgagaagatacagtgcttgaagatccgattcatgaacccgacccgttaatgtatttgaccggaacacagaattaggaactttgacggagaagtaattgctgaaatcggtagataagtagatgaggatgatgacgatagggaggaagataaaaatggactgtttcttagtgagattgagcttaaaactccgtcgtaaacgtgatcggagactctccacatcgaaggtaggtcgttgctctgccgcctcgtcgctgatacgaaattggtcgatttgagaatctgattcctcgaggagattctggagatcgctttcttcatctggagatgacgatgacgatgaagaagtcgtcgacgaggaaactttcaccattgatgaagtgacgcagtcgttgccggagatcaacccggaaccgtcgacccatataactacacttaagacttttatccaagatccgacccggctcacaccacgtggtttttaaaaggtgatattggtcgggtcattggtaattaaatagaaccacccagttcacattttagagaaagataaattggacttagctttcacagtatgattttgtccaaaaaaaaaaaaaaacctttcacagtatgattcgtagtaagtgttctaagatgatcatgtaatagtgttacattatgcaactcatctttttatatcattgtattatgtttaacagtaacaatatgtttcccaaatacctgttttattgtaatatgtttccaaaaaacaaaaaaaaaactatacaagttctgcaaagagattgaaggtagagagagacacaaaaggtaagagttgctgagttttgcatcaggagctttgtgaagaaaataaaacgacttctctctacctttctaaatgtagtaggccatatacttgggtgttgcactgaacttttgataacctttaacaactttgttcactgcgtccagaaagtccttctcagtcacagactttctcctagctccgattgcatacattccggcttctatgcatacacttctgatatcagctcctggaaaacagattaacaaaaacccaagtcagaacaaatctcattgagacacccaaataacagcatgggagctttttgatggttgggatcattaccggttgagtttgggcagaggccagcaaggagttcaaaccggatgtctctttcacaactcattgttcgtgtgtgaatcttgaagatctgtgttctgccctccagatcaggcagacaaaactcaaccttgcggtcaagacgtccaggacgtaaaagagctgggtctagtatgtcaggcctggagtaaagagagtgaaaaacagaaacattgagtgcgtcaagtcaagcgctttaatgtgcttttgtgtagtttgctttaccctggtaacaggattgtggactaacctgtttgttgccataagaaccttgatgttaccacgtgcgtaaaacccatcaagctgatacaaaatctcaagcatggtacgttggatttcattatcactgcctacaccgtcatcaaatcttgcaccgccaatggcatcaatttcgtcaaagaacaaaatgcaagctttctttgaccgtgccatctagaaagcgagtattatacaatttcaatattagctaagaaaaaaactgagatggcgagaaggagcttttaccactggactacctgaaacagttcacgaaccatcctagctccttcaccaatgtacttctgaacaagctcacttccaataaccctgataaagcaagcatcggttctgttggccacagctctagccagaagagttttaccagtaccaggaggtccgtagcagagaacacccttgggaggatctattccaagctnnnnnnnnnnnnnnnnnnnnnnnnnnnnnnnttcaacaacctgcatcagcaaagacaacatacatcttacatcacactaacttaagtaagacattgtaagataaggagaggggatatcaacaaaatttcaacatacctctcgcatcttctcaatctgctccttgcatccaccaacatcattgtaagttacatcaagtttctcttcgacagtcatcatggtcacgctaggatcga

SEQ ID NO: 35013 - DNA, 1865 bp, Arabidopsis thaliana landsberg
ggactgcaccaacctccgtgttaagcatgcatgatatccctagctctttccgctttgctcttaccgcgatacgatccatttctcaccttatcacactcttcttgccgataaagaagaaaaatcattcagcaactgttttttttgttgttcttcgtttttattctttatgtgtacggtgttgccttgccttggtttgatcctatatttagtatataagttttagtggctgagactcagtgatgggtgagtttcaaccatttgtcatcacacatctaggaaaactccatcatcagctaccgtcaatttctttaggcttaagatagaaactaatgtacgttctgcgaaaattcagatttaaggatacattatttggatcaaacgtatgtgttcaagggttttttttttcttcttcttttaaagtaaaagcaaactctacgatgattggagtggaaaccatttttgtaggattaggcctcttcatactgatctgagtcagactttgcatagctgaagtttttttcctctactattcaattaaccagtagagaaaaactgacgcttaagaggttaatggagcttaaattttaccaaattcagaccataactctatttatgtactggtcctagtgtttccaagagaatatatctctcagcttaaattttactaaaattcagaccataacttcttacgcaagctataaactctttttcaataacttatttatgtactggtcctaataagatgaatgttttaagggtttatggcttgcttaagaatagccaaaactctctataattaacaagtctaaaattattacaaattgacaaaattaatataatttgttttgttacatgtttgtgaccataactaataaaaaaattcacagaaaaactattcaataatccttgtttattcatgtgtgtgaactattaatcaataaaatcaagaaaaatgcatgggagaaatcaactaacgtttttttctcaaaaatcttttttttttttttgattaacatgttttgaacatttaactaatttaccctaaaaacctaatttaccgtcaaataaatgagaaatccccttaatgagaaattgattatattccaaaatatttatttgacgcaaatttattttcatttttgaaaatccagtaattttacaaaacctaataatatactcaaaggaatgtttacataaaacattcaaaaaattaatttgttttttgtttgttcgtaaatgggctttaacatcacctccttttcactctataatcttctatccgagtctccgaataaaaaaaaccctaactcttattttttgttcttagattttatgtcttaagctcttcttcttccttgacatttcctcaatttcactcccgagtacgattaacaatgcattgtcacaacgatgatgttcgcttctcttcatcttctatcagaatccattctccatctcccaaagaacaacactctttactcaccaatctccaatcctgctctaaaaccttcgtctctcacctctcaaatactcgtaactcactaaaccaaatgctccagtcgctaaagaatcgccacactcctcctccacgttcggttcgtcgtcccaatttaccgactcagatgctcaattcagtaacccagcttatgattgggaagtcttctccaatttcattgtctcttatccaatccacccaattcaattggtctgaatcaagagatgagaacgttgagacaatccgtggactaagctcgcctctgctctgttgtgcctctctgtctctaactagacctaacgagtcgactcagtcagtggaagggaaggatacagtacagcagcagaaggggtcactcgtgagtcgaaat

SEQ ID NO: 35014 - DNA, 1211 bp, Arabidopsis thaliana landsberg
aacacttgctgggcatgcttattttgctataatcttttgttagactctttattctgtcttagtctgaattgggggcgatgaagaagtacaattactcctagcatttgaaatgttattacttattacccacagtctcattaatgtcatctatagcactgtgattggctacatcggaatttccttttctgttcttttctgttttggtgttaacctgctattgacttataccttacgaacgtaaaggtgttttccgggtgggagttattaccttcgaagtatcaattagtgtgaacaattcttcattgaagcccaagttctcagagatcgctgatttcattgcccatgagttaacctttcaaggggcccaggcaagctataaacattcattctactagctgtactggctgaggtgctttctttgtgatcaaatagtcccgattgctctttttgttgttaggttcgcttgctgaatttctcgtctagtggaaatgagtatcgcctgaaatggggagtctttcccccacaatcttccgagtacatttccaacactacggcattggtaattcttcttttcctaacaaatgatggtgtattggtttaggagtatcttcatgggccgatgacattatatgtgattgcagaacataatgttgcttctgaaagaaaaccggttacgcctacctggacaatttggaagctacaagttgctagaatggaaagctgagcaaaagaagaaacagtacgtttcctttccctcgtatctaccattgcgctgtggttcactagatttcatctgtttacgggtctaatgtggtgctttaagcaggagctggtgggagaaacacttacttggtgtggtgggaggagcgatgatatcgttgcttgttacttcggtgatgatcaaacttgcattggtgtggagacggcgaaagcaagaagaagctacttatgagcctgtaaatgctgctattaaagaacaagaacttcagcctctctcctctgaaacatttaatgcctgagcctcctcatcactcatagagtctctttacggtctctcgctctttatatatatttatatatttgatagaaagaaaatgaaaccccagaacacaggaaacaagattcctcaaattaaaaacacttttgatttcaagtaaattgatgtagttattacgctattttgatgtacaaggaaagaaagaaaatagagt

SEQ ID NO: 35015 - DNA, 6998 bp, Arabidopsis thaliana landsberg
  unsure (1)..(6998): unsure at all n locations
ggatataggacgtaaagtatctacaaaaaaatgaaataactaaaagctcataaaatatttaaaatattttcaaacttgaagtaaaaagttcgttaattgtttctatataaatgtgatgtattatataagaatatttgaagaaatcgtaaccaaatttaggtaaaataatcaaaatgaaatagctttcatattaaaattatataaatttaaatgagtgtaaaagcatctctatcacacaaatcccttcggtgtcttctcgtgataaaaaagaaaacatataattttaaaaatatatagtataattgatcccatttcctggatctacctacctctcgtagtacatctctgaacaaaaaaaaatattatcataaagttttgaaatatgtctatatattcggtgctttacttcttcaaataatagtaataataattccacatcaaaaatatgttttaagaaattatttgatagaaactacaataatgagacgttatacgtacaactgtataatgtatgctattatttgattggtatgtataacaaagtttattcattttggtcaatagatgtttttaggagattcaaaggagacaatggaaaatttaaggaatgtctagctaaagatgctaagggtatcctgagcttgtatgaagctgctcacatgggaacgacgaccgattatatattggatgaagccttgagcttcacattgacttacatggagtcgttagctgcaagcctgcaagtgggacttgcaaaattaatctctcaaggcgtatacgaaaagctttggatcaaccgcaacataagaacatggagataatagtcgcaatgaaatatatccagttctacgaagaagaagaagattgcgacaagacgctactcaagtttgccaagcttaatttcaaattcctgcagctacattaccttcaagagctcaaaatcctttcaaagtatgtaatcaaactcttgaataattactagtatttattcttttatctgttgagataagcttgaaataaaacttgagataagttatttagtttaaaaggattatgttaaatctttgggagatatccaaagatatattctaggagttatctagtattaatccttatgtgtttatgttttacaagtctctatatatatgagtcccaaagtgtggttgaccatatgagttgagagagattaagagtttgtaagatcttaggttttgagtaagtttcctaaggaataaaagaagagtcttttataatcttgcatctctaagttaaagtcttaattctatatttggtatcagagcactatagaaattaagagaggttaacgtgttctttaagttgaaagtatgggagacatagttgcagtaaaacctaaggagagcggttcatcatcaatcctgtgtcccatgctcaccgcaacaaactacacagcttgggtcatacggatgcactcaaatcttaaagtccataaggtttgggaaaccattgaaccaggaaacgacgatgaagacaagaacgacgtggcgagggctttaattcttcaatctataccagagaaacttcttcttcaagttgggaaacatgctactgcaaagaaggtttgggatgcaataaaatctcgacatgtaggagctgatagagttaaggatgctaggctgcaaactttgatggcagatttcgagaggatgaagatgaaggacacagaaaagattgatgattttgctggacgtttatcggagttatcaaccaaagctgaagaattgggaagtgatattgaagtgccaaaacttgttaagaaatttcttaacagtttgccaaggaaaagattcatacatattattgcttccttagaacaagttctagatcttaacaacacaagctttgaggatattgttggcagaatgaaggcatatgaggagagaatttgtgacgaagaagatcatcaagatgatcaaggaaagctcatgtttacaaattcggattcacagtcttatcaagacaattggaattcgagtagaggaagaggtcgttttaatggaagaggaagaggacgaggacggtttggttactctcaacgagacaagagcaaagtaatttgttatcgatgtgacaaacccggacattacgcagcagaatgtcccgataggttactcaaacttcaagaagctcaagaggacgatgaaaccaacaccaacactcaagaggctgaaaaacttatgatacacgaagtcgtatatctcaatgagaagaacataacaccaagcaaattcgagactcaatcggatggaagtaatgtttggtatttggacaatggagctagtaaccatatgtccggaaacagggcttacttttctaagattgatgagacaattggtggaaaagtgaggttcggagatgactcatgtattgatatcaaaggaaaagggtcggttcttttcattagtaagaacaaagagcgaaagatcttggctgatgtgtactttattccggggttaagaagtaacattataagcttaggtcaagcaaccgaatcgggatgtgacgttagaatgagagaagactatttgacaatacatgatcgggatggaaaattgttgttaaatgcaaaaagatcacaaaatcgtctctacaaggtttttatggaatttgagtcggacaagtgtctgcaatctatggtgttgagtgagtcaataaagtggcacgcaaggctaggacacgttggtatggagaacatgagaacgatgattaaagaaggaatggtcataggtttgccgtcaatgaccattacaaaagaaacgtgttcttcatgcttacttggaaaacaagtaagacaagtgttcccacaatcaacatcattcagagcatcacaaaaacttgaacttatacatggagacctttgtggacctattacaccagccacagctgcacacaaaaggtatatatttgttctaattgatgactattcaaggtatatgtggtctatattgttgaaggagaagggagaagcttttgagaaattcagattattcaaaaagacggtcgaacaagaaacaggattcactatcaaaacgtttcgaannnnnnnnnnnnnnnnnnnnnnnnnnnnagagtttcaaacgttttgtgatgattttggtattcaaagacacttgactgcaccttacacgcctcaacaaaatggagttgttgaaagacgaaataggacccttatggagatgaccagaagtatcttgaaacacatgagtgtaccaaactacttatggggagaagctgtgagacatgcaacctacttgattaacagagtgggaacaagagtattggctggaaaaactccctatgaagcgttcaaaggcagaaaaccgaatattgagcatttgagagtatttggatgcattggctacacaaaaacagagaacgctcaccttaagaagcttgacgatcgctcacgagtattggttcatctaggtactgaacctggttcaaaagcctaccgattattggatccaacaaaccgacgaataattgtgagtagagatgtcgtgtttgatgaaagaaaaagatggaggtggaataatgtgacaagtgaagacgagaacaacccgggcatgtttgaagttagtcttgaggaattcggaaataatggcttaagagaagtagaagttgctacagagaatgaggtcgttgaagaagaaacagaagaagataatggagagaatgataataatgatggtttcgaagaaggagagagctatccaagtaatgaaacagagaatatggtcgatcaagtgcaagaacaaactcagcccgttttaagagtttcacaacgacatgtttctaaaccaaagtacttagaagactatattctgctggcggatgttgaaagtgagtatctcttgttagctataaatgaagaaccttggaattacaatgaggcaaaagagtctaaagaatggagagatgcttgtgaagaagaaatctcttcaatcgagaagaataaaacttggaaccttgttgagcttcctatcggagttaaaccaattgggctgaagtgggtttttaaaattaaacgtaactctgatggaagtataaacaagttcaaggcaagacttgtagcaaagggatatgttcagaggcatggtgtagactttgatgaggtctttgccccagtagctcgcattgaaacgattagattcatcatagcattagcagcctcaaacggatgggaagtacatcacctcgatgtgaaaactgcgtttctacacggggaattaaaagagaccgtttatgtcactcagccggaaggattcacagtcaaaggaagtgaaaacaagatctacaagttgaataaagcactctatgggctaagacaagcaccacgagcttggaataacaaactaaacaaaattcttaaagagttggattttgttaagtgctcaaaagaaccttcattgtatcgaaagcaagaaggagtgcattttctacttgtagccgtttatgttgacgacttactcgtcacaggctctaatcttagaatgatactcgagttcaagaaagggatggcgaccaaatttgagatgagtgacctcgggctactaacgtattatcttggtattgaagtcttgcagcatagtgatggtatcatcttaaaacaagagagatatgccgggaaaattatagaagaaaccaagatgaatgaatgcaacgcagtgcatataccaatggattcgggtttaaaattatctaaggcgcaagaagagaaagatattgatgcaacagaatatcgaagaatcattggatgcctacgttacttgctccatacgcgaccggatctttcatactctgttggtgtactttgcaggtatatgcaagagcccaaagaatctcatggtgcagcactcaagcaagtcttaagatatctaaagggaacgcaaggtcttgggttgtcattcactcgtggaactgaagcagaacttgtgggctatagcgatagcagccacaacgttgacgaagatgatggaagaagcacaacagggcacatcttctatctacatgaatgcccgatcacttggtgtacacaaaagcaagacacggtagctttgtcgtcttgcgaagcggagttcatggcagcaaccgaaggagcaaaacaagcaatatggcttcaagatcttttcagtgaagtcaccggagatacatgtaagaaagtgactcttcgaatcgacaacaaatctgcaatagcattggcaaagaacccggtatttcacggacgaagcaaacacatcaagaagaggtaccattttattcgcgaatgtgttgagaatgaacaagtggaggtagagcatgttcccggaggagaacaaagggcagacatacttacaaaggcacttggtaggatcaagttcaaggagatgagagagcttgttggaattaaaaatgtgacaaagagtgatttcaagcttaagggggaaaatgttgagataagcttgaaataaaacttgagataagttatttagtttaaaaggattatgttaaatctttgggagatatccaaagatatattctaggagttatctagtattaatccttatgtgtttatgttttacaagtctctataaatatgagtcccaaaatgtggttgaccatatgagttgagagagattaagagtttgtaagatcttaggttttgagtaagtttcctaagaaataaaagaagagtcttttataatcttgcatctctaagttaaagtcttaattctataaaacacataaggattaatactagataactcctagaatatatctttggatatctcccaaagatttaacataatccttttaaactaaataacttatatctcaagttttatttcaagcttatctcaacactccattcaagttaatggggagttagcaggatatttccgaagcgctcgaggtcttcgacaaggatgctccctctctccatatttgtttgttataagtatggatgtcctgtcgagaatgcttgataaggcagcaggggcgagagaatttggataccacccccggtgcaaaactcttggattaactcatttatgttttgcagatgatctcatgattcttaccgatggtaaaattcgctcggttgatggtatagtcaaggtgctgaactagtttgcagcaaaatcagggttaaaaatttgcatggaaaagacaacattgtatttggctggtgtctccgatcattcacgtcagttgatgtcaagtaggtactcttttggggtaggaaagctcccggtccgatatcttggcctacctctagttacaaaacggcttacaacatcagattattctcccttaatagaccaaattcgtcggcggataggaacgtggacttcacgttacctttcttttgcaggtcgtttgagtttaataaattctgttttgtggagtatcacaaacttttggatgaatgcttttaggctgcccagagagtgtattaatgaaattaatagaatcagctcagcttttttgtggtctggaccggagctaaatccaaagaaagcgaaagtctcttgggatgagatttgtaaaccaaagaaggaaggaggccttgggttacgatcattgcgagaagcgaatgaggttagtagtctgaaactgatttggcgtttgctatcttgtcaagattctttgtgggtgaaatggactaggatgaacctactcaagaaagaatcattctggtccattggtacgcactcaacgttagggtcttggattcggagaaggttgctaaaacacagagaagttgcaaaaagtttctgcaagatagaagtgaacaatggagtcaacacatctttctggtttgataactggtcggagaaaggtcccttaataaacctgactggagcccgaggagcgattgagatgggaatttctcgccatatgacactagctgaagcatggagtcgaagaagacggaggagacatcgagttgagattctaaatgagtttgaggagat

SEQ ID NO: 35016 - DNA, 1086 bp, Arabidopsis thaliana landsberg
ctacaacgtaattgactcaccagagatcactcatccttgtcacgccaaacaccctctcaagctttttaccgtaggagctcccgcttacactgatccaaaatgtcatttatgtggagaagacactggaaaattcatctatcattgtgatatctgtaagttcaatttggatttggtatgcgcaaaaacaaaacccccaccagttgctctttcaaatctcaaggtccatgagcatacactcaatctcatgccaagattgatctccttcgtttgtgatgcttgtgggacaaaaggtgaccgggctccttatgtgtgtcatcaatgtgatttcatgattcaccaaaaatgcgctcatttaccacgtgttattaacgtcaatcgccatgaccaccgtgtttcgttcaagtatcctcttggtctcggagaatggcgatgtggagtttgttttgaagagattgattggtcatatggggcttattcttgttctctttgtcctaattacgctattcattcactatgtgcaacagggggcgatgtgtggaatggggaagagctagatggagtacctgaagaagttgaagatatcgagccattcaagaggaatgatgacaacacaattactcattttgctcatgaacataacctcatgagcctccacaaagacgatgaagaaagcagcttatgtggagcatgtgttcatcccatcggctcttacacattctacaagtgttcaaaatcatattgcagttttattctccatgaaaggtgtgctaatcttgctaagaagaaacgacattttcttagcccacagcctctcgatcttagcctccaatggataccatactccttaggcagatgtcgagcttgtcgtcaaatgtttagcgaaggattcatctacaattcatatagggataagttttacttattgtgcagttccattaccgtgccttttatccatggaagtcatgatcatcatttactctactacaaactacgatatggtcaagtgaagacttgtcagaactgcggtattgatgaaacagaagtacttggttgtagcaaatgcaattattatttggatttttgttg

SEQ ID NO: 35017 - DNA, 1144 bp, Arabidopsis thaliana landsberg
  unsure (1)..(1144): unsure at all n locations
cgtgtcaaggtgacgggtgaggtatccgtatcccggaggcgtaggaatccctcggcccgttcagcctcgttgtctggggctcctctagcttagttgaagagacccctcggccgcccttcggtggaccgaggctaggggtagcgatatcagtatgaacagaggcggagttggctcgagaatggggaacctggttggccggagcctagccgtgtcgtccgtcagcggaccgacgccaaagtcggtcggttgaggcctcggatcgggctggcgcccttggaagccggttgaccgaggccccaggggtaaccggttgagccgcctgctcgggccggattcccggaggagcccctggaccgtggcgtcgcccgaggctgggtcgggctttgctgaagacgtcgtcgatgccgagggtgctacggctcccttcagcgtgaagacccgagcctgcaggatcagatcatcttgtagcgtgtgctttctgcggccgccgaggcctaaacacaccttcgccgtgttgtaaagctgcgtctcttttcctcttgtttcgagtatctggacttttttgtcggtaacataattgttttgcgcgagcgagagttgcttctcacggaaggtgatgagtgaggtatccgtatcccggaggcgtaggagtcccccggctcggtcggccttgccgcttacgtgtactcttgcccgtccatggggttctgttcccgacgcagtcgagaaggctcannnnnnnnnnnnnnnnnnnnnnnnnnnnnacgtgaagacttgttcggtccgcggaatcacttatccgaacgtgagatacttatcgcagaaggtgatgagtgaggtatccgtatcccggaggcgtatgagtccctcggctcggtcagccttggctgcttacgtgtactccgtcgttttcaggatccacttttcgaagtagtcaaaaagcacgaaagatattctggcagaagagatcttttttcgaggaaaatttcaacgcagaggaggttgccccccttttacccccgagggagggtcgggctttgcggggcgaacgtacccttccttgatgactaaactttgcgtgggtgcgaggtatatgaacaacttgaaaacatcttaagggtagaagcgacgtagctgttagatg

SEQ ID NO: 35018 - DNA, 4032 bp, Arabidopsis thaliana landsberg
  unsure (1)..(4032): unsure at all n locations
aaaaaaaaacgcagccatttcaccattcagaatatccgatcatgaaaatgacccacaggggaaagcaagatcatctctccaaacctgggaaaatcgcaaggagaagaccaagtcctaacctgccagaagaaaacacagagacgtggatttgtcacgtcaatcagactttttcagactttttttttttaattgataccaaattttccttcttttttttcttcgtctctgtagcgcgaatgtaggaagaagcgcgagtatctctgcttctccagtcgtttatacgggtcgggtcgggtcgggtacgaccaggccgggttttaattttggagttttcacttttagcccctgtaatttttgtgtattatgtattgttcgtagtgttttttgtttattgcagatgtagtacctaactttgtttcgaatttatactttcttttttttttggttaataagtaatatatgaaaatcaaatggatttctcattatggtagtatatcaaaatcgaatggattttctttggtcttcttctgtgctttgtatggtagtacacagcaattcctctgtaaaagctcagagcaactatagaatgtatcgccaagttccacgtcctctgaatcttcatctgatgcaactaaatcttgtcccgaggaacttgagggaagagctttaatttgaatttcctcagactcacagctctcagcaggattggtattcaaggtcaaattatctaacatctgaacagagacatcgtcagcctcaactgactcatgaaggttatcggaaatgggacaggttaattcttgttctgtagcactttcaaaagcatgttcacgctgaaattcagattccaacattgcttctgataaccctgcaaaacaaactcaaatatctcatgacataaattattgactgattcattactcaagattaaatttaaccaagatgagatatctcttgcttgagcttgcgaatggctaggcctgcttgctcctgtcctcttttatcacgcttctcctttgcttttatagcatctgatcttgccgaataatattctttggcaatcacatcgaatggccttggaccagagacctagtatgatttttaaaatcaagatatcacagcagagagagacatcaaaccaggaaaacaagaccaatatggtgttgtaaaactaatttgactgaagtttgcaatttcacataatcatcataaacaaatgaagaaaagtcccacttctaccaaatgggaaagaaaatatattgatagcaggtagccacaaacactccaaaaaattgaacaaaatatcttaataaacttctgccataatggatacgcttaatctaatccctttttcagaaaaaaacaatacttcattaaacacttcataattttgaccggtatttttgtttattaatgaaaataaattttattgagattatgggttgaaaaacaatctgtaattagacacgaaaacgtgctctaagacgtgcatagcaatcataccagatttgcataccatttctttgcaaaattcgaaaacagttccaaatttgggaatctgggttttttcagttcatgattcatcagtcatgacaccatcgtgtctttgatagaaatcataaaccacaaatgcacaataaataatagaatctctcccgagtctttccgtctctgtttacacctctatcaatcttctgcaatcatcggaatcaagaaccagaaatggcggcaccaaagctggaatctttcaggcggggtagcatgttcgacggatctttcaggcgaggtagtatgttcgatggttcgtttcgacaaagcatgagagataggcttatcctacagagcagaggctattccaatgtcaacgacgatgacaaaacttccgtccgttgctgctcctacaggttatatacatacaatctctccttctttccagaaccttctattgaccaaacctttttgaagccattttatcttaatatgatgcctcttggagtccaatgtcaagtaatctcaaatggttaagtcttgaaatgctattggtgttgtttgcagctacttctctgacaagatcacgggggttgtgaagaaattaaaggatgttttggttacggcatgggagatgggaacagctgacccgaggaagatgatattctcggcaaagatgggtttggctctgacacttacctctatcctcatcttctttaagatcccaggattagagctcagcagccactatctctgggcaattcttacagtagtcgttatcttcgagttcagtataggtaaatgcaacagactttacacatcaaatttgagcattctaaaaactttcatacctgacgtgtgatctgctctttatttttgtgtaggagccacctttagcaaaggatgtaaccggggactaggaacattgtccgcaggaggactggcgcttggcatgtcttggatatcggagatgactggaaattgggcagatgtttttaatgctgctagcatctttgtagtaggtatatatacgaaatcatgatgtgtggtctaaactaaagattccacaatctcattctgatttctgacaatatcgcatgcctgctcttgtatcagccttttttgcgacttatgcaaagctatatccaacgatgaagccttacgagtacggattccgggtgttcttgctgacnnnnnnnnnnnnnnnnnnnnnnnnnnncaaaacaggggaattcatggaaacagctgtttcaaggttccttctgatagctcttggtgccagtgttggcctcatagtgaatacttgcatttatcccatatgggctggggaagatctccataacttggtcgccaagaactttgtgaacgtagcgacttctctggaaggtttattattaactctctccctgaatttgagtttctggttgaaaagcttcttagtctgtttccaatccatggaaaatgttcctttgtgcaggttgtgtgaacggatatcttgagtgcgtagcatatgatacaatcccatctaggattatggtctatgaagctgtcgcggaagatccagtgtacagtggttacagatcagccgttcaatctacaagccaagaagacaccctggtaagattcttttaacacataagaacagcaacaacattatcaaaagaccagcttacttgagatcctcacatctttttcttgttgttggtgtgattgtgaagatgagttttgcatcatgggagccaccacacggaccgtacaaatcctttagatacccatgggcactgtatgtgaaagtaggtggtgcattgaggcattgtgctatcatggtcatggcgttacatggctgcattctctcagagatccaggtactttccaatctttaagtcagaaacattctataatcttcagatcttaagagagatttgagacaagagtatgcaaagtaattgcaggctgcagaggatagaagacgagaatttcgtcatgagcttcaaagagttggcaatcgaaggagcaaaagttctgcgtttgattggagaaaaagtggagaagatggagaagctaggccctatagaagagattctaaatgacgttcaacgtgcagcagaggagctacagatgaaaatagacagtaaatcctaccttcttgtgaacgccaagaattgggaaatcgggaaccggcctagggttagggatttgactgatgaacaaaaaatctcgaatctcgattttgatctaagtcggatcttggctcataaatctcagagtgaagccactcttcgtcctccgaagaattgggatgatgttacacctgcaggtaacttgagttcggcgccgatgcttccttacctgcaatcaaggacgatgatacatcaacagccgtcgtggcctagccggatctctattacgccgggaagtatgttacagccaccactgggagagccgggaaaaatgtacgagagcgcgagtaatctttatctagatacgttcgcttcgctactgatcgaattcgtcgccaggcttgagaatctcgtgaatgcgtac

SEQ ID NO: 35019 - DNA, 3173 bp, Arabidopsis thaliana landsberg
  unsure (1)..(3173): unsure at all n locations
agcaaggggtactggtatccatatttccttttttgatccactcctcccactacatgcaccaatgggcattgtctcctggatgaagtaagctttttttaatgctcatttacctatgcttgtggattttattcctttttttgctattctggatgacagaaattttcatactctgcgtcttgaattcatcacacttttgcatctaacttgcaggggtgaatatggcatctgggcagcattcttggcgcttcttactcgactgttcttctcttttccaggttcgtattcgtcttcaagtaggttgggttataggttgttgaattctagtgttggattttttttagttcagttgccatttactagaaaagaaattggaatgaaactcatgctaattttcgacgtcaggggctaaaatttccattactaagacatgctgaaaggaatcacgcatgttttatcagatcttcatgttaaataagagtgtgcctgcctttgtatgtttttaattcttatacaatgccttgtttatagttgaacttgagctgcccttcattgctttgcttttggtgattgtggcgccatatcaagttatgagcataaggttagattctcaaaaagagtgtaatgtttcagatcaaggttttattttctttagtcaagactcattgaatttatacgcttgcagagggaaacaggaaggtgctatcctttctttagcaatctcttgttttctggctttccagcatttctcaagagcaggcaccttgcagaaagcatttgatcagaattcagttcttgccactgtagccataattggtgtcacagttgtatcgttccttttcttgatataaatatgctcctgacaaaaggactcatctgtaaatcactgtaacaaagtgtatacagagactagaaataatgtgctgtattatttactcgatttcaatactcaattcaacgtgcttgcatttatccgctctttatgagatgcttgtatttgctactattcgttgctaacagattgatctttagccgcatatgattccacaaggaaccagatcaaaaatttcagcttataagattatgagctggaaagagcatattaaagatattgtcatccttttagaaactgtttggaaatgctgcaggtatcatggagcttgtctgtcattttcggtgtgcctacttgttttagagtgctgcaggtatgtatctgcttcaagtagctttcattttattttctgttatatctttctaatagttaataatgtctgacattgcttttgtatttcttaaccgttccctaagtattttattttctaaaactgtaaagagatacattatgcttaatgtgtctacaagaatgtatatatcctaagccctttgattttgtagtatctcctactaaataaatatactttcagtgataaactatagcaatagaacagatggtgagaattaggtcatggattaaaatcttcttgcaaatcacagctgctttcttgagctccatnnnnnnnnnnnnnnnnnnnnnnnnnnnnnntcataatttgcagagaatgattgaaaccctgaaactattgtctgtttaaagataattttccctgagcagtggcattagtatcccaactgctgtaaatattgagagaaggctatgtgatacagaggttgctgaattcggaagccctgttggctctgctacgccgaagggtggtccagagccagttatgcctgtagttggagttgttattggcggtgggtatgtagatgatggtggggaactaaaatctggtggactcatttgacttggggggcttgtgctgcaattggcagatattaatcacaattatttttctcacttttttgacaggttaagaagttgatttgtggaaaaagaaacacatacctgactgttcctgatgatgatgagaagtgacagcttcctttacctggagcagtataagagcagatttgaataccagtctcagatttatctttagcgttgaaaggtataaactctagttattatcagattctttgacccactggaatcatatggtgggctagtattactaggttcaggaactatttctagacactcaacatctatcagttgtggaggtctcaagtagcttatgccgctcatggagacagcaaagataaaagctggaaatatggaagctagtatgcgggtaacttaattctactttcccggttcttatggtcaaatctgtgtggactagtacataaaaagttaagatgtcttacttggatctgtgctagtaagttgtgctgcccctccaaaattgcagctgtctgaaccaggatgcttctggtaataactattgaaagcaaaggaagcatggtcacgaattgtgttaggctcgtaacatgctgcaccttgttgtatctggccacaatcagctcctccatacccacaagcgtaatctaaagccacctgtaatgatgttggcgaagcatttgctttcgctatacaccactggccactaccaacacctccacctgcaccagtgtcaccaccaccaccataacccccacctccagcacctgcaccagtgtcaccacctccacctccacctccaccaggtgtaccaccaccatatccgcctcctccaccacctacatcacctccacctggcggtgtagtaccataaagtggtgggtaaccaccggttggcgtggtaccgtcaagaggtggataaccaccagttggtgtagttggacctgggaatgtcaaggaaggcggtgacggttgtgttatggttggtgttgtggtactaccacctggagctgtaggattaacaactggtatatcaccttgtcctccctgaccctgagctataacatctagagctgaaatcaatcatcacaaaaatcaagttagtttgttgcatccttaaattttcagaatgcgaagaaaaaaaacaaagcttattcatatgtatcagacgcagagagattacgtgaagtatatagaagacatagaagcatgatggtggagaaacatcgaggagctatacggtgagtcatttcgttccgtaagcttttgagagagaatagtcttcacgtagttgttggggttttggagaggaaataaagaatgtttgcgaagaagttcctatcaggtataaaatatcgtgtattaagatgaagag

SEQ ID NO: 35020 - DNA, 3653 bp, Arabidopsis thaliana landsberg
accctttttgagatgctgaccaagaaagtgcctgattatactcacctgaagagctttggctgtctgttctatgctagtacttctccaaaacagcgtcacaaatttgaagacagagctcgtgcgtgtgcttttctcgggtatccttctgggtataagggatacaaacttcttgatcttgagagccacactatctttatctcaagaaatgtggtcttttatgaagacttgtttcccttcaagaccaaacctgcagagaatgaagagtcttctgttttctttccacacatttatgttgataggaacgacagtcatccttctcagccactgccagtccaagaaacatcagcgtcgaatgtgcctgcagagaaacagaattctagagtatcaaggccaccagcttacctcaaggactaccactgcaattctgttacctcctctacaaatcatcctatatcagaggttctctcttactcctctctctcagacccctacatgatatttatcaatgctgtgaacaagatcccagaaccacacacatatgctcaagcacgacaaataaaagagtggtgtgatgctatgggaatggaaatcacagctcttgaagataatggaacttgggttgtttgctctttaccagtgggtaagaaggctgtaggatgcaaatgggtttacaaaatcaagttgaatgctgatggtagcttggagagatacaaagccagattggtcgccaaaggatacactcaaactgaagggttggattatgttgataccttctctcctgttgctaaactcaccactgtcaagttactcattgcagttgctgctgcaaaaggatggtctcttagtcaattggacatctctaatgctttcttgaacggtagcttagacgaagagatctacatgaccttgccacctggatactcaccaagacagggggactcctttccgccaaatgctgtctgcaggctgaagaagtctctatacggtctaaagcaggcttctcggcaatggtacttgaagttccctgagtaactcaaggcccttggcttcacacaatcttcaggtgatcacactcttttcaccaaaaaatctaagaactcttatatggcagtgctggtctatgtagatgatattatcattgctagtagctgtgatagagagacagaattgctgagagacgcattgcagcgttcctctaagctcagggatttgggaaccctcagatactttctaggcttagagattgctagaaatactgatggaatctcaatctgccaaaggaagtacacgcttgagttgttggctgaaactggtctccttggatgcaagtcaagttcagttcccatggaaccaaatcagaaattatctcaagaagatggtgagctgattgatgatgcagaacattatcgcaagctggttggtaaactcatgtatctcacattcaccagacctgatatcacttatgcggttcataggctctgtcagttcacatctgcacctcgagttcctcatttgaaagcagtctacaaaatcatctactacttgaagggaacggttggtcaaggtctgttctactctgcgaatgtggatttaaagttgtctgcctttgcttattcagatttcagttcctgctcagactcgaggaagtcaacaacttagatactgcatgtttctcggaacgtccttagtgtcttagaaatctaagaagcaggaagtagtctccatgtcttctgcagaagcagagtaccgagcaatgtctatggctacacgagagataatgtggctcaggtaccttcttgaggatctttggattgatgtttcagaggcttccgtattgtattgtgataacacagcagctcttcacattgcaaacaatcctgtttttcacgaaaggacgaagcatatcgagcggtattgtcaccatattagagaaaagatcattcttggtttgataaggactcttcatgtgagaacagagaaccagttgggtgatattccttacaaaagctctatttccacctcagtttaaacgacttctaagcaagatggacatcattaacatttatgctccatcttgagggggactattagactttgatttatattggtttgattcttttgtatatacataaccggtttgttccgggttaattaggttagatagggaaagtgtatataaactcttgtattcacactttaatgaaataacataaacattttccactttcggctctcagctatttcctcttttggatcttcttcttccttagtattgaactctctttctgttcatatctacttctaatagtaatcactagtatacaaatcattgaacgtaaattttcataaatatattatataataacttaattacatcatatgactatttttttagtgttgtagttccaatgtttcactattttgtaattatattattcacttggcatattaattatcacaaaaataatgttactaatataatatactaatcgtgttgaaatgtgtgaggaatctatatatgtgaataaactattgaaataatcgtagaaaagaaaatcatgttggatttttttgacgaaaaatgctggaatttgttttttaaaatcaatattataatcaagtggacaaataattggttcatctttattgaacgcctatagtaaaaaaacgaattaattcccaagaagaggaagaattattgcccatgaaggcatgaatgaagcataaagttaataatactaattagtcaaataattaaaagtcgaatctcataattcataattgaaacacgaggaaaatagataaaaagaaaagtaaggaaaaaagaagagggtagtagatttggtcgtcgggggcagcaacgtattaaaaaggtgacgtgagattacgattgacccattgactttttacccgccaccataagaagaccgtcttcctcttccttccttattcattcgtcttcagtcttccatttcaacaaatccttaatctgatctcacacacggcgagacacacatatagaatagagatagacagcgactctgatcgcgtaaagccacatgctttttatacaaactctacccaaataccaagtttttttaatctcccatttctgaatccttttctctctctctctctcgattctagcttcatcgctgttccaaatttaggaagtttctgaggtgggtttctctttctttctttcctttctcgtcttttggctgcgtctgtttctaggttttgttctgagtcttgacaaaacccaaattccaagttcacatcttttctagttgttttcatgtttaagatttttggtcccttctgacttggacatagattctattgaggaattgagtagtaattgaaatggatctatgcctgctttactagttagttacaagtcaaatctctgaattgcttctgattaattgcagaaacaggtcacaggtctgtcttacatagttacattgatgggttgttcctggttatcgtgtcacaggagagaagctacagaagttgatggaggtactgagatacattatctaggcttcttattataccaggattactaatttgagtttggaatgttcattctctatagtcctgttggtggcttcctctaactaagtgtgtaatttgcaaacagaaatcgc

SEQ ID NO: 35021 - DNA, 3001 bp, Arabidopsis thaliana landsberg
acatagttatctagctcatgaagtttgctccccatttgaatcttatcatattttcccttcacctttaatatacctttttccttgatgtctacgaaagtaactcctaacaacaacaaatattattgctttcaagcttagatagattacttattgatttatttggtttcattaatactacaaccatagatttgtgttgttgtacctgaaaacatccagacaattttcataacttcccgtttgatgttttcatcagaaacatccatcttgaattcaactgtctccacctgcatattaacagttcattgtataataatcaaaaactattttagaaccattgaaattgagttgcttaaaagttaaaactaatcttagaaactgaaaaaaaaaaaaaacgaacctgcatatttggaatgttaaaaagattggacagtgaagttatatgattgtaagctcgcagattgcacactagtaaccctttgcttcgcggtttatttatacaatgttttgtttgtaactagtgctcaatatagtaatgattaattaggtccaaccataagaactatagtcaattttatacatcaagaccaatacaaacagttttgagtctctttgtataagaagaaaggtagaaagtgaaacaagttgaatcaagttaagtctttctaaatgaatattatcaaaaaaaagtttctctaaataatagaatggaaggtggcatggtctcttactttagtggcttcaactaataccgtgttatagtaaaatatacgatattttgtttttcgttaactctatattataatttagaataattagtacactcaagacgtaaagaatatacgaaaaaaccttacaatttcttcgaagctaggaaatacaatatcctatgcataaaacatattgtataaaggaaaaattttatgggaggtgcaaaaggaaatcaaagaaatttcataaatattgttcctaaatctttctgaatttcttgatacccacatgtattgattaacaaactatttcccaatacatgtacaatttcatcgttttaattattcagttattcgtcactgcaatggttttaattctatgtaagaagagtttttttcaagtactaattgatggagatctttggtgaatcacaaactcacaattattctctatggatttccatgaatttactaacaattaacgctgatgaatatgatgataaaatatacaagttatgatgatccaaatgtaacagaaaggttaatatatagctttaactaatcttctaaactatatttatttttattatttaagaaaaccgacagaactacagggcttaatgaattttattgcatgtggcaaaaaacataaatacacctattaaaagaaacacttgtgatataataacacgattattgacgatataatataaacgaattacttggaataagtgtggaacgaagttgaatgataacaataatctatcaaacgttgactatcttttctgacacttcggccagcattagtttaagcatctagttgctggtgataagaattaagtgttgcttatgaaaagcgatcaatgagactcttttacttcttctttttttttggacacaacaatgagactctattacttaacttagacaatttagatgaaaattttgtttttgttgttttcaattggatgatcagaacttaataatgttaacaaaagacatataacgccaatatgaatataagagccacataattattacaaataacgggcaaacaattttttcagaaaaaatgagatgaaatatcatcagaatacagtagtccatggaaaataaaccgatcacgtcttcaaattgatcacttaaagaaacccaaattccaaccacggtaagatggtgctttcttcactttaggttcaggctttttaaccagcttctgattttgtgccggttctccatccggcccaaccgcgataatgtcaacaaattcatacaccttcttaagtttcttcgtcatttcaaacttatcaaattctccattcacctttagtttacctttttccttgacgtgtatcaaagtaactcctacaacaacaaacattattgcttaatttgtattaagcctaaatagattaaatcacttatattatatataaacattgtgtgtacatattaatatacctggaaagtcacatacaactttcatagctcttcgttagattctttcctcaaaaacttccaacttgaatacaactttctcctgcaaagatttagatttgaagctttagacagttcattgtgtataagtataccttttgctttctgaaaatttaaagtaactataagaaaagacataccggcattttcggaaagtatagaaagtttgatgattgaggagatatgatgtaaaggaatatgaaatcaacctcgtagcttgctcattaacctttgtttcgccccatatatatacacgatatcctttgcttgaattagcgaatatgaaatggttaagtcaagccatccaagcaagaaactgaaatagtcaatgtgatacgcttaaatgaagatgattaataaaacaggtttgagtctttctatataatagattgttagaatgtgttgttgcgcctcttttgtttagtactttagtagcttcaactaataccgtgtcataactcataattatgcatatgtaagatcttttgtcttttatcatctcgtcgatataagataataagagcgattaaatcaaccctatataataataacaatataagttttctatttcgtttcgtttaatgaaaatatgaataaaattgggataagtttgtatcgcctttttttctttttcacaataagtttgtatcccctaatttaatcatttaaatcatattatctacggctgctatcatgtttgcaaatgttctttgtattaataaatagagatgttgttgatacgtaaatttcagcttcagatttttaataaaattatacattccttaataaaaatatgt

SEQ ID NO: 35022 - DNA, 3488 bp, Arabidopsis thaliana landsberg
tgctattaacgcaaccaacaaaagcttcttgagactctccatattcacttttgttcaaagcaaatgaagacagaaattgttgataagtccaactgagaaacattccttgaaataatttcaaccaaaaaatcttactaagtcgtcaggaaacgtgagaacatgtcttacttctacaagactacataaagaattcaactgatgaatgaataaaatattttctctatagcataagttttacacataatctttaaatttctagtttgtcttgtcttaatgaacctatgaataactgaaaagtaggagcttgtgatcttgtcttttttcttataacgacaggagcatgtcttgtcatcaacgtctagtcgttcccatgtttaagtactatttacatttgattttatttttagatgttaatttcctttttttttttttttcgtcaagtatatgttaattacaaaggaagcatcagtaacgagtaagctagttagggcattatctagtaaaaattaatagaaatatttgttaaaaacccaatcaaattacaatttctcaaattaaaacacgtataaatctgcacccttggtttaccaaaagtcttagtatgacttctgaataaaagattcgttagagtaaaacttggttgatgaaatattttacttttatctatggagcttagcaatggtaagctacgcattttggttataactctccacttttaaacccttttcataaagttttttgttgcattgttttcttgatgacaaattaaaaggcaagtgtgggaaattgatgtgtttgtattttacatggtttaactcttagattttcaccattttcttggtttcattgcattttagttatattttgtatttttatcgtcattaaacatgcattgcatatgcatatatttatcattctggaatcatttttaggtgttgaatttttttggatcttgtccatagagggaactaagatgggataaaaagagtaaaaaaaaaggaaaccagcaaagatgaattcatgccaagagatcaatcgagctatcacatggagcggccatttgatggccaataagaaaacattgaaggcagcataataaaccagatgtatcatgaacaacacttagtcttttcatggtgttgagggtaactcaggctttgtctcttttaataacgatgaaaagtcatatcaaataaaagaaaattcaagagacatttgttgcatcattttcttctttttgcagccaatatgattgttggctataagtttttgtttaaagaaagaaatagccaatgaatctggaacgaaattgcaaacaacaatttcccatacaagagagaaaaacaagattaaaggactgctcctcccttgtttattagttatgatatctcaaaacaaaaagtttaaggacttatttgaccaaagaatcataccacaagccaagaaacacttcaaacatatgaggcttctttgcaaaagctacctagcacgagggacaacttctgtatcaaagctcttggtcagttcaagggaactatcggattccatgtcatgattcttatttctcatcaagttttcagaagtaagacactcttttagtacgctgataacttgggacatgcttggtcgtttttcggaagatgggtttgcacatgacatagccaattcaagagctttccaaacagaatttgagttgtaatcgccgtaaagattaggatccatgatcttggtaatgtctcctctgttaagcactaaagctacccattctgttatgtgtcgcttttcacggttttggtcaatcacacgttggtttgtcatcatctccaataacacaatcccgaagctgtagacatcgctcatctcagataaccgacccgttctgtaatatctggcaaggcaataatatgtagtatgattcatgtgtccattattgtaccaactaatatgaatatggacacaaaatataaacatggcatggcatggtgaagttcacatctaggatagtatagcatcgactagaagattccacttattaaaaaagctcgaaagttatttaaaattcttactcaggatcaaggtatccaggagtaccagcaacaaccgttgaaatatgagattcatctccgagttggaaagatcttgaaagcccaaaatccgcaattttggcagtgaattgatcgtccaacaatatatttgtacttttgacatctctatgtaccattgatggtcgacaaccaatatgtaagtattccagtcctaaacatattagcgaacattcatatatatgaataatgtctacacaatgtaatatgaatgtgaaaataggtaaagtggaaaaaaaaaagacaaaatattttgaattcaaaaatatcaccaccagtattagcatcactataacataaattcttcaaaatgtggctaacaggtgactgaaaatagtttagaaaggtttcacatggctggtttaggttaggataagatgtatttgttcattattcagtgatctcaaaaactttttggctaaacaaacaaagtgactaagaactattttgagttagtagataaacctagtgcggcatcaatggctattcttaatcgagtactccgcttcaaaatagagacatcatgctttcctgcattaaatcatcaaaattagttgccatgtggatttttttaataggaagaaagaataatctttcacctgacaaatgatgttttaagtctacgtttgacatatattcgtagatgagagccaagtgacctcgttcatcgcaatacccaacaaggcttcccaaatttatatggtgaacccttagaaaaagttcaacctacaaaacaacaatgaatgaagtggttaattatcttttttagagccaagtgtttaactatcaaaatgaaaaaaacaatgaatgaagcacattggtctaacataatgcttgagattttctaagaaaatattcatacctctgccttgaactctttatagccttgagttgatgattgagacagtagtttaacagccacctgttcagaaccatttacagtaccatggcagacaacgccaaatcctccttcccctacaactcttccgaaattattagtcattttcgtaacctctgaataagtaaactttctctttttcatctcgattgacggctcaggtgagttaacataaggaacattcatcgttggcctacttggacgcgggagaaaaactgttagatcagcatctaggggttagaaaaaaccaaatccattagatttatcggttttcttattcgatatgtctctcttgcatattaccttcattagttggctttttctttcggagaaaaagaatgagaaccagcacaacaatgaggaggatggccgcagaaccaactgatgcaacaattacaactggaaagctcttgctagttggttttgtgggtgattcaaaaggaaaaagccttgagtttccttgacggctataagaagacaagtgttgt

SEQ ID NO: 35023 - DNA, 3749 bp, Arabidopsis thaliana landsberg
agcggacggcgggaaggaatcgaagagctcctcttccaggtttgagcgcggaagcaaagctgacgccgagcacttgctgcttgtgaagcagaggagaagcttgtctcttcaaaaccgcaggagaagcggaggaagtgctcaagctgagctccatttcaattttctccgccgcgaaacagagaaaagggagaagagaatgggagagagaggggagcttaaaggattttatttggttggagaggagaagctgctgttttattccgaggatttcattaagcgatcgtatggatttagagggaccaggttaagccacgtctctcactcttccgacttatcgattcccaacttcacatacatggtggcgagctattagtctattactgataacgatcttctaggccttagtgacatagttcatgtggtgttgcattttcagaattaactttgattaccaaatttatcacaaatttgaatcatcctctacactacgtataacccacaaattgatgcttttgacaagacaaacaaacatggcgcagcaagttttgcgttatcgttcaaacattagataggattgtataatttacattcaataagaatattaaagaggtattgagaatttcgcaccaaagtatcattctcaggcttctttgtgagttgagcatcatgatgatgacgatgatgatgaattgatgatgatctctctttcaaagtattggattcacataagctgacaggacagcttaaagagatcatgatattcacagcttcaggtcaatacgctccgaccattcaaatatgccagagtggacctggtcatgtcctatatcagacccgttacctccggcggcaaccctcatgatatcttcgatcaaagcaaagtttcccatgatatcaacatgggcaccactctgcgtcccgcgcccttccaacaggttagccggcggagagtgattgtattctcttatgtaagtcttgattccggaagggttgaatcttgtcttgccacgccacgcttttgcacacatgtacccggcacttaggacaggtactgtttcatccccatccacattgtaaactcctgctttcagacagctatcttcgtcctcctcgtgagcagaagtgaatatctgaaaggggatgcaactgtcgggagactggttaagcttgtatacgtatgctcgttccgttggtatccccactccgtataatgagtagatttccatctcaggagcattcggtaatctgaaaaagcagaacaaaccaaacggaggatttataagcaagagtcacatgtatcaactttagcacctcaatataactgagcaagcctttttgagaaaggctcagaaacagctttgtaagctttgagctgaaaaccatatccaacaagaccgaaaacaaaaagactgataatgcatcaggacgaaggatacagttggaatcaagaaatcacttactttgtctctaacggatttgaccagtatttgggatcttgatacttggtgtcatccaaatcatcagcaatcccataagagaaatgagcggcaccacgcgccatcatcttaggagcaacataatgtagtagatctatagcttcaccagcagtgtagaccttatactcagcgatagctttgatcccagcaattcccatgtcatggtactctgtccacacgtcacgacaggtgtgatttgggatactctgacctttgacagcacccttcaccagataaaatgtacagatattcatcatacaatcacaaaatgtacaaggtttattatgatttatatgtccttactcgaaaatcaatattattaatctcagatggcgcagcctctgctacttctttcccaaaagatatcatccttccatagttaacaggacttttcttggaaactccgttttcacctgcttcaccacagtttcgttgttcttttgctttttcccacaacaggtgtggcctttctccggtgaccaatcaagcccgccccatattgtgtcacctcccttcggtaacatagacattgttgagtcccatgtgcgtgtcattctcattacatgctgcaaggtctgaagtctaaatatatcggtgtctaagaatcctggggcaatcgctctgcaattttcgaagaaagtaaagttctatattaaggaaccaagcgactaatagagcaactactccaacgagtctttaattaagaagaaataaaagaccatagatgcatatacaagaaaattgaaagaagcagaataatgctaattggtaaagaatgcaagcatggaagctccagcgctttccatagcaaaattcaatgccctccaaaagacagtatgacaaatgttatcgtcgaagctaagaaactggtcatcacagagcaatgcgtaagaattatcaattcatcatttgtctaatctcaagagagtttcagttacataagcagcaaaataatcaaccaatgtcagttgcagcgataatatagcaatgttattagaattgatatttagtagaataactttgagttccagagccaaggttctgatcatcaaaagtataagcagatattcaatacctggcaactgcaacatcctttgcttcagcagagaaaagccctgcaacagcttttggaacaccaagaaatggtccaccaatgttcatcaccgccttaatatactttgcacaccaatctggcccacccccgccacccagaggagctggtgcctcaacccacttcataaaatgtagaaaatacaagacccccatggaatgcggaactataactgctttttttccaccattggtagaaaccatcaactctatattacttttcatacggctaagagtctgatcacgtacctattaattcaacatgaaacatatttaagccttaagtaatgaagaaagaaacgtaacatggaacagaataatagaaagaacgatgagaaaagaacctctgtgttctgaaacgaaagccgccagtcatatgcagccatgtacatatttttctcttcatatccaatatgtgcaaggttagcaatcagcactgcccagacaaagtagccaggagcaaagtagtcagcagccacgagtcctgatacagctcgaactctaataccagctggatccaacccagtttcattgtcaagtgacatgtgttccacccaacatagaggcctgaatcaaagagataattgattagttaagatactatcaactataccactgttaccatcaacaataacattgcccatctctaccatagcaaaaacatgaacactgagccgaaagaagaagatgcagatcgtaacaaagatgcaacccacaaaacactttttttttaatatatccatagcagggtcgggaggagttcaaagctggataacagaacgaggatggacgaaattcaagacgtgtgaataaactcgatgtggaaactttgaaattcacatattcagttctcagaaaaaaattgagaaaagcacattgagctgaaagatcaaaaaggaactagctttaattacacatatacatagttgaataataaagcaacagtcctttatcacaggctgaacacacttttcacatatgtacttagaacttttctatttccagcaaaacataaaacacttcttcattattcgctacacaaagctaaatctacacgcaatgacagtaaaggaagttacttgttatgaacggactctatggcatgtttagcaacaaattttgcaataatatgacttgaaattc

SEQ ID NO: 35024 - DNA, 2476 bp, Arabidopsis thaliana landsberg
taattgctaaccattttatagtagaagccaaaacagtgcgagtattggttggtaatctgaagacttaaacagacctgctcacactttcccaaggtcgtcttgtcaccagtgtagttctagaacaaaccagacaattacgaccaagaacaaggactcatgtcaataacaagtgaataatgataaccaataattgacatatttcacaaatgatctccaaagtaaagacagaaatagataatgctactcaaaagtcaagacataaccttaagtagctccatctcctccttggttgggcaaaactttataagattctctatttgatcaacatctagtacagactcatccattgccagaactgcagcctggacgatgcaaagaaaaattagaataattatcatcaaactatgaaagggtaaccagtcatgactttcactcaggtaaagtaggtactggaacttaccatcatatcaggtagcggcatctttactttagtaagcataatttccgtgttattggctctcctaaggtcaatctgaaaaaccataagaaaacaatatttcaaaaagactagaatactgaatcacaaaagtatacagacatgccataggctgcagagtagaagaaattccagggaaaagagatgcggcagagtagcttagagagacattcttagtacaacttttaatatttatatacatattcgggtagtactcagattcctggcaaattataacatgctttcagtcacttctttatacatttccaaagtctctaccagaaaggagcaagttaaaacatctgacaatactaagggttaagaatatttaacattaccagttgaactttttcaggttttgccccaacagattttcgtcgactcccagatttatcagctggcttttgcactgtagcagagaagagggtctctatttctgatacatcaaattctgatggcctagcagaaaagaaagaaaaatatgattaattgaaaaacaatagtcaataaaaccccaacagcacataatgagttccttgatacacaaaggtgcaagagaaggaacttagaagaaagaggaaagcatgagataaagttagtccaaaacgtgtgtgattctccacgtcatctgtaactcatcccataagctccccggcaaagcccttgtttttttaacccagtgtaatggcttcagggagcactttgttttaggtggacgtgaacatggacgtggaagtggaggtggaggtggaggtggtggtgctcttctacgcataagaggaggaggtggaggtggtggtggaggtgatcttctaggcataggaggtggaggtggtggcaatggtaccagggcatcagcgccagagatctcgacaagcgacattggatcaggaagcaaacagacgatttagtagagagatttaacaacaaacagttttcttcaccgatttagatcaaataacactagttcagagcaaaacaatcccagaaaatataggagaatgtgttgaaagttaaacttgattttgaatcaagtttaattattggatcaattatccaataattaattatggccaaatccaagttctagagttttctctagaaatatcatcatttccacctccttaaaagattctagaaattttctagaatcatcttccacctccttaaacataaaaatctagatactctaatagaataatctagataatttgaataatgtaatctagatcttatgtaagaactctctagacttaggattaaaatattttagatattttgtagtttggaggctataaatacctcctccccctctcaaatgttgcaatgttgtgaagttgtattcaagtttaaagcaaagtaataaaagttctatttcctaaaaaactctctcaaaacacttaaacactttctccattacctctaaaagaattttactctaacagatggctggctcagcattacgaaggagccaaccgactgtttcaccatcagtcttaaatccgagctcttgtgtcagctggaaaatttgggaggcacagctcagcggaagtcggatgcgacggttacggtccttggatgatgttggagtcctacttgtccttgcctttctctcagttttggtttttccatttctcatatccatttttctctagtttttcttttgtaagtgcaagtggtaaaccaaatttcttgtacatggtttatatagaagatttacatataagaaaaatacaaaatatttcatttgtgttaatgaaaaaaataattgtgtaactaactcataaatataaataatatctgtattaattgtatatataagaaaaaggcaaaaaatagtcagagttcaaaagttatgtaggaaagtttaaatgataggtcactaactaatggtaattttaaggaattgtctaaaaattttacagaccaaagacagctaatatattaatacattatttccacaatttcatgcaccttatt

SEQ ID NO: 35025 - DNA, 3470 bp, Arabidopsis thaliana landsberg
  unsure (1)..(3470): unsure at all n locations
aattttgaattcaatcaaccaaaaacttttaaatttacttagaatctgtagtatgctaaagagggctaggtcgtcttctttctggttagccatgtcaagtactttgccttctcttgtttgtatctcttccattctcgtactgcagcaaggacaacgtgacctatcaccggcaggaaaaacggctatccaggaaagcaaactcacatgagactcagagaaagaagaagatgctaataataataacagtagtagagaatgaatcttactgagtacactgcaaagcaatgttcataagagaagtagctgacggacatgatggatggatggaagaaggcattctcggccaaggaccttgcttctcttgatgaacctattatggtatacaaaaccgcaatttcttgttagattcaccaacactaaggtagaacagagtatattgagtataggtcaagcttaacatactggctgaagaactgtatcctcccaaagaagcattagactgagccaactttgctgctttcagagaatatttcacctggtttgggggaacacaatggaatgatcagaacagtaaaaaggttcccagaaatggattctagttgagaaacatacttgttctccaatttcatccttgataatcatcctggggagtgaccgaacctgcaagtgccaagtgatgaaatttgaaatggctgatgcagcagagcatgctataaatatacatgtggagttaatgacacaccaatctagagagagaaccgagggttgttgaacaagaatggagattgaagcatgtgtgcttccgtgacaagacatccaattccctgcaaatgatacaccagtaaagacaacacccatcactatccattcctcatagcatcccttgctttgctttgaaaccttattgatccataagctcacatctattttaggttttatcacattcttaccactctgtaaagcctctttcactaggtaaaatcttgtaagtgcccaatccactggtataattgtcttcagacttaaggccaaatagttgtcggaattgtcccaagaaaatttcgactatttgctcgagatcctgtttcagaaagtgcaaaatcaatgatgatacttcagtgtgatcttccaaggttctgcagatactcaatgaaaagtcaaaagtgactatgaaaaatgaaaagtgagtgtgaaaatatcaacctatatataattggtgtgaagcataatatgactatgaaaagtgaaccgacctgaagcgatatcgtgttcctacttgggctttcagagtccttgtcacaatttcccgggttccacacaatcacaccaccccacatctatagaacaaaatgacaagatgtcactgaccaacatattaggagaacgaaagaacatattgacgcaaggaaactaaccggagatatgaagccatttgttttagatatctccccatttggcaactgcaaaagaagagggcattcttttccggatggaatatatctgacaagatgaggaaagatcatagagttgagatatttctgtgcaaacatttctgctcagtttatcaggaaacagtatagtagtcacagcatcaagtagcattttaagcaaggatgggcataataaaataatatacaccacaaattgcagtattttggaccgtccactggctccagcagaagtatccaagtgccattcgtttgaattcacctggaagaaccatttaagatgatcttttaaataatcagttatatccaaattagtcatggagattgtgagaaaacggtacgtacaaaaaacggaagatcactggtcctaaagatgtagctctgaagttttttatcccaagatgaaaacgaagacttcggtgtatgatacaaaacctaatgacagagaaaacataaatcagtagctcgagagaatagcaaagatgccaaagatttggatcccgtggtgaatgctacctgactttcaacacttatattagctataggtgctaaggccttagtcaccggagccaacaatgcctcatctatcctctgaaagtccctgtcaacgtagagcacaaacaacttaaaagaaaagtaaacacatattttcgaaaattgcttcaggtgtatacatatacaaaaacaaatggtgagaaagcataatacttggatcattaccaatcgtagacccaatcacgtggattggaatttaaaagactgaacgaaagaacaatcttcccatctgatcccacaggcataaactctccctgaattgagtcttcttctcttccaccattcataaacgcctgaacgaaaatctcagaaactctagccacaatgtcaccatacctctcttctaatccattgcccacaatccacgcatgccttcgcttccccaccacagcttttacctcatctccaccattggcattctctttattcaccacgacaacactgtacattttcccactgttctcagaacagccactaaacacataattcagtgactcatccactgtatcatccaatccaacaccaaaacaattttttttgatcacttcacaacggtaagagcacgtggtagaactatgcgcaagtgatcagagcactggtcttctcggttttgaacggtgacagagagggaaaattcacaaganccacattgtgaactttgatgagttaactgatttataccatcttgtatctgagatcgtaagttatccggatccgtcgatcgaaaaccgacgaaaacagcgtggaaattgcaagggaaacgcaaaggggtcgactcaagttgatcggagagagaatcgatgtcgtggaacggtaacggagagcgatatatttccactgacttccacagaaatggcacacctgaaacctccgataccggaaagggataaagcaaaggaagcgaaatcgaaaattcggagctcaaggaattaagaagaccaaagaataatacctaaaaggaatgaaaagagtacagagctggtgatgaagagacgcttcaatccaggtttggtggaacgcatagtcttcggatcaaactccggcgtgattcccggattnnnnnnnnnnnnnnnnnnnnnnnttggtgctttccgagagttgaagatgccacaagtacacttgctcagctctctcttgcgtcgattttgtcagttcctacgatgtaaaataaagagtcttttatattaagtaggaactgttgttcaatagccgtctnnnnnnnnnnnnnnnnnnnnnnnnnnnnnnnnnnnnnnnnnnnnnnnnnnnnnnnnnagacggcgtaaaatctcttttaagttttttgggtcctctgatggttctttatacagctatggtcatattaacaaagcttcttccttggttactactatgtactctgaaaggttcattgtttagatggcttcttactgatgttngtaatttacgtaacattattatatttggaagacagcatcaatgggtaggaac

SEQ ID NO: 35026 - DNA, 3319 bp, Arabidopsis thaliana landsberg
agaatctataggctgagattcttcgagatattgaacctatttctcttctcgctaaagaaattcttcatttcgataggtaatttcttcaaattctttctgattattcttcaatagctgttccatgtttggattagtattgaaggtataggctcatagcttcttccagtagcttaatcaaacaacatagagacaccatatggccttttgaggtgactattacacatgatgatattcttggcttattgttgaggatcctttagcaatggatgataggattatagtggtcattgcagaaagtgagagatgctcttgtatatatcttcagtttacttgaacattaggcaaattacaacttttttctagtgaactattgacatttgaagctagcttcagagcatacttgctgttttctttgtgtagattactttttgcagttctagtgagctgttttttttttcctttttggtaagcaggtatttggatggagaacgcttagattttgaggatgagaaaattgtcatggaaaagcttcttccttatcacccatattccaaagacaaaattggttgtggtcttgattttataatggtacgtaaattcgagctaacccgatatctctctctttaagctctactcatatagaaattatcttgaggtattgtgcatagttctcgaatcaccatgatagatatatgacttacttacatgctctatccataaatcttcatttgctttatgtgcatggacttatgagtgtgctactttgttactggcaggttgatcggcatccacaattcaggcactcaagatgcctctttgttgtgagaacagatggtggatggatagatttctcgtaccaaaagtgtcttcgagcctatgttcgagataagtacccgtctcacgctgagaggtttattcgtgaacattttaagcgtgctagtagctaaaaatctgtataactgtcccactcatcatcacagcaaattctcataaatttttagctgaaataacacaatcagctatgaagctttgttgtacaaaatttataaattgctcaatctattggaagacttgaatgagttaggaaaatagtagttggttcagacttcagaacaatcaatttttgagaccgaaagtaattctagttatggaatacaatatttgcatgttgtaaaatctttttagctgaaacttcgaacatcctttgcaagtaaaaatattgtcacttcaaactttcgaagtagctagagaatttccaaagtctaaactgtcagagagcaaagcccaaaatgaacaatctcaaaaagaaacccaaaccagtacgctttgtaatgtttccaaacgatgaggataagagaagaatctaccttattccaacccataattgactccatatatatagctcataaagtcaaatgttttggttaacatactacaagcatttagttgacaaaatttaagttgaaccaataaccatttagtccttaaacaaactaaaaaatatgtcaacatatggtgataattaacatttacaagaacacatttacatcatttccggagttgggagatttatattatatatttcacatcaatacaaatagatcttttaccttctttttcttttctaatttggggtcaaatggatcttttaccttgtgaaacaaattatttacaaacaaacaaaattattttgtactccaactaaagtatacttaccccacaaaacgacgacgtttagtaactttcaaagaaagaaacgaaggtaggtcccacgctgattcttctgaaacttcttcgaaggtaacagttttcacatttgggtcaaatatctcgcacacgtcaatgacgctcttcactccaaagagaccaccgttaataactccgtcatcatctcccctagtcaaaactcaaaacactgtcacgtgttctcaccgtctaaagtaacaccgttaacactcacctacaaaaaaccacattatataaacaaatcttttttctcctttttccttctctcatcaacttcagatcctttcaccagcaacacaagttattttcaaaagatgatgccaaattctagatcggcgacaataactccgacgacagaatcaaccaccaccaccacaacaacaacaacgccgatcacggcttcgtattggtgttacagctgtacgcgtttcgtcagcgtttgggctgatcaaggcacaacaaccgtcggtagcgtcgcttgccctcactgcgacggcggatttatcgaagagattaacgattcttcctccgccgctaccgaattaacgattccggcttctactgaagtaagatcgatcaataacaaccgtagatccgtgattagacgccggagatccggtcgtcgtccgtcctttaatccggtcatcgtacttcaaggaggcgccggcgagagagaagagggagaagaaggagatgcggctagagatcgacgcgcttttgagttttattacgatgacggatccggttcgggtcttagaccgcttccggattctgtatctgagatcttgatgggatctggattcgagcggttacttgaacagctaagccaaatcgaagcgtcggctaccggaatcggtagatctggaaaccctccggcgtctaaatcggcgattgagtctttacctagagtcgaaatctcggattgccacataggctcggaggctaactgcgctgtttgcacggagatttttgagacggagacggaggcgcgtgagatgccgtgtaaacaccttttccacgacgattgcatcgtaccgtggctatcgattagaaactcttgtcccgtgtgcagattcgagctaccttcagagcctaatcgacggagcaacaccaacgaggaggataacgccgtggggatgacgatttggagacttcccggtggcggattcgctgttgggaggtttaacgcagcaatgagagacggagagagagttttgccagtggtgttaacagaaatggatggtggtgggattggtaatagccaggatggtcctagacggatctcatgggttaggtcacacggtacactcgaatcggatagcaacggtgctggctctggttctggctccggcggtagattgagaaggatggttcgtggaatggtgtcgttaatgaggagagtgagaccaaaccgtagctcttcttcttcatcagctgcgttatcttcttcttctgataatctggatttgaacattgaagtagaatctagggttttggataggtcaaattcagtgatgagaagatacttcagaagaaacagaagtaacagagattcttcgtcttcagttcttca

SEQ ID NO: 35027 - DNA, 1446 bp, Arabidopsis thaliana landsberg
  unsure (1)..(1446): unsure at all n locations
tggccatacatgaacaggtaccttcggactgggttcagaaccacagtgtgagaagcacgaagaatacgaaggttggcgcagaccgaagctatgccaagggagcttcggcatggtagcagaaaagggaaccgacttaaaagggaaaaggccatttagacctcgatggatcactatagagtcattagcaaatgtaaagggcatgggtgtaattttgtatgggttgtgtcccgtgcctataaatagatgaacagtacccccgtactgttcacgctgattgggcattcgctttttgcgtcacgtttgtactttcatctccttcaagttgaaggtacatttgtaattcaacattatttctgtttatacgtaataataatatatgattgctcatgttgtcctttatattccttacaatttatccttcgtcaccgtataatgaatttatgaaggtacgcccttcataaccttcgtccgaaaaccattatatcccaaggggaataatgcttcgaaggacgaaggtatctaattgttaatcgtgttgctttgttcttgatctatagcatttgagaacaaggaccaacagtgtggatacatgagttaagcgtttgaaagtactaaacacatataggaaaatatggtaacccgtaagcctagtacctcatgtgaagccgggcttggacttttcccctcacttgtcctgagatgaggtctcccatgctagctatggtgggtgcaagtgcagccaatgcacagcggcagccggggtcagtggggcattgcatgccaaggcggtgnnnnnnnnnnnnnnnnnnnnnnnnnnnnnnnnnnnnnnatgtgtgtggggacggagtgcccctacatgtcatgtgttttggtttaccttgcaaggttaaaactcgatttgaatcgtctgcttcttgcagctaatgagactgtttgaccccttgtactgcatcgagtaaaaagtgaaatgaggtttcttgaggtaacatgttggttgcactaaatgattgttaccatgtattcttagaaggatgcaaacctagttaaagaatactatagaaatggaaaaagctaaaacttgatttagactcatctagtgtttttggcacaccaaaccccttagccaaaacagcttcatggtctagaggtagaggagtatactcctcacaccaggtaagtctagctgagtaatagtatactcagccttatttgtggcataatttttacaagtttgttgcaagacatggttgatggtgtgacttggccagccaccctgtcaccgggttggacggtcgagtggaatgccgcctcggtcaaagaggaccaagagaagtagtggttcaggctttgctctactcccctacttatcgacgttagttgttatccactgcaatttgagaacaatgttttccttttttatcaaactccgattgatgtaataactca

SEQ ID NO: 35028 - DNA, 4626 bp, Arabidopsis thaliana landsberg
  unsure (1)..(4626): unsure at all n locations
taaagaatagtttattgccgagcaaaaggagagaattcacatcactgtcactccagtccccgtggaagtcattctccgcttcccctctcatagttctcaagcacgaatttcttggcctttcgcctttgtgtattgaaaatacctctaatcgatgtgacaaatccatcacctgcattgtcaccaggacgtttcacccatgcccctgactcctgatctgttctccctgactcgtctttgtctctcaaaccaatatcatcttttggaacatgggctttgtctttgaatttcttcatctacaaataccaccaaatgaaacatgagttttctttaatcagggagacgtaaaacatatgcatcgattgctggtgtaaatggtcttacttgcattccggttaccgacttgaggactccccatattatgtgcttctttactcgagagaagagtctcctccatgttccgctgaattcaacacgatgaaatgtgtccatacaaagcttcatatcgttcacaacaaatcttgagccctcgtaagtgatcaacaattccacctagctcagaaccatattacgacagttaagtttattatgcttggaaaacttcttgaacttttgcttagatgaggtaatcaactgacatacctgactaatcttgatggtttggaattgcattatcttttgaggcctagatttcttgtcttctaatgacttttccccctttttttcttcatgaactgaacggccaccagccttggaagtgtttgaatccttcagcttgccttttgaggattcaccttgatgctccatagaagatagaacaagctcagtagctacagactctgccacagtctcctcccatgatctgtaaaaagaggatgttcttctcagttctcgccctgatccacggatcgtgcttgacttcaggctttgattctttgacccctgaaatcattttaggaaaataggtatgaagacttctatagatgatatgaatgtaagaataaaagagttaggtagcagctgctaaaaaatttgacctggcctagatcagatgcagcgagcaatgctgccgcttcttgagcgaatgaacctttcctgcgccttgatcctgaggttgttgacactttccaaacttcctgggatacaaaatacaagcacgtgtcataactccttagcagcaagctaaatcccatcagctagagaagtaaaatggataaacaacaaacctcccttctctgtgaatgttgctcctctcctggaaagatatactcccacatcattgtatacattgtttctgtcaaatggatttttagaggatatatttcaacctgtcaagcgaacacaaaaaaactccattttagtaaatagagtataaacttcagtcttatattattagtgtcattagaacatgtatggtaaagaacgacttgcctggaaaagttcatacggagcctgtccatcttttggggctccttgtcttgcatctacctgtaacataactttcctgcattcaataaatataacactttagaatttccagacctgatgctgtaaaccagtttggtttccacagtgagtttctacgactaacaaaaatgaaaaatagtagtgcggaaagagcatctaccgattacaagcacacaaccattcacgaattatctacaagtcttcaaagatgtgtaaaatgaaaactgcataactagttctagctgaatatggaaaacgagagccaagattgaaaaatactctatgaagggatgaatgtaggagataaatttgatcaaaattacttgtgctagttttaaaagaaaggaactcacttgccccattccggaggaggattccaagctgatagaacagtatcacatttggcattaggcagacagttccgcaggacaacatatctcgttgtgaattgggcaatcccaatatctctgtagtcccggttaaaatcatatatctgcaagcagtgtgaaacattttagggattttcttgccaaaaatttataaaacagagttggtctaaattgaacacccaaggctagcaagtaacagcagtaaactgaagaaaagttatgttcaatgattagttgttactaaagatccagagaaataacgaatacacaaaacgctcgaccagccatccgccaaggtatattaatctattatattcgatcgcttaccatattgtctatttcaacctcagcgaatgtttttccatctaaaaccatagaccagatgactttgttgatttgtaaggatatgcgcatggcagaggatggtcttttgttcttatctttttccaacagccttagctccgcagcattcttcacagaagtccgcagtgctgtatatgctgtcttcctagactgttgcacactgagatacgctttcctcagtcgttccacctacatatgagacacttagttcaccatatatcatctgctgtagaattgtttttgtttacttcttatagaactcttttctcaccaatactggcctcccaccgctgatcatccagaaatcgctttccttttcgagatttatgtttcctgagttactttcgttctgcgtcaattttctgatgtcatcaagaagcatcatcctatccctttctttcgcttcaagttcaattttcgcaagttccacttcctcaatgccatcaggaactacctcatcaatttcctcttcaacttcatcatcttcttcaccagaaagttttaaactgtcgttatgagccctgaatttcatatgcatttgtaatacgatatagtcaggtgctacattttaacaataatttttttttatataaagcataaaattcaggaagtgacaataacttgcacacagctacacttactttggtaaccttgcaaacaaaagattggacaaaacatctgtcatcacttgaaactgacgtgatgtcatcgatgctgtaatattccgagaattgaaagtaagctctttcagtggcttcacntgcagcatataataatataagtcttgcattcaaacaatgttacaaaagagtgatacacagataactccgagtgcaagagaagtgcatagtgtgaaatatatgtgagagtaacattacacattagtgtatgaacaattgtagaaatgctcttcagtagtacttttgtgtataatgagaacaaaagaataactttttggtcgactacagaggctctgttgaacttaatgcctttatgctgatgcatataaatcatcccaaaagaagaaaagactacaaatatcgtgctttcactaaaaaaaggttttaccttcaggtcgggagtcacacctttgtgcctggtatattgaaagtacatgtcacacggcataaaaaccctttcaagcagtgcgccagtacgctttgccttcggggagcttcttctaatctttgggagccattgcaccccagctcctggatcgacatctgttggtgccacatgagcttgtacatgctccaacatcatggacacttccatgcgtgtccatgtcatgtcagtgccattttcaggattatgatcattttcattttgagctgccttctcaatcatgtcatacgcaacatgaacaactgaatgaaatgatcgtgctaaaacacggccactagcagcagcgagcaaaaatctaccctggtagatgaagagagaatgtaaatagtgatgacaattaaaaaacactgcaaggtatctgaaaacatttacggatacaaaattcaactctaaagcttggatcaataaactcatatcatagatttggtatacctggccaactgtaagtattctacttactttatcagaatcacttgaagagttagtatttacagttttatctagtttcaagatatggaagaaactgtccaggaattgaaagaatcgtacaggacaacattcagagtaacataatgtaactacaaggtgataatgctttactaaataacgccaataaagacaaattttcaagttatcatgcattcttctaaacttgaatggcatacagaagtaatgtagtaaagactcaagtttgatctatgcttacatttatgtcttctgaatggagattgaattgtggctcaacaacgttcaccataaaatgccgggttccttcttcctctggatcatttgaatcgccagtctttgtggctcctgcatcgagatagataaatatggtgaatcatacatgtatgtaaggaaaataagatggaacatatgatgcaaataagaaacgaattaagatttaactaccaaaggtttaagatatagacttaccaagagggaaagatgcaaagttctctgttttaattggttctgatgaaggtgaaagaacttccgcaggctccttagattgggaagcgagatttccactgcctgtggaaggctgtttagttggttcatcttgagaaacttctgattcagaatgcttctggttgccctcaagtaactttctctgagcatactgacgtgatggagaaggcttgggtggttgaaatgccttggacatcccaccagcaaaagacaaaacagcatctctgttttctatgttccataatagtttgagtccgtaaacaaaaatacgctgacaattgtccgctattacgacattgtatccatcatcatc

SEQ ID NO: 35029 - DNA, 2557 bp, Arabidopsis thaliana landsberg
atggtatgctgaaaaaagcttatgagctttctgttctctgcgatgctgaagtctctctcatcgtcttctccaacagtggcaagctctacgagttctgcagcacctccaagtacttctctttctttatacacttattagatctgtgtgtagatctttcatttttctagtcttgtgatgagttttatctttcttgattgctttttaacaaaatacttgatatattttcagcttcttaatctgatctctaattaggttttgattatagaagaataattcagtactttcaagtgattgaatttcgagatctgatcttaatttaatcatcatgtcaaattcttagggatctaattgcaatctattttagatttatcggagctaggaaagtctcataatgatatactattattatcatgtaatttcattgtctctacacggatatatatgtgattagaacttggtaaagtaaactaaagattcacagtcttcaatgaaattgaaaagatccaacgtagaataattagtggttccatgcattaaccagtctaattaaagctcatgcagacatttaagcaccacatgaatttaatatctttttaattaagggatcttctttttataaattttcttttgttagcttttaaaattttagtttgttcattaaatttatagattcttcttctcctgatttgtgtttttcgatctttcagcatgctcaagacactggaaaggtatcagaagtgtagctatggctccattgaagtcaacaacaaacctgctaaagagcttgaggtttaatctccaacatctcttcgatcttaattatttatccttttttaattttatctaaagaaaatgtttgattttgagacaaaagcccttcaaagtttcttacatagatattcaattgtctattatcttcgcaattttcagaacagctacagagagtacttgaagctgaaaggtagatatgaaaatctgcaacgtcagcagaggtatatacattaatgtggatgatgatcatttataaacagcatatatatatatatatatatatatatatatatagtttgtattgatcatgaaagtgtgttgctgcagaaatcttcttggagaggatcttggacctctgaattcaaaggagctagagcagcttgagcgtcaactagacggctctctgaagcaagttcgctgcatcaaggtgatttacttctgtacatacactgaaagattcacacaaatctttctctatatatagactgagacacatgcatgaaatgtttttgatgcgtgaggttatctgaaaatgcctcttcttttttgcagacacagtatatgcttgaccagctctctgatcttcaaggtaaggagcatatcttgcttgatgccaacagagctttgtcaatgaaggtatatgatgatgtttctctctctctcctccagtttctatttatagatggaaactttaaatagtccaatttatatatatgagtctaaatttcacattcttcaactgctacatgtttcttttgtattatttctatgatatcttcaggaaagtttgaaaaatattgtgttttgtttagctggaagatatgatcggcgtgagacatcaccatataggaggaggatgggaaggtggtgatcaacagaatattgcctatggacatcctcaggctcattctcagggactataccaatctcttgaatgtgatcccactttgcaaattgggtaaatcaaacaacttttcttgccttaagacatcaacttaggttataaacagttagcagtttgctttaagcccaacattgtctttgtttcatagaggctttggttaaaactcgtgttgtttagtctaaggattcagcactttgatgtctgaagtatggaaaatcaatatctcagacttgaaaatgtgggtttctattgttgacttcgaaactatgttgttgtggtgttgcaaacagatatagccatccagtgtgctcagagcaaatggctgtgacggtgcaaggtcagtcccaacaaggaaacggctacatccctggctggatgctgtgagcgatacttcttcccccaataaagatcttaagcaagtactggtggggtcttcgtggtgtgatcttagatcttatgcatatgaataataatgttattgcacaagacttttgcttttgtagacacaagtggctatagctgtaatagccttcaacatctctcttctgtttcaggatttgtttgtgcctattgtaattgcttatatatgtatggtttgtataatgtgtgaaatgttaacatcgaccatgtctcatctggtgaagtacttatcctgtctatgcatgatacaaaaagacgtggttagatgctaaccgcaatcgcaaacacagcttgtgacaaaggcatataaactctcaagttaacagtgacattcaacagatcacaatgccaccaagatgtagcttttattttcgattctagtgtacagaacatataattacaatatcttggatcttacagaggcaggacaagtaatgaaatctgtcctgacaagtaaaatga

SEQ ID NO: 35030 - DNA, 7645 bp, Arabidopsis thaliana landsberg
gataggaattatgcaaaatcgacatcatcactattaaaattaagctgcagcttctgcaatctgtgcttctctccaggttcacaaagaacgattctgcattcaccaagatcacaaccgattttgagaagaatgtcccaaccgggaaaagcttcaccattggttaagcaaatagacgatactgttgttgctactctgtcaaagcttgtctctgccattcctgttttgtaaagctcatgaaccatagccgtcaagaagatcctactcagtttcgatacactcttcataacttgaatatgaggtgcctgaaacatctcttgaatggctacttcaacatctgccataatcaccagctgactctttgcagatatgttactcttctttagacggtaatccgctacttccgctgcacgcctgcatatctcaagcgcgcgtcttgcatctcctgatatcgcagctacttttcttgaagcaaattcgatagctgtcttctcaaaagcattgattccttccaaccttgtagaaatgatttcttgtagctgcctgtggttataaggaccgaaacacagtctctgtatacccattcggcttgatatccgaggaagcaacttctctggaagatccatagtgtttgctattcccaacacaaccaatttggagttaggcttggtaggccaatccaaaatgttgtataaaacagactgatttctagtgactagaacatcaagctcgtcgatgagaagtatgcaaggcttttcattctctttacctatcttttttccctctgcaaacctctcattcagagactgtagagctttcttccaacctacacgatgaccactcaacccctcatagataacactgtaaatgttctcaggagaagccaatttgagaccatttatctccacaaagcaatatggacttacacttcccgcttcaacctcagctttcagattcttcataacagataacacactaatagtcttcccagtcccgggaacaccatgaatatacatacatctacctaaacactgatcatcagagattgagccttttataaacgcagtgatctcttccatttctttgcttctacaaggaagtgacttaggacgtgtagccaacaacaaagtagctttcgccttttctaactcactctgcttatgacatctcacatgttcaggaatcagcttcatccccaccttctcaagcccaaagaatctccctttacgagagttcgcacctcctcttgcactagtcaaacctcctcgcttactcttcaaaacttcatcatcaagctccatctcttcatcactatcatcaacctcctcctccttcctaccattccactcttgatcactatcagaatctccatcagccaattcagccaaacgcttaaagctacgccaatgaacatcatactcatactcacacaagaacacatcatcaccatcattactagctttcgaaaactccttaggacacttgacagaacaatgcctaagaatacattccatctctatatcagcaaaatcattcgtcaaataaagctctcgtttcagattatgcggttgacgccccgaaacggtctcttcaggtatcatataccaacgagcacgaatccaatacacaccatcatcaacttctttccataacttgtcgattcgagcagcccatagatcaccggaaagtagcttctccctcatagttctcgctaacttcttcccttccggtggcttaggaaggtcaagtgtttgactttgaccagactttttaacctcacagaattgacagatccaatcaccttcaggaacttccttcaatggcggtttcaagcatttcaaatgaaatccacctaaacaatcatcacactcaatcattatgttagtatctgatttgaaacaaatctgacaatcttcaatttctggatcttcttcttcatctgaattcgaatcttctcttctcttaacgtaaacatcatcaccgatttcgaattcggtttcgtcgaattcgactttattgtaataaactctcttcttcttcttcgtcttcttaatcgtctcagatctaattggtgaaacaggagtgaaggaatctatcttcttcttcttcttcggagtttctgttttcttcgacttcgatggaacgacatcagtggttggttttctgggggcacgttctcgttttcgaattagattcattccttcgattgggtcatttcctggagcatcgattgggtcatttcccagatcgattttacgagaaacatgacgagcagatctacggagaggagtgtgagtttctggggtttgaggagtgtgtgaggttgaagatggagatagatacgatttgcgatagatgttagacggagttttggttggggatttgaaggtttttgctcttggagttgaagccattgatggtgtaagctagggtttttctgggtgaagaatgaagagtgaatgaagaggaagaagaagacgatgatgatgatgaagaaggaggtagagagagaaagttggcgggaaaaggtggcggacacttcttcttcttcgcatcagacaagagtttgcgagaaaagggtttaactttgggccgaatattgggcttattaacccaactcatcactttaggtttatccaaattaatcataacattttgggccgatttgataagaaatcaataatataggtccttttgtgaaagaaaaaaaaaaaaacgaagagcacaaagtgaaatggggaattgttttttgtagagccctaaatagaaaatctccaactgtagtgaaagtgaagaagaagaagaagaagaagatggtggagatctgaaaatatgcgatagatctgacgaatgcagatctaaaatggtctaattctataccaatctcctctctcattgtttctactaagttcaagttggtgtactgatcttattttgtggcggtgtatatacagtcatctagaggaagggagaggatgatgatgaaggaagacggtagaggaaggaatccaccgtcgcgacatctttgggttggtaaccttcctcatgggatacttgaacgagaattagccgatcggttcttaagatttggtgaattggaaagcttagcgtttcagcctggacgaagctacgcatttgttaattttaatcacgatgaggatgcgttcgctgcgattaagtcgcttcaaggcttcccactctctggaaacccacttaggatcgagtttgctaaggcggttagtgttgaaaactccttttttttttttttttttttccaatgcttgcttaatttggcttggtttttgagtcttgaggttgattagagatgacatgaactaacttattaggagtgattgaaagttatcagttagtgtgtcttcaatagatgactagttatgtgattacttacacgtaaattagttccagtcagtaccattctagaaattaatgattgttgactacgcaaaggtaacaagtctcttaccttgttctggataagttgttactcggatgatacttaatcattgtctaagtttatagaacttagcaatcagtaccattctagaaattaatgattgttgactacgcaaaggtaacaagtctcttaccttgttctggataagttgttactcggatgatacttaatcattgtctaagtttatagaacttagcaatgagcaaaacaaacgaagatggtggtatctcatttttgtctcctcttcataggcctcacactttattattacaagaagttttttttcacattaactgtgaaagttctgtagtttctatatatggaaacttagaatcattctttattaaaccatatgcctccacatcaaaagtatccatgtgtaaccgcacaagcattcacctttatcattcacagcacaaacattcacctttatcattcacaacacaagcattcagccattacgttgtgaagcattcagaatgttattgacaaataatacaaacttggtagttgatcccaagttggagttctttgttcatttaaagatgctcttagctcacttgaggtcaagtgtgttccaggaacatcagcatgtgttgaagggaagtggaccagtgttcaactagatcttacaataaagataacagaaaattgtcattaagctttatggctcttagagttaatgtttacctaacaactttggatgattccatatgcttcagcgtcagggtcacattcatgcaaaagtcataaacccaagttaatagaattatgttggcattggtccacatgttgtaagtttgattgcgttgctgcctgacttcagttgcctctcagtacttacgaaggtgtgacttgatcatctatattgtgtctccgagtaacttttcctgccttctattatgtcattataaactgagaagttacagagtatagaactattattcagctagcagttggtgacattttacatattttctccataatatgtgagtaacaacccaccatacgttcgaggcattgttaaagttcattctcatcttcaccatgtttcatattcctctgcaacttgccagtgccaaacagatacatgcttttgaaatggttacctatacatagacattgttaaaagcagaatttgattcgtatgtaccaattccagcttgcaactgcccaataaaattgatcattgttatttttttagattatacaaaaattgacagggccaaatatcttaagcttgatgattgtttgtgtttatgacatgtttactttttgccatgattacatcttggtcatgtcttaaattctccatggctagtgatgatgtgtaaaattgaggagctaaatttgtataatgtttaggattggcctattgtctgatacctcaatatattaatattgtaacttatacattgcagggatattctttagctcaaattaatcaccataggcagctcttccttccttagacttgctgataactagatactcgagttttttcatcggttaatagtttaaagagtttctatctgctttatattgttgatattaatgcatattagcttttactaactgtgaggcagaagcgttttctgttgcacagtgtttgttgcctggtggactttcttacccagctgtgttagatgggcatctcattatctagttatgaattaaaatagcgtatggattttaataatcttgtgatggatttgaaacttgattctatatattatttctcttgataacagtagctactgcatagctatttagtttgttacttgaagtaccatataaatacactgctgaagtttccttctgattagctttcatttagagcctactgaagctgatgctttattttcttgatcatgcagtgaagtaggccgttggttaatacttctatctttgtgatactctttatcgcaggaaaagtcatcaactggatcacgcactgatgatatatatcgccatgatgaacagcggtctgcagcaagagggtcgtcttttgtccaaagggactccagaatgcgttatgagagcccagacacatatagcaaatcaaaaatgaatgatagaaatgcagaacccagtgaggtactatatatagggtttcctgcttcgttgaaagtagatgatgcgctcttgaggaacgtcttttcttcgtttggagaaataacaaaggtcacggtattccctggtcgcagttatgcatttgttcaattccgaaatctgatggcagcttgtaaggcgaaagaaagtcttcagggaaagttatttggcaatcctcgagtgcatatttgttttgcaaagagtgaaccttcctcatctggcagtggaaggggtccgtcgggtagatcactctctccaccttacagatctgttgatcgactgggatcttcagaaggttatcttcaggatagaaactatggaagcatcagcagaattcccagtgtgagggaaccacattacatagaagatagggatttagaagattctgaaggttacatttttaacaggaaacgagactcaagtagcgatggaggtcctgcatatggaaggtcgagatctacgcatagatttcctcaggatatgcatgaatatcatggtagtcctagggaaatgggtacttcattccgtgataatcctcacagattccagacaaggagttcagagtatgaagagccatgggatctacccgaagatgactactactaccaggaaatcaagagattgaagacaagatcctcgcagcctgagaggcagctcccagggcatcagctttctggtatagagcaagaaagacgccccttttcaagggcatctgctgatttttccccaaaagatgcatttgagcggaactatgaggctggacagctaagatacaaccaaacagttgagcagccgttaaacctggctataaggaatggggacaagagtagcttacgagaaccacatgaagagttaatgggaggttatcctctgccatcagttgtccctgaaagaaaaaggtacacccctgaactgaatcgaccatcactaaaggactggaactgggaagggactattgctaagggaggcaatcccatttgtcgagcaaaatgctttcctgtgggcaaagtgatggacatgatgctgtaagtagctctaagtctttatttttctgtatttcttgttttgattggctctctatatttggcttaagttcattcaaccaagtataagtcaaatccgtttgtgtattggtttaagacttttgcttaatttcattgttctttttgtgtattgcttttagacttctgatcaaattaatttttattggtttgttatggttataaatgcaggcctgagtttctagattgcacggcaagaactggtttagacatgctggctaagcattactaccaatcatctaaagcatgggtggttttctttgttcctggaagtgatgctgatatcgtgttttatgatgagtttatgcattatctggaggagaagcaacgggcagctgtttctaaattggatgacacaacaacgttgtttctggtgcctccatctgatttctccgagaaagtacttaaagttcctgggaaactaagcatctctggagttattctacgtttagaatgtggtggttctggctccggtgggcctgttcaacagcaaggtgagagaaaagatacagacttgctaaattattacggtgaaacatcatattcagaagctagtggaaagtttcctgatgtgggaaacccacgtattccgggtccaacagcttttctgcgtagtgcgggtcgtgacaatcaaagtgcatcaatggatccatacgtcgaggacaagcatgatcagttgagtcaccggtattctggatcggactggctgcctcgtgatacaaaccccagaagttcacccttcatagatcatactgttcaaaaacacagcgggtttgttcctgggaaacagcaaaatgcagatctaagtcgttatcatgatacggaaactccagtcccagcagggtttcagcctgaacagcttacacatttagcttcctcgctacccagacagcaacaacaggtacagaacactccaaatcagcctgagagatatgcaccagaaggccgagcaagtttcagccatttgcaacatgcgcagacaccaagcatacctcaattg

SEQ ID NO: 35031 - DNA, 1644 bp, Arabidopsis thaliana landsberg
tgcttttgagaacacgggtgttaccgacggtagctcgatggttcgtgcttggcacacgagagacgatggactattttatacaggttcgggacgcttagagaggcgtaatgccctacttcttggtgtagctctttatgtggtgggttacaggggagttctctagtatgaaggatgctagagaattgagtagatggctaatgagtgacttgtcccttgatggggtgcctcctgggccttatatattcgaccgtagggcgttacatgcgggtatgataactatgtgctcctaagtaatagtgaaccgactaaacttatcttcctattatcctgccaacttatcctcgttcagttccgatgtctgaggatgctacgcgggagaatcagatcaatgctgcggataattttaaaacctaatgagccgtcagggctcaagtcggtccaaccttgtgtcgatccattcctccagtgattcctcccctggcccacgaagggatggccttgtgaagtaatgggcccagagtctttcgcgaggccttctagccttctagtggacccgggggatatctgtcccccacaaatctgcaatctttgagttgattttgaaacaatcggcccaaagattttaggtccagcttgcagttttgattttagatcgcagatgctctgaaagtgcacctgttaagtcattgcttctgaactctgatcaatccggtaaaaacaaacttctgttatccttcttcagctctttcaacggtcttcactttgtatttcagaaattagtgctcggttaccagcttatgctttagagatcagcattttgtccttagcggttgaggattcattgggtgtgcagcaatgggtgtagcccccgagctttgagtggattactgaaaataatccactcaaaggtattcatctcatgccttagaattcggcattatatcatcagcttgtgcttttagagatcagcctgttgtctttaattcctacttgtgagatcagcaacgcgatctacccatgtcctgttaggtttgaaatttatttgatcggcgacagattggacgtccggtagatggctcttggctggtcttcatttcgcttcgtgcttcaatgcttctgttgattagacttgtacctcagtagctatttttggctttcctccaatctctatcgatgtcttccttctgtcttgatacattcattgcgtatactgtatggatgtgactgcttgggaaaatctattgaaaattcctagacgtcccccccaatgggtgtaggcaagggacggcttggtgcgctgagcgtttagcaaactgcccctgagtagtaacttgacgtgaccgcgggtgtaatcatatcgtccaagcagtttacttgagtcccaatgggtgtcgtgttacgtggaacgacgccagccgcctgacgtgtttccagatggtttgaattgcatattgaatttttgcgactgttcagtggtcgtggtaggaggtgagcggttgccttcttcttctataaatagtgtgcttgcttctccagcatcttcacatctcttactgccgcttgttgcttactctcttcacttccttctcactccaccatgggcaagagcaagaaacgtgggagttcctcacatcattccggcga

SEQ ID NO: 35032 - DNA, 1441 bp, Arabidopsis thaliana landsberg
atatagcgcggtcggtgagtaagaaccttcacctttttcctctttggcgtggactcgcttggagcagctgaagcaacatccttccgagaagttgcaattttctcttctgcccccatggtgggtagcggtagtcagggtacatgaatccaatagcattaaaactctatttagcctcttcttttttcggctcccgaaggccgcagataatgcgttatcttcggctttcgaatacggcccaagcagttcatcacttgtagcttcgatacatttcaaccagtcatcattcggctcatcaaatttatctccatttctgaatgtatacttcagccggaccaggtcaccttcgctagacttggtgacagtctccttcggcatttcccagttctctacaagcggccatactctgaaggctatatgctcttgaattaaatctctagtaccaatgaagaagtagacagtaccaaatgccttctgacaagcttccgcagcatcatcaatttcaaccttcggccttcagaggccgaagcgggaccaaatggggcgcataatgatttctttgatgtcttccattgcctttaaatcatttttaacgtaaaaccactcctccatccaggctccgggccatcttttccggaatgttggcactgggtggcttgcattggggcgagcaataaatccataacaaccgaagttgttatggtactgttctttgccagtagccttcgtctcatacaaaagctcgtgcatgctgcaggaaagcttcgtgcttggctccagcccttgactccttacagcctagacaaaaatccccatcctaataatagcttcgggggtgatctgatgaaggaagatctggtatatcttcagcacttcaaccacaaacttgctcagcgggaaccgaagacccgccttcaaaaagcttttgtaaataaccacctcattttcttcaggagcaggggcggtgctatctcctccaaccctcacaatagtcatgtcacaaaagtatctttcccttatagcatcaacatgactttgcttaatagttgactttccgaagatggtatggcttggtcgccagggccgatcctcagaatcttcatctccgctttccacatcaaattcatcactgtcattagaatcttcagataaatctgccaatatctcctttgtgattatctctgtattagttttggccatggattcgtaaaatccagcaataaaaggatatgcaaccttcttctcctcatatagcttctcctccacggatatcttcttctcctcagacatctcttcagatatggatcaaatacttgtctttaagatgaagctcgaaaatcaggcgagaattaacaagcaagagttaaaaatctgagaaaataacacaagcaacagaaatggtgcatcaaatgccgctgctgtgggcttctatttatatgcttag

SEQ ID NO: 35033 - DNA, 2410 bp, Arabidopsis thaliana landsberg
  unsure (1)..(2410): unsure at all n locations
ggatggcgggaatgtacagcaacgctcgcgactgccttagctggaggatgcagccaccggccacactaccgcgcggacctttctctcccccgtcggcgaacgaaaaagctccgcggaaaagagatgagtccacaagtcccagtggggggcaatccccaaatacccttcgcacaccgctacgaagatggtgggttgcgagatggagttggggctgaggttgtgcaactccaccccatagtggtgcaggatcgcccgcataaaacggcttgccggcactccgaacccccgctcgtgaaaggagacaaagctcacgacataccccgacggcggggacggggcggtccgctcgggggggccatccaatctggctgcgggtcaccggagagagggcgaannnnnnnnnnnnnnnnnnnnnnnnnnnnnnnnnnnnnnntgactgtggagaagggccacgggtcgcacggtggaacaatggtcacccggtcggccatcaccaagcagaggaggtggcggcggaaaggactgggtgggcagtttccttttctctggctattccctcaggttgcgaaaacctaagaaggaggcaaggagcggagcaaagaaccatcaccaggccctcccccgagtatataaagaccaaggcgagacccgttcaacgcgtcgcccgaacccgccgcgggattcaaagactcaaagcgaaacgaccgttcctcgaacggctcgcgcacgcgcaacggccgcctcgcgaaccgctcgccccatcgcattaactccgcggcaggacaggcggcgtctcaggcgggaggagcgcgcgacgcttcgctttcgccataataaccgcgtcagaaaaggtacgccacgtcgtccgatttcgtatccttttccgttttcctctttctctatctcttgcaacagggaccgggaaagggggataccccgaaagggatccttccccgcgaaggaaccgggctccgagccccccactactgatcaggggttcgaaggctggccccccgaagggttcaacagccgcctcagatcgcgtgggcccgacacccactactggtcaggggttcgaaggccagccccccgaagggttccatggccgcctcaggctactcgggctccgcgcccattactgatcaggggttcgaaggctggcctccgaagggttcacagtcgccccagacaccgagcgagggatgaccaggggtacgttcgatacataaccaaggctcgggttgcgctcccgaggtaccctaggacatttccgagaccagcgggaacgatcttgtaacggaatcccatcggagggaggcatcgagccctcggaccccgtcgccaggggaccgggtccggcaaatcacccgcaggtacttttgggcgtgctctgggcccctagccgacccccaacgaacggggcacggacgtccactcggattacccgcttgcagctcaccgaagacaccatgttcggtgcccatcgagggtaacatggcgctctcccccctcctccttgcggaaaggcgacgtaggggcgtatgtaaaaaagccgagtctgtccctgatcgccctctcaccctgtgcagaggctcgggggctgctctcgcaaacccggctccggccgaaccgttgacagcgtcaacataccagcccgagagcttgggccccgaccgtgcacccaggctacagccagttcgcatgagggaacgaccagaccagccgaagcattacgcgaggtattaagacctcgaaggagtgtaaccactcctccgaggcctcgggggctacacccggcgggtgcgctcgcgcgcacccaccggaacaaaatgcaaccgagaaaggctggtccccttgcaaaaaagtgcgacgaaagcctccaagctagtgctaacactcccttcgaggctcgggggctactgtcggggaccataattaggggtaccctcaagacgcctaattctcagctggtaacccccatcagcataaagctgcaaaggcctgatgggtacgattaagtcagggatcagtccacacgagtgactcgatcacgcttcacctgagcccagcctcgggcaggaacagtagacccaggtggattcacgcctcgcccgagggcctccccaagcatcgggcgcaccttcgactcacccgaggcccagctcgggcaggcttcgtggagaagcatccttggccagatcgccacgccaaccgaccgtatcacaggagcattcaatgcaaggatcgcctgacaccttatcctgacgcgcgctcctcagtcgacagggccgaagtgaccgcagtcatttcaccccttcactgactgacctgacaagaaaacagcgccgcctgcactgctccgactgctgtgccacccgccagggtgaggctgaaagcagccacgccccgc

SEQ ID NO: 35034 - DNA, 4970 bp, Arabidopsis thaliana landsberg
  unsure (1)..(4970): unsure at all n locations
gcattaaatgcgacgcggggagccgttggcgccgaagtagccgttgctccgctgttacaccggacagtccggtgaattatagcggagcggctgaagtgaattcccgaggctggcgagttcctggggcggctcacccttggagcaccggacactgtccggtgtataccggacagtccggtgaattatagcggagtcgcctctggaatttcccgaaggtgacgagttcgagttgaagtcctctggtgcaccggacactgtccgatgtacatcggacagtccggtgcccccagaccagaggtgccttcggttgcctctttgctcctttgttgaatccaataacttgatctttttattggctgagggtgaaccttttacacctgtatgagggatacacttgggcaaactagttagtccaaagatttgtgttgggcaattcaaccaccaaaattatataggaactaggtgtaagcctaattccctttcaatctccccctttttggtgattgatgccaacacaaaccaaagcaaacagggatgggcataattgaactagtttgcataatgtaagtgtaaaggttgcttggaattgagccaataaaactacttacaagatatgcatggaatgtttctttcttatttaacattttggaccacgtttgcaccacatgttttgtttttgcaaaaccttttgtaaatccttttcaaagttcttttgcaaatagtcaaaggtaaatgaataagattttgtaaagcatctttaagatttgaaattttctccccctgtttcaaatgcttttcctttgactaaacaaaactccccttaatgaaatcctcctcttagtgttcaagagggtttttccaatttttgaaaatactaaagactttctcccccttttgaaaacacattaagataccaatttgaaaacttcattttaaaatttggtggtggtgcggtccttttgctttgggctaatactctctccccctttggcattaatcgccaaaaacggagacattggagagccctttaacattttctcgccctttggtaaacaatatatgagtgaaaggttataccaaattggagagtgttgtgaagtaacgacgaagtgtaaatgatatcggtagtcggtagagtgaagtcgaagtcttgtcttcgtcgagtactccatttccctttcaatctattacttagcatataaacacacttggaaacacattagtcgtagcaaataaaagagatatgatcaaaggtatataaatgagctatgtgtgcaagacatcaaaagaaattcctagaatcaagaatatttagctcatgcctaagtttgttaaaagtttgttcatatagtggcttggtaaagatattggataattgatctttagtgttaatatatgcaatctcaatatctcccttttgatggtgatcccttagaaaatgataccgaatggctatgtgtttagtgcggctatgctcaatgggattatccgccatgcggattgcactcttattatcacatagaagaggaactttggttaatttgtaaccatagtccctaagggtttgcctcatccaaagtagttgcgcgcaacaatgacctgcggcaatgtacgcggcttcgtcggtagaaagagcgaccgaattttgcttctttgaagcccaagacaccaaggatcttcctaagaactggcaagtccccgatgtgctctttctattgattttgcaccccgcccaatcggcatccgaataaccaatcaaatcaaatgtggatcccctaggataccaaagcccaaacttaggagtataaactaaatatctcaagatttgttttacggccgtaaggtgagcttccttagggtcggcttgaaatcttgcacacatgcatacggaaagcataatatccggtcgagatgcacataaatatagcaaagaacctatcatcgaccggtataccttttgatcaacggatttacctccctcgtcgaggtcgagatgcccattggttcccatgggtgtcttgatgggcttagcatccttcattccaaacttggttagaatgtcttgagtatactttgtttggctaatgaaggtgccttcttggagttgtttcacttggaatcctagaaaatacttcaactcccccatcatagacatctcgaatttttgtgtcatgatcctactaaattcttcacatgtagactcattagtagaccanatataatatcatcacataaatttggcatataaacaagtcattttcaagagttttagtaaagagtgtaggatcggccttgccaactttgaagccattagaaataaggaaatctcttaggcattcataccatgctcttggggcttgcttgagcccataaagcgccttagagagcctatagacatggttaggatactcactgtcttcaaagccgggaggttgctcaacatagacctcttccttgattggtccgttgaggaaggcacttttcacgtccatttgatagagcttaaagccatggtaagtagcataggccaataatatgcgaattgactcaagcctagctacgggtgcataggtttcaccgaaatccaaaccttcgacttgggagtatccttggccacaagtcgtgctttgttccttgtcaccacaccatgctcatcttgcttgttgcggaagacccattttgtcctacaacattttggttaggacgtggaactaaatgccatacctcatttctggtgaagttgttgagctcctattgcatcgccatcacccaatccgaatcttggagtgcttcctctaccctgtgtggctcaatagaggaaacaaaagagtaatgtcacaaaaatgtgcaacacgagatctagtggttacccccttatgaatatcgccgaggatggtgtcgacggggtgatctcgttggattgcttggtggactcttgggtgtggcggcctttgttcttcatcctccttgtcttgatcatttgcatctcccccttgattattgtcgtcatcttgaggtggctcatttgcttgatcttctccttcatcaacttgagcctcatcctcattttgagttggtggagatgcttgcgtggaggaggatggttgatcttgtgcatttggaggctcttcggattccttaggacacacatccccaatggacatgttccttagcgcgatgcacggagcctcttcattacctatctcatcaagatcaacttgctctacttgagagccgttagtctcatcaaacacaacgtcacaagaaacttcaacttgtcctgaggacttgttaaagactctatatgcccttgtgtttgaatcatatcctagtaaaaagccttctacagtcttaggagcaaatttagattttctacctcttttaacaagaataaagcatttgctaccaaagactctaaaatatgaaatattgggctttttaccggttaggagttcatatgatgtcttcttgaggattcggtgtagatataaccggttgatggcgtagcaagctgtgttgaccgcctcggcccaaaaccgatccgaagtcttgtactcatcaagcatggttcttgccatgtccaatagagttatattcttcctctccactacaccattttgttgtggcgagtagggagaagagaactcatgcttgatgccctcctcctcaaggaagccttcaatttgagagttcttgaactccgtcccgttgtcgcttctaatctttttgatccttaagtcaaactcattttgagcccatctcaagaatccctttaaggtttcttgggtatgagatttttcctgcaaaaagaacacccaagtgaagcgagaataatcatccacaataactagacagtacttactcccgccgatgcttatgtaagcaatcaggccgaatagatccatgtgtaggagctccagtggcctgtcagtcgtcattatgttcttgtgtggatgatgagagccaacttgctttcctgcttgacatgcgctacaaatcctgtctttctcaaaatgaacatttgttagtcctaaaatgggttctccctttagaagcttatgaagattcttcatcccaacatgagctagtcggcggtgccagagccaacccatgttagtcttagcaattaagcaagtgtcgagttcagctctatcaaaatctaccaagtatagctgaccctctaacacacccttaaatgctattgaatcatcacttcttctaaagacagtgacacctatatcagtaaaaagacagttgtagcccatttgacataattgggaaacagaaagcaagttgtaatctaaagaatcaacaagaaaaacattggaaatagaatggtcaggagatatagcaattttaccaagtcctttgaccaaaccttgatttccatccccgaatgtgatagctcgttggggatcttggtttttctcatatgaggagaacatccttttctccccggtcatgtggtttgtgcacccgctgtcgagtatccaacttgagcccccggatgcataaacctacaaaacaaatttagttcttgactttaggtacccaaactgttttgggtcctttggcattagaaacaagaactttgggtacccaaacacaagtcttggaacccttgtgtttgcccccaacaaacttggcaacgaccttgccggatttgttagtcaaaacataggatgcatcaaaagttttaaatgaaagactatgttcatttgatgcattaggaattttcttcttaggcaacttggcacgggttggttgcctagagctagatgtctcacccttatacatgaaagcatggttagggccagagtgagacttcctagaatgaatcttcctaattttgctctcaggatagcctgcagggtataaaatgtaaccctcgttatcctgaggcatgggagccttgcccttaacaaagttagacaagttcttaggaggggcattaattttgacattgtctc

SEQ ID NO: 35035 - DNA, 4226 bp, Arabidopsis thaliana landsberg
cccgccgtgcccagcgttgatataggtattttgaaaatatgccttgctaaccaatggttaacgatggctgtgatgggcggttgattgaccgaagagttatgtccggaactggccgaagagagtacaactaagagagagacctaatgctaagtatagaataaagatgatctgcatggaccaaatcaaacctgaaacccaaactgaaaaggagagataatctgcatgtgattctggccaaaccaaacttgaaaaccaaaccaaatcaaaccaatcaaaacgttacaaaaaacttaaagaaaaattgattcattcattagataaactaatttattgatgagaatcagaaagactaaacataaggattgattcagaaagacatatcttaacttataacagaaagttcatacaaacactgaattttagacataaaactcaaagcattcagaaacgacaaagcatttgatcacatacaagttgaaatgaaattggaaacaacagaaagacataacataagttgaaatgcaacagaaagacataaactgaaatgcaacaaaaacacaacatagagacttaactaatgttccaaaagaaagtcaattagtttgtttttaagagtcacttcattatcaataagtggctcttttttggcgatgagagattccagcaaagtggttttcgataacctatctttcttttcaaagtcctccttctcttgctctcgatccttctgccttagctcccaatccttctgttttatttcccaaatagactgaatctccaacattgcattccctttgtcttccacagttgttgtcttggtcacagtcttttttgcttttgcctttgcagctttaacaccaatagggcgagacattgcttcttctactccatgggaaggtggctgggaggttgaaggttgtgcagccttgtcacactttcttctttttgacattacacttgcttgtgaacaccatttttgatcatggcgaagcactctccaagcatgctcaagggggaacttatacccataatcgttgttgaagatttcgtgtgctagtgatatgacatcattgtcattctgtccactagacttctctcttgatgcagcttcataactccctacaaacttgcaaacaccatcattgatcttagcccacctctgctttatgttaccttgcattctctttctcaaaccgttcagctgtggacttgcatcataataggcagctattcttgaccaaaaggtattagccttttgttcattgcctattactgcatctttacttgtgttgagccaagcactgacaagcaccatgtcttctttggctgaccatttcattctctctcttttcaccttaggtacatgttcttctaggctgggagagtcagtacattgagtactaaagataggaacatcatcacacggattggtttccaaagtgtgaacctcttgttgactagttaagaggttcacaaaacctgatccatgactatatggatatggatccatatgatagttctttggttggttttaaaaggagtaggatagaacaaaaggaagagttttttggtgtgtgttaatggtctgtggttgggttaaagttagagatgaaacgtttaatatataacaagaggttcatgatgtgtttatgtgtttaactgtgacatagcagacaatcaatgacaactactaccaaacattgcactaaagtctttaactgtgacataacaagcaagtagtcgtaaattcattgtgacataacaaacattgcactaaagtcttctggtaaagtgtttagatgaaaagaaagagcagaatgaaaggttaatagtatgtgttcaagtaaattcataacaatcaactacaagcacaatcaattgtgtattaaagattgatgtagacaacctaatcaaactattaaaaacagagaaagcattgatcacatacaatagcctaatcaaacaattaaaaaacagagaaagcattgatcacatacaaatagagaaagcatttatcacttaagcgtgtgagctgcctgcattttaacatttttaaaatgatatactcaactacacaaaatctcaatgttcatattgcctaaacatagaagcaagcaaagtttcacccaaccaaaaaaggagacacatttcgaacaagctaatatttcttagtatcaagaaagcatttccaaaccctagacatgccatttagaaatcaaacctggagacgcatgaggctgccttgcaagatcattgcagcttcccaacaaagctggaggcagtccttcattgttctctatcactctatcctcttcttcgaatgcctcaaacacactcgcacgaaactcatcatacagaaacaattacaatatcagcagaagaaatatagaaaagaaaacaacaactcatcaatctccaaaccaaatgttaaagaatccaattcagctgagaaatccctaatttctacaccaaatcaaataacccgaattcaacgcgaaaaacaattgaacagagagagattcataccatgggaaacagattggagcagccaataactcaaatctccgatttggtgaactcttcgattttctgatctcgatctggtgaaccagatatcgccgatggtctccatattcggttaatgatgatgaccacagatgaacgaagaatttccgactcaaatctcttctcaattcatcggatcgagccggatggtgaagtttttgtgtttgttttgcatgtctcgagaacgagagaaagagaagaaaaaaaaagagaaagagaagatgaacgcgtgattttattttttgcttttgtctttaatttggaccactcatttcaggacacgtccatgcttcttagcacacataaaagattttagctaagatgtaaatcttagcatttaagtcatttttgatttaattttaattacttaaacctaagatattatgctaagatatgtgttaagatgcaccgttggacttgctctaagtttacatgtcattctcactaaaagaacaaacggatatttttctggtatgttaacaaaaatgaagcaaaacctaataactaatgtgatttcaccaaacggaagattccaacacacttttccataaaaaaaaaacatacaattatacgtaaacatgcatgacatagataagaattttatatatctatataattatatactatagtttacgacaaataagactatattatatacttataagtgtatatatatgattatagctagtattattgaagccaacgccgaaattatcatagagatttaacctctctcatgggtttttttttgtttgtttttgagtaattgatctcgagagctagctaaagacactctcgccggagagacatggccgggagatcttcgccgggaaaatgctccacgtggcttgacctgaacagagaagaaacagattagacaaacgattattacgaacccttattggaatactatcacgaattcatccttggagcttgtagaaggagtaaatcccatcaaatataagccaaaccctatggaacctccctgtttatactgcacattgtatatagtatgttgcttcttacacattcaaaagaggttatgtataagcaagtataccttgtacttttgcttatagagtcttgaagcagaggcgtgcgcaagaagtaagttatggcctacaatatatgtttcagtagaagagttccctaacaagcagtttttgcccggtaaagaacaacgaccaggcggtgtatccccatcgttgtaacctccaatagtgaatatattagcctcgttgatcgtggtccaaaatttgacgtggttcccaaactctctaaagcaaacatctgcataagcggtaaagtctttgctgcgatgacaaataacaatgattttcatttttcagatttgtttttgtaaacggatttgaacgaagaagcaaagtaaatgccgctctacatgatttggtggttggtccagcctccatagtcatcctcgagatactgaggatgatcgtagtgatgtagtgtaacatgtggctcaattcctataggaaaaaatacatatagtccaattaatagtaagtaaacgaaaagttgaagaagagtgaaaagacgggtgttaccatgtttgacaagttcttggatgaagttcttgtaaaattgtaaccctttcgggttaatggagcctcttccatctaatgagacaagagcttaaa

SEQ ID NO: 35036 - DNA, 3444 bp, Arabidopsis thaliana landsberg
  unsure (1)..(3444): unsure at all n locations
catcgatgctctctgtttattctatcaagatcgccatatcagcatctacactgggtggtgcctgggacaacgccaagaaatacatcgaggtaatggaattttcttgtagcttaaatcaaaccatttgaaaatatgaagtcaaatccttaagcattgttatatattcgcaggctggtgtatcagagcacgcaaagagccttggaccaaagggttcagagccacacaaggcagctgtgattggagacacaattggagacccattgaaggatacttcaggaccttcattgaacatcctcatcaagctcatggctgttgagtctcttgtctttgctcccttcttcgccactcacggtggtatccttttcaagtacttctaaactcnnnnnnnnnnnnnnnnnnnnnnnnnnnnnnnnnnnnnnnnnnnatgatggcgatcgattctaaactttcttttttaccattcttattttcgtttaccgtaggtggttaaaaaaccttttttgttgatgaggctcatttaaagaaccaaccaaatgatgtttctttctctcactctctgtctttctgttttctttttgttctgtttagaatttagaaatccaccaagtattcggtcgagacttgttttagccgttactttctgctgcttatatttcctaaattggttgtcttcttcgagacataattggaatttattgttactgttagtcttttgtcggcgttaggtgtaaacgattctcaatttctcatgatctgtaaattctttcatgacatttattaccacaaacaacaaatgattttacacacagctgtagtttctacctaagactctcgaagagcttctgctccagccacaatctccagcaactccccagtgatcttagcctgtctcgctcggttataagccatcgtcagattcttcttcaattcaaccgcattatcagtcgcattactcatcgcattcatcctcgacgcaagctcactcgctaaagattcctgcagtgctcttagaatctgactgttgagatacaaaggcatcattgcatcaagaatctgaacagggtcttgctcaaactgcatcaacggtgagatctcaggcttctcaacttcaagcttggtcctttccacagctaacttcccatctttgctcgttagcctaaacatctcatcctcgatagcatcaacacactcacctttcacatcacaagactctcctttcatcgacaaaggcaacagagtgtggatcacaggatcagatttcaccaaagacacaaactttgtgtaaacaagctcaactttatcaacctcttcactgacaaacaaggaaaacacatcatctgcaataacttgagcttctttagtcgttgggaaaacacctcctccttcaatacatttatcaacatcaaattcatctctccgactaaaataagcattccctttcttacctacacttatcacaacacagtctattcctctctgcttcaactcttgaactcgcagagtagctttcttggtcactgcattgttgaaaccaccacacaatcctttatcgccagtaacaacaaccaaagcaactctcttcacgggtctaacaatgctcagaggaaaatcaatgtcttctaattgagcagattggttaattgagtagagaatctccacaagagtttcagtgaaaggtctaccctttatgactgcatcttgagctcgacgaactctagctgccgccacgagtctcatcgcttccgttatcttctgggtattcttcacactgtcgattcgttctcgtaactctcggattccagctcgaatttgaattgagggcaacggagatctcgacgaaatccggtttggtgtcagtgattgaaacggataataacgaaatggtttcaaggtagctatgaaagagtaggactctgagctcgaagccgaattcgaattcgaaggagacgacaagagccaagaggtcgagatcgaacctgtcattttcgtttgggaaagaagaccctgaacttgagaggtttaagatttcatcttctcgtgaagaaatgagcaaagaaagagaacttgaggggttttctgtaattatcatgtttattaggggtcagtatataaaaattactacaaaagtcaaaagtagagtttttgttttttttttttctatgagaaaaacgagggaaatatcaataaccctcctaaatcctaataaaaattactacaaatagccaaattaatagaaaaccaaaaaacaacaactatagtcagcatatgaaaattacgaaattttctttttaaagattcatatataggaagagattgaactttaaagtaacaaatcaaaataaaattatggacaaataaaaactctagtccttcagaaaaagaaatattgtaaatgcgggttactaaacacaaatgaatacaaaacagtacctacaaatttccttggaacgacttttaattttgacctcaattttttatttccattatggtccttgtgttgttgtgtatttagcattttgtttttcttgggtcaatcagcatcaccacgtttaggccacgacataaaattgatccgtttatttttgaggctcgctcgcatcttcttcctcctttggcgcaaccgcttcttcctcttctattctcacagatttctctaagctcccaactttggagctaaaactcaatcaacactactcacaatgctactccatttctctccggcgaaacccctcatttctccacccaatctccgccgcaattcacccacattcctcatttccccgccgcgatctcttcgaattcgagcaatcgacgccgcccaaatcttcgattacgaaacccaactcaaatccgagtaccgcaaatcctctgctctcaaaatcgccgtcttgggtttcggcaatttcggccaattcctctccaaaaccctaattcgacacggccacgatctaatcactcactcccgctccgattactccgacgccgcaaactcaatcggagctcgtttcttcgataaccctcacgatctctgtgaacaacatcccgacgttgttctcctctgtacctcaatcctctccacagaatcagtcctcagatcattccctttccaacgactccgtcgtagcacactcttcgtcgatgttctctccgttaaggaattcccaaaagccctcttcattaaataccttcctaaggagtttgacattctctgtactcatccaatgtttggacctgagagtggtaagcattcttggtctggcttgccctttgtctacgataaggtgagaatcggagacgcagcttcaagacaagagaggtgtgagaagtttctaagaatttttgagaatgaaggttgcaagatggttgaaatgagctgtgagaagcatgattattacgcagctggatcgcaattcgtgacgcatactatgggaagggttttggaga

SEQ ID NO: 35037 - DNA, 1518 bp, Arabidopsis thaliana landsberg
  unsure (1)..(1518): unsure at all n locations
tttaacagcatgaaaactttgacttttgaggttaagaaggatagagataccaaatttgcttgctcaaagaatatagtactacattgtttaaaaccgaaccgaaccaataacccaatatgtttattaatttaattaactaattatattaataatattgtaataactaaactaagtaattattatctacaaaattctaacctttaaaaatctaaggttctacttctaactaaataactaaactaaagtatttattatttctaaaactttaactcttaaaaacctaaggttatacttctaacttctaaaaaataaaactcaaaaaaaagctttcgtatttcatttgttctttcgtttatacggctaattgatttttttgaagtaaactaaaaccaaaccaaatccaaccgaactaaaactggttcaaacacaaaccaaaataacttcagttgagtatggttagagtattacaaaacccaaataaaccgaacccaaaattaaaccgaaatgcacacccctgataaatattattactatataaaatatatataactttaataattacataataacacctaaaaatgacataaaaagcaaaaatcccataatcatattttctacaaaattgnnnnnnnnnnnnnnnnnnnnnnncatccagggaatcgaaccctggtcagtaccgtgggagggtactatgataccactacaccagatgcgctatttctgacaaacaataatcgttttatatacttatatttacattttctcggttcaaaatcgttattcctgtaatatattgatccatcccacgatcttcttttcttggtcgtcttctgaaacgctaatcggatccagaagccatggacaaaagcatcagcatcacctccaacgttagcacgacgacttccatggaaaagatcgaccacgccgctagctggatcagcgcaaccgtaatatccgctttcttcacctccctcgaaccgtgcgcctgcgtcaatctctccacctctcacgacgacgaagacgacgacgacgacgagtcccatcaccgtcctctcgctctctccgccgctcctcatccaaacgacatcgtttagctctgttttttaacctctggtaatttataaatttaatccctcgtttgtttcttttgataatcgattggtgtgtggatttgtaatttcttgatttgaaaatgtatgtctactgtgtgtaaatgtgcatgtctcagaatttgattgtttcgcgtgtatctgactttatatacttgggtttaaaatcagaatgaatcatcgtttttgcatttacattgaaaaaatatcaagaagagaatttggtagagatcatttgtttgttttgaagttttcttttgtgatcaatgtttctcgatttatctttttcatttcatttctgatctctgcgttcaactattaaaaccggaacagcatcagtttcatgttttattttgtcaatgtgtcagagatcctgtcactttagatttcatagtttcaaatgtgatta

SEQ ID NO: 35038 - DNA, 1605 bp, Arabidopsis thaliana landsberg
tggtctcgagaagtttcttgagtttttcttttcccttgcttttcttggatcccgaggacaaagttgttgtttcgcatggactgtttggtgttgggggatttgtttggataggtggtaaggctcgggatacggaagcaacttgttgcttgatatgttggtgtggttgtatccatttctccaagttggatagggaacaccgatccatgttgtatttgttccaccatttgactcggtatttacggaccaatgagtatggcataccacgtagaaatggaatgaggctgtagtgcgaagatagtatccatgggattcccatgtcaatatggaaggctattgttggtaatgggccaatgggttggtgtttttcatgtttggtatagtagggcagtgaaagtttgggtatttgggaaggatatatctcatcggctggtccaaaccagtaccaccattcgtaaaaccagcctggtattgttttaggacaatgaaagtcgaaaaaaagaaaccaagagtggtcgtatgtacgtagataaaaggcatgaagaaaagttttttggtagtctatgtaggtgaatcttgggatggggaatccaggaatagagaagtctttggctgtgtggaggttgataaaccctaggtcttggggattacatattttgagtattttgctggtggagtaagaaataaggtttggatttgttttgtcgatgtggtgggttatttcaacagatttggtatctaccaggatgaattcgtaaaaagtacagtttttagttatatcgtcggtaagatattggctatcctcgtaaaatatacgattggtgtagagggttaagtctttgagggatataggtttcgtaaaggaagtactgataaggtgttggcgttgtggtttaaggaagtatgatgaattttgattagtggtttttggtgacgagcatggagtggtcattttttgtggttgggggttgacagcttttgggtaagataaggtaggaaattccactagtaccgagaattgattatggaattttgaaaacgtatgtgcaagtatttcttaagaacttttagttgactatggaatttttgcaaggtagctatgtaccctgtggatcatgtctcggtccaactcacttattaggaacacagtgatgatattgatagctatgtgtaagtgacaattgcttaatttataattgaattaaaattgcttgtcccacataagaaaacaatgaactttatttcctagtcaacgaaactacgatgacgagtgtcatattagggcgatggtttgagacacttagatacttggccatatagtgtgcatacttgtcgaacacctgttcgataattgcatctccaaaatgagcaacgagcaatggttcggtgatgcatcttgcccagcttgcatgctttataccagcttccaactgaagtgattgctcctcatcttcttcctcacggtcaattttgtatgggacaacatggtcgaatttctcgatcttggtgatctcgaaggaaccttcctttaagataacttcttttacctcttcttcgtttggattgtagaatggaatgttaaatgattccaccattgaatcgttcgtt

SEQ ID NO: 35039 - DNA, 3825 bp, Arabidopsis thaliana landsberg
taatcatttattggttcactattattctttaaacaaggtactaaatacattaactggatagacctagtaatagcaatcgttattagtccttaaagaaaggctaaatacattgactggttatacaactttcatgtgaacgatgtgtaacgtccattcaccaaatcagctaattaaactgctaataaattaacttctaatataagtgtactacgtggcaaataataaatagtcacctattcgttttctttccttcttattcaatatttagtatattcaacaagaaaaataattcaattgtacgtcaaagaacacaattcaattgtataatttgtgattttcttccttctttattattaactaaaaaaatcggaaactaatccaaaagtttgctttttctttaattgagttcatattaactgtgagtaaatagatccatagatagatatgattcctaaaactgtaaagaatgttatcatttaattgatacagattttattaaaattagagtaagatataatttgatccttatttataacaatttaaagtatcaattaaagataaaatccgaggaattgcattagataaatttttttttttttttttgacacggtgcatgtatgatctctcctatataaagatctttcatgttcatcataatagacactaaacattacagtaattttctttaaagcaaatggcgacgctagcagcttcctcttgcctcctctcatgtctacttgttttgttcttgagttcagtttcagctgtcacagatgataaacaggtataaaaattgtcgatgattcatatcattattaatttattatgatgaactattgcttctccatgtgatcatccgttatatatacatggtgatcttgattattatatatgatccatgaaggtgtttatagtctacatgggctcactttcgtcccgagcggactacacaccaacgtccgaccacatgaatattcttcaagaggtcaccggagaaaggtgtgttttgattaattcatctctctaattatggttttagttataattaaatttaaataccgttacgaagattttaatacgtgatatatattttctagttcgatcgaaggtcgtctggtgagaagttacaagaggagtttcaacggttttgcggccaggctcactgagtcggaacgagaaagagttgccagtgagtgttcttcgatcgagacatacttatgttgaaattaattctaaatgttaaacaattaaactcttttgtgtattcttagaaatggtgggagttgtttctgtattcccaaacaagaagttacaacttcaaacgacgacgtcttgggacttcatggggttaaaggaaggaataaagacgaagaggaccctaccgtcgaaagtgatcaattattggagttatcgacagtgggatttggccagaatccgagagctgtttctgatcaaggctatggtcctcctcctaagaaatggaaaggtgtatgatccggcggcaaaaacttcacgtgcaacaagtaattctcttgatttctctaatagcattgttttaggcaacaagtagttctctataatagattgaggtgctgacaatatttcagcaagttgatcggagcaagagactacacaagcgaaggcactagggacctccgaggtcacggtgctcacacagcgtccacagcggctggaaacgcagttgcggacgcaagcttctttggaataggcaatggaacggcaaaaggcggtgttccagcctctagaatcgcagcttacaaagtctgctcagagaaagattgtaccgcggcatctctactgtctgccttcgatgatgcgatagcagacggtgttgacctcatcagcatctctctcgcgtcagaatttccccaaaagtactataaggatgcgatagcgattggggcttttcacgctaatgtcaaagggattcttactgtgaattcagccggtaattccggttcgtttccatccacaaccgcgagcgtagcgccgtggatattatcggctgcagccagcaacacgaaccgtgggtttttcaccaaagttgttctgggaaacggcaagacacttgtcgtaagtattcaagtaacacacttgtttttgtcatcattgtagctctgtcccttgaaatatcctttttgcttgacagggaagatcagtgaattcttttgatctgaaaggaaagaagtatcctcttgtgtacggagataatttcaacgaatctcttgtgcaaggaaagatcttggtttccaaattcccaactagttcaaaagtagctgttggatccatacttatagacgactatcaacactatgctttacttagctccaagcccttcagtcttctaccaccagacgactttgactctctcgtctcttacattaactccacaaggtagctaacggtcttctcgcaaaaactctagattctccttctttgtcctgatacctctgtgtttgttttctcaggtccccgcaaaggacttttcttaaaactgaggcattctttaatcagacagctcctacagttgcttccttctcgtctcgtggtcctaacttcatcgctgttgatcttcttaaggtatattattatttctgctcttgattatttttttatctttcctggcctgagagacaatggttggtggatggattgcagccagatatatcagcaccaggagtggagattctcgcagcctattcacctttgggttcaccatctgaggaagagagcgataaaagacgtgtaaagtactctgttctgtcgggaacttctatgtcttgtccgcacgttgcaggtgtggctgcgtacatcaagactttccatccaaaatggtctccttccgttatccaatctgccatcatgacaaccggtaagcgaaaactaaatccactctgtttcgagcatactcttttttttctcactcccaacataactttcttgtattgcaaggaaacttataatactctttttttttttttggtgtttcttgtagcttggccaatgaatgcatctacttctccgtctaacgagttggccgaatttgcttacggagcgggccatgtcgatcccatagcagcaattcatcctggactagtatatgaagctaataaatccgaccatatcacctttctctgcggcttcaactacactggaaagaagttaagactcatctctggtgatagcagcagttgcactaaagaacagactaaatcgctaacacgaaacttaaactacccttcgatgtctgctcaagtatcaggaacaaaacccttcaaagtgactttccgtagaacagtcactaacgtcggtagacctaacgctacatacaaagcaaaggtagtcggatctaaactcaaagtcaaggttgttccggcagtcttgtctttaaagtcattgtacgagaagaagtccttcacggtaaccgtttcaggcgccggtcccaaagctgaaaatcttgtctcggcacagctgatctggtccgatggtgtccactttgtgagaagccccattgttgtttatgcttaaaactgatgaatcagaaccagttaatgtttctatatgttatcgtcaattattacttttaaacccttgttcgttagttttgatgtttctggttcctacactcattttagttataaacataaaatctaagtatttgccagttctaattaaaaccttgttggttctaaatggttctgagagttttgatttaatttggagaatgatcacatatattactacttgtttacttaaagaaataggatattagaatcacgttcatagtatttatgttctactctt

SEQ ID NO: 35040 - DNA, 1250 bp, Arabidopsis thaliana landsberg
tcacccatgttgtgaaattttttcatattccaaaaagacaaaaactaagttgttcaatttttttttgttatggttcaaccttaattatatatgaaaaagcaatgtacgtacattgcatgttgttacatccacttaacgcggatcatgcattaaaatcaactgatcgaatgatcgatagtcgaagtttaatttatttattttgtaagcttttcatcttcaacttcaagctttcccatgctatttctaagtcaactcttttttcagtttctttctattattttcctccattctctctgttttttctttttaacgtttatttgttttatttcctaagagcatccatatttattatttttatgagtgtctttaaatggttatttctaaatataaaagaaaaaaaagagagagaaatacagatatttttagaataaaaattatgggtctgattggtaatcaaaagctgtacaagttttttacctgttagctggagatgttaggtttttcggaatagtgcaaagctgttagaaagaactgtacaaaaaaattgtaccaaaaaactgagagtgaaactttttgtaacgcttttgataaagtttttgtgattggtaactgttaaagttgtactgtgttaccattcaaactctatatcttcctagagacatttgagctttacctttaatattattttatgtgaaagacatcatgaaaagttgttgaatgttgaacgaggatggtctaagagtttctttcttcttatgtatcatttcctaagggtttgccccaaaaaagtatcattttgtgtttgggttttgagttttgacaatcaaacatttatacatcgcatgatcagttacagactgtatttagatttatgtacgacagggatcggacacttagtttttctgtcctactatatatctaagtttggattttacaaaattcttagcgtgaacatacttaagtttgatcttattagaagataagattgtattcgattctttgtgtgaacataagctctgatgtgtgatccaaatatgaccaaataaatctcgataaatagtttgtgtatatatttgagcataagctaacgaaaaataatcaaacattcaattcgattcaccttattttaggatatttaagcaatctgtttttttttttctctctaagtcgtctcggtttgggattcgttctattgaaatctttcttaacaaagtacaatgacgtacacaatgcaaattcttggagatgtg

SEQ ID NO: 35041 - DNA, 2123 bp, Arabidopsis thaliana landsberg
aaaattcaaaatatttaaaattttcaagtattagttactaaaagatttatatatatggtattgagaaaagttgttataacaattgaaagaaatcaacaacaagacaagatggcttaatgtttttcaaggacaaaaacgtggatatttaagactaataaatacgataaaagcagagagaaacctacacacaaaaaaacagagctttaggagttagagagcgtgctgtgcagttaaattctgatgtcaaacgtgctagcaaatctctgagaaggaacggatcaagagaactctacagtgactctgacattttcaatcgccattggtcttaatcgccttgtaggcagtaaagttgccgaatatttcccgtcgctgtcaccaaaagaaagagatacatatagatcattggctggccaaaggagtaaatgaactagaatggggattttatttgattaccgtatagccagtctttgaaatacatgtggaacgctgtagtgagttctcgttttcggttttcttcgagaggtgtttctctcaaggattgtcttgtttcctctaagttcttaagctgctcaaaaccaaaacacagttaagggatcagatgctgaagtatggatgaaaaagaaacgagcaattttatgcggaaagcaaataaaaaacatacgtttgtctgctgcactgccttatatgcatctggcaatggaaatggattgtctttcgtggaaccaatcgcctcacccgcaaaccagtttgggatctgaaccagagacattgatgtgagaaattaacccacgaacacaatcttaataaccaatatcactagttactagaggaaaattaaactaacaaaaaggggaatctaaccaaaaaggtagtgatctggtcagggtccacacaagaagccggttcagcttgtttatcagaggcaccagtcggatgtgatagtgagtcatgcggatcaattgcgccgagcgccaaggattcgttccatttgttgatagttggctgaattccgacctggtgtatgtgctcctccaagtgtgagtaaaatgtattatatggagcaacctggaacagataacagtcacattgatgccaacagttatagacaacacatcagaagatgtttccacttaactcagttgaagaagtgactttaacagcatgctcaattttccaaacaccaggaaccattaatacgatcatgactataccaggatattaacacaggaaagatttagcctagagttaaaagaaaaactgtagtctatttattaatttcagctgaatatcagggcgggaaagaagagttatgtatgcagctcaatcttaaatagacatatcacctgtagtttgtggttatcaccaactataagaggtcgctgattgactcccaaaaagaacacacattcacggcaattggcgatgcaaattcgtttggtagctacaatcacatgaactctctcacaatgctcaacttttactgcctgcaaagaacataaaatattatcactgcattctaacctgaacctcgctaacaaagactaaaacagaaaggagtatatttgccgtaccttgccagcagctcccagaacgatagtagaatcagaacacccatacacagttgcatatctcaatggcgctaacagataaataacagaatcatggcaattggcaacctgcagaatacacaaaacatgcaattgacgtgcatacatgagtaaacgaaactaaatgagggattgctgtttaaaatgcaaattagttgttcaatacggaccttcactgatctacccttaagatcagaagcctgcttgaaaagtgaggtcttagagactccctcaataatacatggacctctgtcgttagatgaaactttattaagagctacactagaatcagccattgcagcattctgatcagaggcattagatgccccattttctttcccagaaattctgttagaaatgctttctaaggcggaagctatgtctttgagaagccaatcattcacttgggaaagcaggaaccgggacagcgggcatatcaggatcagaattcgcaaaaaaaggagtagcttggcttaaagaaggtacatcaaatcccttatcaccataatgaacaag

SEQ ID NO: 35042 - DNA, 4493 bp, Arabidopsis thaliana landsberg
  unsure (1)..(4493): unsure at all n locations
ctaacgaattctgtttcacgagtttctttgcatttaaaatttggtttcactttttatcatgtactttttgttgcgtgataaacttctattttcgccaaaaatgaaaaaacaaacttctttctttcttgaaaattaagaaatgtcatttttggtttatttattttttgttaaagtgaaacaaaattctagcggggatcaattattggataaattaatcatatagttatcagacacaacatattcatgatttcatattacactagatatcttcttcaattttaatttatttgcgcgattttaaaacaccaaattaatctacaccttatgcacttttatatatataactgttaattcattttctacgattaaatttcgggggatgtattcaatcaaacattttaagtgatttgtgttgaaataacaaatccaatgttattcaattatggatttctaaaaatctcatgaaatctaatgttattgaatttgtgattttaaaatctactttaaaatcccatgttattgaaaacattttaaggattagattattactgattttaagaaacttaagtaaattttagtggatttccttagttaaaaatacagaattttaaatctcatggtcttaggtggaaatcgaaaagatttaacaataaatcataacaacttctttaaatttatccaaattcttcaaaattatataaaaactcaaaataacttaaatcactcaaaatagaagattgaatacactcatatttttagaaaaattctaatcactaaatgaaacgaaaaagacatgcattacgtattgaaacgaaattgatctgttattatttggttcacaagatttgttataccttcactttcaagattaagacatagatatcatccacaacacaacatctttgactccttgactctgctgataatgaaacagtcacgggtctcaacacgacatcgtttttgattctttttatgttctaattttgtcattgtccacttctttgacactcttaaaaaaattacagatttatcatttaattagttaaacattactaaatcaaatacatcgactgatagaatggcaatgatccatttataatctaaaactaaattagacacagatccgttgtctgtgcttccatttaatgttcttctcatagtttcgatatacaaaataaaataatatcgaataaataagttttgtgttaaaaaaaaaaatcgaataaataagtgaataactaataatgatatatcaaataaaaagtcaaaatgtgaaaagtattaaaactaatcatgcacataattgattctgtttttctgtgtcttactatctattggtctttgacaactctaacacaatcacgtgaacaaatcctatttcattaactaatcaatgggatccaaagacagctaattagatatttcattaccaaccaaatgcataatcatttcaatcatttgaataatcgaacgcgtttttatgttaaataattttctatcgaagatgtggccgtctctgataaaaaagacaaaggaaggaggcatcgatgtgatccaaacgtacgttttctggaacctccatgagcctaagcttggacaggtccgttccatttatgatttctcaatatgaattttaaaatttttcattttcttcatatggtaggaaaattatagaatatataattacttccaataaaatgaatattgcagtatgattttagtggaagaaacgatgacttgaagaatattgatgaagttctatcacaacgtctgtatgtctgtctgcgtattggactctttatcgaagccgagtggaattacgggtactaatcaactgaccaaaattattgtttgtcaacgtatatttaacattgaaatgattttgacgaccggtttgattaaccaggggattgccattttggttacgggacgtacccggtatggtataccgaaccgacaatgagcccttcaagttccacatgcaaaaattcaccgctaagatcgtagatttgatgaaatctgagggcttatatnnnnnnnnnnnnnnnnnnnnnnnnnnnnnnnnnnnntttaatcttttcaatcttattcgtcaaattcaatgtcaccaaaccgaaccaaatcctttgcattaaatacattaaccggatcattgcttagacaaataagtttcttatttgggttcttttgtaagatcgagaacgagtatgcaaacgtggagggggctttccatgagaaaggagcatcgtacatcaagtgggcaggtcaaatggcggtcgggcttaagaccggagtgccatggatcatgtgcaagtcgcccgacgctcctgatcccgtggttcgtaccggttacttatctaagatcaatcatcaatgactcaatgcttcttatacttcttagagatcgaatattttcatctgtagatcaatacctgcaacgggatgaaatgcggcgagacttttcctggaccaaactcacccaataagccgaaaatgtggactgaggattggacttcattgtaagggttttacttgattgtctatttcgataggtttcttgtttaaaaagttaactatgtttattttatttttttgtgatgaaaaagctttcaggtttatggaaaagagccttatattagatctgctgaggatattgctttccatgccgctcttttcgttgcaaaaaatggaagttacatcaactattacatggtaaataacaacatctttatcaaatattagtcgcattatatgatcatcaataactcaccaccttgtttcaatacagtaccatggtggaacaaactttggaaggacttcatcttcgtatttcattacaggatactatgatcaagctcctctcgacgaatacggtttggtctaaatgcatgttctctgtttgaaagaacctgataatttgattctgattttgttttgtgtgtttcaggtcttttaagacagcctaagtacggtcatttgaaggagcttcacgctgcgataaaatcctctgcaaatcctctgcttaaggaaagcaaacgattctctccttgggaccaatgcaacaagcttttgtctttgaagacgcgaacaatggatgcgtggcgttgtgtggtaaacaatgacgctaaagccagtcaaatacaattcagaaacaatgcgtatagcttgagtcccaagtcaattggtattcttcagaactgcaaaaacctaatttatgaaactgcaaaagtaagtctttttgcgaccttacagatcatactaatagtaatcaacaactattcaagcattttaaccgcttaattaataaaggtgaatgtgaagatgaatacgagagttacaacgccggttcannnnnnnnnnnnnnnnnnnnnnnggaatttgtttagagaaacaatccctgcattcccaggcacatctttgaagacaaatgctttgttggaacacactaatttgacaaaggacaaaactgattatctttggtacacttcaaggtaaaatattatagacattacacattacatttctaatgttcatttatcttttctaacgcaagtttggctcttccaatgtaagctttaagctggattcaccctgcacgaacccgtctatctacacagaatcatcaggacatgttgtccacgtgttcgtcaacaatgcactagcaggtacataagtattgagagtaacaacggggaagaaaaatgtgttcacaaactctgcttcggtgttgattttgacggtccattgcacttagtttgcaagatacacatactttactctctagtatagcttaactaccaaataattcaatattcatatttatgaacatattaaaagcgtgttgttgtaggatctggacatggaagcagagacataagggtagttaaactacaagctccggttagcttaatcaatggacaaaacaatatatcgatcctcagcggcatggttggtctaccggtaagacgtttactgatactagaaccctgtttattaagtgagtagatagaatcataacatttttttcaaccttaataataaaaggactctggagcttacatggagaggagatcttatggactaaccaaagtacaaattagctgtggcgggacaaaacccatcgatttgagtagatctcaatggggttactcggtaatatgatgaataagcctttcattttatgagtgatggaagattgtgttgatacataacctagtatgtatatgtgttgtgaaggtgggtttgcttggagagaaagttaggttatatcaatggaagaatttaaatagagtgaagtggagtatgaataaagctggactaattaagaaccgccccctcgcttggtacaaggtatgcctatttacatatgtaaataagtactatatgtgtaatttatgaatagtatcggtgacgaatgtgaatatgcagacaacgtttgatgggccgaatggagatgggcccgtgggcctacacatgtcaagtatgggtaaagg

SEQ ID NO: 35043 - DNA, 1358 bp, Arabidopsis thaliana landsberg
ccgctatcaccctgcattatcactaacatctggaaacttctctatctttatatcttttgagggaaatcaagaaatcacattgaatgcaaatgatgaaatggctcgacaagtcaaaatttaattaacaaaaacaaaacctcttctagggtatataaatatctctatctgcaaaagtcaaataaaaaccatggagaatcacaatataagaccatatatagtggatagactcgatacaaactatagaggggactattgagctattctctctcaaactgcatcctgcttaatttcatcaagtgtggaggctttccttttctttactttcatcgttcttaatttcatcaacagtgtggaggcactcataatctaacaaccatcaatgaacaagaaacaaaccttgacactcagaatctgtccctgcttcatcacttcagttaattccttcttcagacccccatcagttgttctcccgttcatattcacagcaaggacatttggtgtcttaatgctcacctggactttaaactgacttccacaagttagggttgagcggaagaagaaaacgagagtagttttagtttttttggttgttccttccagacccggcccgatatcgaagcgaccaaagcccatgctttttgagcaaacacgtttttagcagagaccttggaaatattgagtgaagctctcacgtgacaaaaacacgcacaaaattattcaagttaccacgtttattaagcaaaacgattgagccaaaaaaaacgcatcagaatctggaacctggatcagatctagtcaggggtcagatcggagagccggcaatataatggcagcggcgagacgattacggacgctccaatctcagccggagaacaaggtctgtgtcgattgctcccagaagaatccacaatgggcatcgatttcatatggaatcttcatgtgcttggaatgctccggtaagcaccgtggtttaggtgttcacatctcattcgtcagatccgtcaccatggattcatggtccgagatccagatcaagaaaatggacgctggaggcaacgagcgtctcaacaattttctcgctcagtacgggatctcgaaagagactgatatcatctccaagtacaattccaacgccgcgtctgtgtatcgagatcggatccaagctttagctgagggaagacaatggagagatccgccgattgttaaggaatcggttggtggtggattgatgaataagaagcctccgttgtctcaaggcggtggtagagattctggtaatggtggatgggataattgggataaaaatgattcgtttagatctacggatatgaggaggaatacaatcggcgggtgtttta

SEQ ID NO: 35044 - DNA, 1197 bp, Arabidopsis thaliana landsberg
cttatccttacccttattattttttaaaccaaacatattttaatattaaatacaccatccaaaaataatattttcggatttctaaatatttagcttatagaaagatttcttatttatcaaataaattaatttaatcaaatttaaatttactatttcccaaattactaaaaacttaacttttaaaattaaaacattaaattatatagcccatatttttatatttttatcctataaatttcatgcagtatactatatagtgtctatctattcaacacaatcatagttttttcctataatttgattaaaaaaaaattcattatcctctatacataagagagtctttagtgtttaggatataatcccacaatttttctcaagtatttttttttttaattctactatatatcattattaccaaacatttttaattgcaaatactatttatcttattttcttaaaactattttccaaacactcatgaaaaatttaatatgtaaattttatattttaataaaattaaattatataagatttatccgctgattcttacttagttgatctttatgataaccattaaaagatgtgggatgtggatgttctaaatatcaattacataaaagactgttttatttatatatatggacaaatgtatccaataggctctttagaagataagtcgtagggatgcaattagaaaacaaaactaaaataaacgaaccaatatatgatggaatgggacaggataaaattctaagactcagaagtcgaagtcgcacttgatcgggaaaacaatggaggtagttgtagttccgtttgaggtacttaaaggaagccttagatcatcgcaatcaaccttaggcttaatcctcctaaacttcaagtccccaagcttaaacctaaccctaagcctgaacttgatctctatattgtatacaccggatatcctctccgcgtttaaagtcctagactgtccggcgttaaaaataacaaggttttggccttggaacgttggtgtgagaacggttgtgtttttgtgtccttgatagaaaggagttaacgtgatggtactaaaccgctttccctcgtagtaggcatgagcttcgatcctatcgtagtagagtccgatcctcttgtttgggttacggacaggaacagtgagggctaggttataccttacaatgttgtcaggggaagtgt

SEQ ID NO: 35045 - DNA, 2218 bp, Arabidopsis thaliana landsberg
gtgcggttgaatactaatatgtgtagttgatataacatgaatatttaattagttacatatttatgtattttaaaaacttattagacctctcatataaaatatctagaagacatatataacagtatttatattttaagtatccaaaaaacaaaaatattgccggtaatctatatataatcggctcagtcaaaatagaataaaaataataaaataaccctactgcatcaaaatatccaaaatatcaaaattcgtcaacttaacctattaaatatttatgtcaaaatagatgctctccttatatctaaacaagatgtttaaacatcgacacaaaatatccaaaatgcaaagtgtgtccatgatatgatatcatatataaacttgagatgctatctagacttggaagaggttcacttgataaaatgtttcaacttgagctagttgattaattttagcccgcttagatttatttacttgaatctcttttgttatgtaagataatttacttaaacttgtatgtgaaactaagtcaaaatcgcctttatcacatgcctaagtaaaaaataatcaaataaaattgaatatcaaaaatcagtattttaaaataaaattctataagaattgctcataaagtttatcatgatcgggacaagacggaataggacaggacatgaactttacccaaaccaggtaaacatgttaaaatagtaaaacctttcttaatctaggtaggactaacattcgaatcacaagaatctgattcgcagatgtgtttaacaaaagtggcaaatctctttcacatttaatgttcattattctttattaaactaattaattatcatcctaccacttgtaccttcataagtatcataatgactactatactaatctcctgtaattatatcatgtccacaaattcaatagaaaatatcaactactctttaaaaagtaggccatatcagtttacaagtcttagaatcacaacacatatactatatttgaggaaaaatgtttacgtatatatacgtactcatttctagagctatcatatattcatatatatgttcgaaaattatattaattattagctacacgtaaattacttaccctcgattattattaaccctcaactatattattatcttggtcatataattcaacgattctcctttagacctgtgcaatggatccagatccaggacaggtccagttaagcaactcctcgatcatctgcatcgccatttgatcatcttcctgaacgtcttcgtttcgtaccttcatcttattagtctcaatatcaccaccgggacgtgcgttaactttgtcacctagttcaacaagcttgacccagtttggactcgtttttgacccggcgcgtttctgccagacgccgatgtgtgagctgtcgttgtcgaggcggagacacgtcagatacggtgtctggtctttacagttcttccttagcttagcgttcaatagttccgataatgatttgggagaccttaacgcagagttaatctccaaggaatttgaaccgttcgatttgatgacggggaagttagtcttcgcgctctggccgttcattagaaccgcggcttggtcgtaggctctagccgctgtttccgccgtgtcgaatgttccaagccacactcttctcttcctgattaatatatcacacacacgtgtaaatactaaatacactacatatgatgatatgaattttgaaatataatttttaacgttttggtatcatataacattcacgttaaaaaaggattttagtaatttttatattagttacaaaatccaagtaaacatttcaattaagttttgagctgaaatccaaactaaccttagaaattaccacatttaatttacaaaaataatcaaagaatcaagtagatgaaaatcagtcgataacttaactttgataagcatgcatggttggttttaacttttaattccttttaatattttgtagattgttaagcaatagtagagcgtttgttttaatatacaaataaagttttgatgaaatatactaaagaataaagatagtagcttcatatgagaaaagcaactacaacattatataatatgtaatcctaagcaggaaaacagtaaacaatggagatcatatatgtatatagagagccaattacttacaatagaggatggcgaatctcagagacccaagaacccccattgtcgctggcggaca

SEQ ID NO: 35046 - DNA, 4649 bp, Arabidopsis thaliana landsberg
ctccaacagcattaagacggacattttcaagaccttgaactcttacaggaacagatatttgttttctgcgatttagaggaaaccaaaccaaacatattagtaatagccttggaagttagaacgcacaaaatgtatactattgccttgagtttaatggttcattatacatgtcaccgggaggccacggttgaccccaagtccacacatgaccttcgcgtgtaagaaccaccgagtgagtaccacctgcagctaccttttaagaagtttagacctcgaatgaattatccatagatcaccatttagaattagaagacgagcaagtatacctgtctgactgtaagtttgggggcacaacgcttagggatcacaatatctcttcgtacaggcctacccatctcgtcttttaaaggctcttcaccacattgtccatattcattcccacctatgtgcattccataataaattttcaatatgattcaccaagcaaatcagatagagtatgaaaaggcattctcttaccccacgcatatgctcggccttgatcatcaacagctaaacaatgccaaccaccaattgctgcctatcatccattacaaaagaacacattcaaaggtagaaccagtagttcaatatgatattctatagaaaccataatggatcagtagaaagaaagatcaaacctgagtgatcttgacattggcaagggccttgactcgactagggatgttctctgtttttgtttctggttggtgtcctaatgtacctctttgattccaaccccatgtaaacatctgagatcagttcaaagaagccgaaacataacttagcgaaatagaggttttaaatcttatttgtgaatttaaacctgtaatttagctatcaaactactgaaataatgaccaattccatgataacacaaacaaaacctgttcaagaaaacaactttgagctataggctagcttctaatcaagaatctcaactaagagacttttcccacaagataagaagacacagagcttcattggttatgattaataagccaaactatgtgttttttggttccttcaaattttacaagaacttataaaaccaaactaaaataggtctctcaaattttacaagaacttataaaatcatgtccccaaatgcaaagagaccaatcaaaacaagacaaatctcattatcatgatatttcggatagtaccgtgccatcatcgcaaatggcgagggagttacggctaccagagacaacggagcgaacagagtaaggctcgagagcttcaacgacgcaagcccattccttttcttcgttggtaccaattcctagttgcccatcttctccagagcccctggaaaacagacaaaagatggtaagagagtttaacaagagtaagtgaaaaatcgaaactttgataagtagatagaagagaggtgaagagtattcgaccaggctatgattgaagtagctgtaaccattagacacagagaaagagagaggagagagaggagagagaggagagagagaaggtgaatgcacagagagacaagcgcaaaagcaaagcagtgggattcgagggggatggtaataataggaatagcgatgtgtttatatgttaagtgtatgtgtttaattatatttaattcatattattcctaattactcaatacattgatttccgtatattcgtatttctataaacatgctcaaaatatttactgataatgtgtgtttggagttatttttaagtttacagcagattactattttaaataaaaaaacttcttatacaaatgtacacatggaaaacatgaataaaaaaatggaacaatagaaaaaggataatctgtcaaaaaaagaagaagagaggaataaataaggaaaagagaaataaatgaaatgtacggaaagagacttatgtgttgaattgtctacaaaaagattttaagagtttaaagctttttttttcccttgtatcagattctttttttttttttgcttaacatcaactttcatttaccaaatgattacatccaattaaaggtacataacattctcctctatcaaattggacccaaatgcaatggtttgatctagtatcccctaaaacactatcggatccagcgctacctgatcgaggaaccattgcatttttaaccacaatgagatagataatactctacaaatcagaatattatcatctctttgaccacctacatagactctaagcgacacgagaacaactactaaaacggaaaagaccaaaacctagtctggagacaaccaaacaattaaccattgaagaaaagtggaaggcacaatcgttgcattggtttccacgcttttctctctcacttgaaggcgatttcttcttctcagatctagatctttaggttcagttgctcttcactctccggtcgtagttgttcaacgtcggtccaggagtgagtctttgcgttctctccgtcaacggtggtgtggcgatttccctccgatgtggttgtggctcgagtttaggcggaggaggatactaaagtggttgtctcacggttatggacggcgtgggtgctttaggtcttcacgctcaaccgccggtctcgcgctgtgtccacggcggaagttggagggttttcggtgggttcgttgtttgctcggtggttagctgcagattcttttggatcttcgagggcggttgtgggttttgggtcttgaggtttcgggtgagctccattccttagatctgccacaatttagattccaccgaaccggatcgattcgttgaagctcaaggatcttggtttgatccggattggaggagaagggtttccgtccagtgagtcgggttgctacttcaggattcggctccgtcgatgtgttgcgtcggagcgactagctttctgggagcctggtgttggtttgttcccccgttgggtttaattcgaggccgaaacccgttctctttcgtccgaagttctcgggcatcggttgcggcctcgaaactgtagggcttgagcccgccggatctaatgctccggtctctctgctagcttccatcaacaagcggcgatcttccttctttgccgacatgttttccgatttgctaattttgtaattggatttgatgttgtttttgttgcggcccaagcccatttgggatgaggattaataatatttataaaaaataaaaaaaaaaaaacctagtctgaagtacaaagtaaatccatactattagtccctattgatcagaatgtaatccatgtcccaatagcattaccgcccggaggcgcatcatcaaaaaggctcaatatctccggctttcgttgttccggtcttaaaccaaaagcggaccatatatccgactgacccgaccaatgatacaagattgaagattctttaaaaatgggttaacacaaattctgttgcgttaagcaaaaatcagaatactctaataagaactaagtaaataatacattgattatgataatttatgacgagttgaatggaaagcaataattcaaagttttgtttcttcacttcctaaatactaacaagcaacgaagcaggaaccaaagactcaaacagctttaataacccaataaaaaaaaaagggaacagagatttttggagaaaatcaaataaatatctttctctctgcttctacaaatcccctaatcatatcatatgtttttggaaaatccataccatacatacttagaaatgtctctccctctctctctggtcactgccctgtctcagctggtttcccctcttccggctcatgttttgacgcctccttgatctcatcaccgcccgcctcatcctaaaaatcagcaacacaatcagcgtttgatagaaatttctgagtaaaagaagcttagactgcatatataagagtttatagggaaaaacaaaaggaggaagacaaaggtgtacattgatgtcagagttccaaagggtcagattgtcacggagaagttgcattatcaacgtactgtctttgtatgattcttctcctaatgtatccagctcagaaatggcctcatcaaaagcctgtcaaaacaattgagagaatatcattaagcaatttggtgctggaataagtgttacaaagtctggaagcatcataacatcccgtatgacaaaatacaaacctgttttgcgagactgcaggcacgatcaggtgagttgagaatctcgtagtagaagacagagaagttaagagcaagtcccaatctaatcggatgagtaggagctaaatcagcaagtgcaatatcctacattagaagaaaaacacacataagcattcatcatgacagctcctttactggtctcaagcagcaaaataagatagatagatgttgaaacttaaagagtttacctgagctgacttgtaagcaaccagagtgctctcagcagcttctttcctctcagctccagtcttaaactcagcaaggtacctgtggtaatctcctttcattttgaggtaaaagactttggactcggccaaagatgcagtgggaacaaggtgagaatccagaagattgagtattccatcacagattttgctgagctcagtttcgatctttcctctgtagtcctagataatggaaacatgatcatcgtttcctctgctttcttccttcggttcta

SEQ ID NO: 35047 - DNA, 2175 bp, Arabidopsis thaliana landsberg
gaaaaaagtaccatatcaaacgttttattggtttgtttgatataacggagttgttttacataatgaacaggttttgaatagacctgaagaaacagggagatttaacttttcatctcagtttccatactacaaagaagaattgtttagaccagatcttagcaaaacacgtcccggaaagcctgttgttttcgatatggacatgagcgccggagatttcctctctctcttctacctcctcaaagttccggtggataaaatcgatttgaaggtatgattttacagagatctagctaatccgtgttgcaaaactattgtgtaacaaataactcagattgcaacggttgcttattgcacaagtaactaggcttgctacacaagtaactaggtgaatatgctgttttcttcaatatcctaacaccccctctctcttgactcgcaaggctattattgtgagcccaaccggttgggctaatgcagcaacaatagacgtggtctatgatctgcttcatatgatgggtcgggacgatattccagtgggcttgggagacatgttggcattgaaccaatccgacccgatttttccaccggttggaggttgcaagtacgtcaaggctattccacgaggctgtggcggatttctggattccgacactctctacggtcttgctcgtgaccttccgagaagccctcgcaggtatgtttgtgtatatgagtaatgtgaaaatatcttaagaatatgttaatatttatacaatgctatgatacgatcagtttaagcaatatatatctacattttgatgcagatacactgcagagaattcagtgacacatggagctcccagggacactgataggcctgaactccgacaacctctggctattgaagtttggcaaaatctgaccaaatctggtaatggagtgtctaagatcactgtactaaccaatggaccgttaactaacttagccaagattatcttactcataaaaaatcatcctcactaatcaaggcaagaacaatctgacaatatatttgataaattcaattaagatcctagacttaatagatggcttctgttgtaaattgcaggaagtttacatcgtgggtggacatataaaccgtgagaaatcagacaaagggaacatattacagttccttcgaattcctacgctgaattcaatatgtttcttgatcctttagcagctaagactgttcttgaatccggtctaaacatcacactcatccctctagcaacccaacgcgagttttctttccaagcaatgcttaatagactctattcctcgacgaaaacacccgaagctcggtttgtgaaacggctgcttacaagattgcaagctcttcatcagaaacagaggagatacatgcacatggtaaagcctactcttgtcattctgtttcatcgtaagactaatatgattttggccttgattgttttcaaacacgcgaagacagaaaaacattcaagaccctcggctagttttcaaactaaccctacattgttgttacaggacatgttcttaggggaaattcttggagcaattttcttgggaggagatcacgctttattgaagccgaaaatgcgaactgagtacataaaagtgatcgctgaaggagatgaatcgaaagatggccacatattgattgacaaactgcgcggaaaacaaataaagatactcgaaagagtggatttgagaggctgctatgagagttttgcttctagactcgatgataagaaacaatctgcagtcataggaagctttgaagaacaaaggatgaaatggaacacaccaccaagttacaaacctataaccgctcgaatatttcactgaacttatggtacaaagctcttttccagagacgtttatcaacgacaataatactccaccagaagaaaaagagtgatatgttaaatggcaagacatgctactggattgacaataccaagaaacacacatattatataacctattaagtatttgactgaatctatgtgtttacattatattcttttcaggaacagtatagttttacagaactccccttagaacaaatttcatcaacgacaacaactctaagagaaactcggaaaaaaacagaaaactttgagagtaaaggcacataataagacaaagaagaggtaaaataaagtctagcaa

SEQ ID NO: 35048 - DNA, 1901 bp, Arabidopsis thaliana landsberg
  unsure (1)..(1901): unsure at all n locations
accacaacaagactaaactaacacaatcacttttttgaaacaacgaagagattgaatctttttctctttgcagacgatcatagctttaagctctccaatctctttttcacatccttttgcaagtgctttgatggtttcaatctcattttcatatctacatgctacggcctcacatgtgcgtgtttcacatgctagactctccatttcagcttccacaacatgtaaatctttctttaagctcccaatctcagcttgtatcttctcaacatcacactcaacttctttaatctcttcaaccatagctatatcggtccatttgaacaaatgtccattatcctaaaataaaaacaaacattctgttaatgctaatcattttcttctatttgtgtcttaaaccaaaagcaaaattaccacttttgaaccataaggacaacaatgaaatagtctccccggattcttcatcgtttctgaagttttaactacagatccggcaccacatctacattttataggtagtcctctctctactccacgccttttgaagttatcactcatacctataacaatttcaaaatcaaagtacttacctattgagtgagtaaacgaatgaactacaactaaaagcaacaaaataatcacttacccgagctgtatgatgaagacattggatgttaatcgctcggattcaaagaaaataaaaaacctccaaattttagggttcacactctctttctcgattaaattcagcaatggtgagaggaccatgaagcaaggctgtaagcatcccccaagtaggcgttttgtagtctttggccacgtcaccctccacgtcgattacgacttgacgggaacctaacagtgttaggcgttttgcacgtttttgtatttgttggcacaaaagatgaacttcaggtttggaatttgaattgttcaaaagtaaaggtagtttttagtgcattcaatagatacttgtatgaattcaacacagcttatatgtcggggtatgaaaaagctgatcaatattacctatgttgagatagttatttggttaatgcattcttatagtctagccaactttaatcaaattactaaagttttacgtactaacagtcatataaaagccacactattttttattttttatgtctacttttacctagtctggaagtctatctgattgtggttttgttgttggttggaagttagtgatgtccgtcacggtcttactatggatattttagaaaccttttttcccttgctggtgataacattttaaaacgtagtcatcctttttaccggctgtgtacttttttctgtaaaaaactatgcattaggctattttgaattctaatggcggggttgtatgcgatggaaaggcggttggtattcatgagcgtgattatatggatgtgtcaggaaccaacgaactcgttagtttgttaacaatatcaattatttgaaatatgataatagatcttcatgtcatttcattatcgtctaaataacgagtgaaaatatatcaggaatctaacggtaatgatgattataccagcgagggcgatcaaccaattaaggaattaactaaactggttaatgcataacttggcatattatctgataattttcataagttttctattcgttaactttatattacactgtatttataggatgttggcaaggatgccccgtctattgtttcatctacccgcgaggttgaagtttgtttttttgtttactaataatttcattatccactaatttatgttttttctaactntccatatggtactcattcgtgctttatggttgttgtgctcaggattcagatgaggtattctctaattgtttacatgctataatnttgatatcccgtaatttttgtttaactgttttccatt

SEQ ID NO: 35049 - DNA, 3872 bp, Arabidopsis thaliana landsberg
tactctgttcgtcatcgttcaaacatttttatggagttaaaacaaacatgatgctcagtttttaatccattttatagatcttgctgtcttaaatctaatgaactgatttgtcgctatatatgtgttaataactttaacaataagaattgtgttcttaaacagagttttagttatatatgagagtctttgattatatatcatgctgtcttaattaagttcaatgatgtgagaataatttagttagatattatgttatgtctaagaaaacatacacggttttttggtctattgatttttggatttttaaataacgtagttataataatgcatgtacaaaagttgttgacaaggtgaaaaaaattgtaatgactaatgatgattgattttgattatttttttgcagaggatgcaaaagtctagagactgtgtctggagttctccatcttctacttggccaacctttgaagttaaccagattgttttgtctaattttgtttattttgatgaaagatggatgtatagaagtatataggatgtagattaaaatcggtgatgtgtgtgtgtagagagaaagtaaacacacaaaaatgcaacgaagtgtagagagagagatagagagaaagaagtgtagagagagagagaggagtggtagagtgcaacgaagaacgtaaacacacaaaaatgactaacaatatctacacatggaacacaaaattaaacgccaacttaatcgtgaaagactaaacgatcgctaggtgaaatacataaaagtcgactaacgctaacttaaccgccaaagacaaattgctatacaaacacacaaaaatgagtattgccgtggaacatccacataagacgaagcgaagcaaaacaaaaatgactaaacatatcgctacacaaaacacacaaaaatgattggcggcctgactctggcattagtcggcaggcgttccaaactcggttcagacagtgtggtggcccacctggatcgggagaagttcctaacgatgtggaaacacacaaattactagtatatatctaaataggtgggccaatgtcttaggatctgtaatgtatctacagagtaccaccaatacatgatgaacttgtgatattttaatatgtttttatgatctttagatttttgtttgtctaatatgttcttaaagataaatgtaggagatgagacactttttaaaaatccaactacttttgggtgattcagcagctcttttgcagtgaaaatgagataacaagccacaagcaacttatattcccactttccagagaacagacacagtaaagtcctataacgcaaggctgtaagctatatataaaggttgagaacagcttagtttcatctctagttcatacacaacaaacacacacataaattacatattcataaaaattttaggatcagagagaatgcttagttaagaattgatgctatttagctaaactgatatgatgttgttaatgaaagcgagcaagatgatgaagcctatgatcatgttaatgatatatatacggtggattcttgcgttttctctccattactccctttgtaataataaacaagcccttcttctctgttttgatcaccattccttgtttaacctgaaaaggaaactacattcattcattatctttataatccaaaatatgtttgagattataagatacaagcccccacaaaatcaacttaggagcagctcaagacctcttgctttggtggtatggtgcagcaccgtgcgagttgagattcccgggtctttctatttgaactaccaacattatcacctggacttgatgttcctttgtaactctgtcatattagaatgaaaaacctgagaatacaggttaatactccatggaaagtactgacaaagaaaatgagtgatgtgctttaccattgcacatattgatttagcatcgctatctcactatcactgctataattaacaatgatccctgacaaagatttctttggcttgtaatcgttgcggttcaagcattatgaattcttgatcagaaaacacatcttcaaaatcccctccgttaaaatctggcaatccactccagaaatcatcatcgttgtagtcgctgagcaaagtgttaggatcaaatcacattccggggtaagagatcgtcttgttcgtttattggaacactcaaatcattcgtagtcaacccatatacactttctttacctggctgctcaacctgaaaatgcaaaagtgagtgtgagtaaaaagaatcatgtacttgagattaatgaaacatgtcagaaactagacacaccccaggagctgtgttaatagctttgatagaatcgtttgacgacctgtacttctcttgcatttcttgatcgaaaagcaaatgttgagctgcccctaagtaaggagtttgtagctgcacattcgggttgttgttgttgtattcgctgaaaaaaatgtaaatctggacctgtctgcttaacctgaatttaaagaagcaaagtaaagaaaccgctcgatactaatgagtactgaaacatttcagaaatttggactcacctcggttggtatgctagtcactttgatagtattggaatcagagaccaaagattgacttggatcacttgagttattagtattaccatttgtaatgtctgccttcttactacgcttatcaactatcttgtagagaacataggaatcctgaacaatagcgaaagctcacacacacacaaactttggcaaaatcaaaaactaagcctcaatggttctctacaaaagtcaatattttttttttttttgaatgtaatgttaaattaaactcaaaagaaaaatagcgtttgtacatcgagcgacttttgccgaaagagtttaaaaagagattttatctatttgctagttagttcccattctagattgaaaccaatattggagggccttgtcataccggcagtctccacttgcgttgattactgagattctgttccttacttgtttatcgatccgttgaaccagatgagtacccgagttaggagactccccatgtcttcgcccattcttggaggcatttgagtcattggtcttcaaggcttcgtcttgaggtttctcggtttcaccagaactggtcaaattcttctcaatatcctccttctctgtgccttgggcaggttttctgtgcttattgtcagagttgatgcctcatcccttgaagcataccaggaatagccacagtcaacacactccagctagatgcaagaacagaatcaaaatgtgattattaggatccctagatttatttgcacagagaaggaggatattgttcaaaatctttgcaggctctaactcgccattgagcagtcgtctagccagcagtgcagtgttctgcagacacaacaaaaatgaaattacaattcaacacttaggagaaacgctaaaatgatgtttacgacaacctccacacaagctcacaaatatagacaagcatattattgtttggatgtgaagtacagtaataaaccattcctaaggtattctaatttaaccatgtctcatgaaactcatatataaactgtcataaaaacggagcatacaggcacaaacattctagtatggtcacagtctaatatagtttcctgttacaaaataaaaatattcacttctcgagcatcaagatccttcccaagaacaataatattattactcaagttttaagaagaaagaaaagagaaataaaagaacgtgacgatgactgttaagaagacaagtaacaagaaaatcttcttaatacattgaatgaaaattaatacacttttggggttttaatgaacagaattactggaagtacatacaacatcacaaacataacttttggat

SEQ ID NO: 35050 - DNA, 5084 bp, Arabidopsis thaliana landsberg
ccttcctcatttcactcctgcgatggcaccgcagccctttagcgatccaaaccaagcttaatcggttcattactgtcaagctaacgaccttaaacaagcgcttcatgggaggcaacccacatggtattgtatatactttcttttccttctttcattttctttgattttagtttgtttcgctccgctgtggagtttagacttatcgactcacctgttaagtcgataaagtgtcggtatttaacaagtgctgtgagtttgtttttagtgcaaaaacccgtaagatagagatcgatcgatcccaccacgagatcgatcgatcacgacaatacacgacgagatcgaaaaaatcccgccaggatgggatcgatcgatccagggctgggatcgatcgatgtggatgagtacgtcgcagaaagaaaatgtccgccaggatgggatcgatcgatcccaccactggatcgatcgatcccaccactggatcgatcgatcccaccactggatcgatcgatccctgggcaatccaaaccgacgcgattttttaaccgaattgaaccggtcttcacttgaattgaaccggcccggcgaacacaaaaccacgggatcgagcttctcttctccattcacgatcattacttcatcttcttcatttttggtttctcaagaacaacaaaaatctctaaaacctatctcactcaatttttggtcgtttttgtcgaaattggtgtctatttcactcggatttttgccctctttccatattttctgtctgttttctcgatttgcaaaggtatgagctcgaaattcctcttttaggttccgtttttcaaaggtgaaaaatctctaattccttgaatttcatgatgtttatgggttattggatgctagattcttgtctagtatggttttgggaacctttttaaacctttaattgctgaattaaggcttaatttgaaaactgaaaattttcccttagtgaaaaaaatcgacttgttcttacaatttggaaaaaaaacgagtttgaaggcttggaacttgattattcatgacgcattgttagtttgagtaactaaaataaaatggttaagcctttgatttgtttttgagtgatttcttgacttcactttgtttcttttgataggtatgggacgcgctaaagacgctacaggcacttctcgagcacgcatgaggacttccgaggcaccgacaaacaatgatcctaacaaacgtcctgtcagaggcacatgagatggcgtggacacaaagatgctagcagccttaaagcatatcgatgtgaagccaacaatggatgctgccagatgtgatctacaggtacttttcttgtacaatgatgttgcgacaatgtttcaaacactcaggatgggacggtattggaaattggatgaagtacctgattcacaccaattccaccaagctaggaagtgaattgtaccaatttctgggcagagacggtgtcacttattattgcaagatacccaacgagcacataacgtcacttctctccgcgacgaacctagcgttcgaaccggacgagcagtaccttgttcgtaacccttcaagggcagtcactagacgacgccggactgcagcggcccaacctacagctgagcatgttgtcggtaacgataacgtttatgaggattatgctgatccggcaccttctacgcacgctcagccatacttgctgctacctgaggatccagcatcgtaccttgtttcatcaccaccagcggtgacgatatctcccagcagatggcatggatgatcgaattgacaaggaagaacaacagtatgatgcacatgatgtatagagccattttaaagatcaggccttgtgtttgcactcgcggaggaggagtggatgatggagaccgtgaacaccggtccaaggctactgaggatcgacatgctgagaggttggtccctgctgctggagcgtccacctcgcagacaccaccagagcagtccctaggccatcggttaggcaggagcaggaggcagccaggagagcagagctctagcgagagccccacccaccaccgttgagtagcgctgtaactcacacttttcccctttttattcatctttattttgatttttatcgtatctatgtggcacctttcctttgaattgttttcacaccgagtcggtgtgaagcaagtcggggggaggttgtcatttgtctactaatctagtcttttgtattgttttgctttttcttgagtcagtttgttttatcgagtcaaaatcgtgtcttttattgagtcaaaatgttgttttgagaactgtgatcttttcgaagagaattgcaccatgcttgatttgattgccttgggaccattttagcactatttgataacttggaaggtcaggaaaatctatcactagatcgcttaataataatccctatctccttgaaatttggatgaattgagctttctcttatctatttgaacttaatctggacttaatttatctcacttaggggcttgagaatcatgtaatggatcatacattcagagttttctttgcatcattttagcactctttgctaactctgaatggctagactcatttttagtctagtaccacacctgttcccccacccattgtttgaaacctcaaacattcttatattatcattatgatatgcatccatgtgcgaaaactacggagtatacggaccgacatagctttccttctgttaggatagtgagttgttgtttactggttgttcatatgtgataatatttagccactatggttttgaggttgtacatttgttatattcatgggtatgtgatgctacattggttgagttttcctgatgcagatttttgtgagacaccggttccactcccccgctctaaaaaaaccaagagaataaaaaaaaaaaaaaatcgtcaaaaaagagaaagagcgggaaaggagatcaaggaaccagatatgttgagttattattggttatattgttaagcatcataggaactcattgatttgattgggatagtatgtgttggttggtttgatccgaacttaagggaagctatgtaccacctaattggtctgtgtctcactgtgatttcgctaatgacatgcatccgtttatattgtttgagaatccgaaacactttgaaccaccatatattagcctttttgaccaagcccataacgtgttcgatacccccttggtgagagtatacgcctctgctaatgaatgttaaaagatgaagttctatgactctgaaagttcttttagatcttgggatttaattttgtcgctacggttatggcgaagtacagtctagtacgggttgatgagttttgtgatggtggtttgcaggcaattgataagagcatgacctcgaagaaaatgtgaattctcgtgttttcaaacctcttctcttgataaatatttttgtttttccttgaggacaagcaaagatccaagtcgggggaagttgatatgttgcgtttttggtatcttaggtcctttagttttgagtcgtttgtcatgtcatagtccatcttttgcgtcttttcggttgtgtcatgagtcatttgcaggttttaggagtttaagcgggacgcggatgctttcgggacttatcaggctcatttggaccagaaacaacaatgggaatggagaaactagagtctacaacattggatcgatcggtctcatcactagaacgatcgatccagtgttcatcatcaaaaaatatctgccaaatcatctgccaggacgggatcgatcgatcccatcaacggatcaatcgatccggacgtcatctgccaaacaagattctgtcccgccagctggggatcgatcgatcccaagggaggatgatcgatccaaacttctcgacgaccaaaccgattttccttaaccgagtttatctttttttattgtatttgggtattaaaacccgaggaacctacgttttcttttacgcttcttttttctgcaacatttctaaaaacctttctataagcaattttagggattagagattcatcctttttgacaatttggagaagatttctaaactctattcttaattattctatttgaatcatgttttctttcatatctctttgcttgatttctattgcaatgtctgagtaacaattgggttttagggttcaaagtaggaagtcaatgaattagtaactaaactgtcatagggaattctcatctttaggttcttcaatttatgtgttcttaatgctagaataggattgatcaccttgttttagaacttaagtttttctatgcattaaaattgttcaatagaatgcttgaacgaatataaattgaacactgtatttctagccaacaataatgaacctaattctaatgcgactttaactaggaaattataaataaaagtttagtagttaagtagtcaaagttattgattaatgttttgagagagaattagtctaaatttgtgttcatgttcgagaacggttaaatataatgaattccttgtccaatatttccattaatcattgatctttgaaataccctatggcccaatgctttttatcatataagtttaatcgtttatttttttataatttaattacaatctgaaaacccaaacaaacaacttttttgttttaggtaagaactagtctcaaaaatgcttaaaagtgtatctttggtccttgtggatcgacttcgaatatactactttttggttaagtatattgagttaattacttgagcaatcattttaaatattatattcttgtttttttcataaaaaagttatatttataaaccaattttttgcttgatcattaccacaatctactttttaaaaatttcaatccctttcaatctattttcaaattcactttgtttgatttttaaatcagtagattctacatggatttccaaatctactaaaatctaaaagaaattaaactcccctgttttttaaaaaagatatattatctctactaacgatctctcattaatatttttaaacatatcaaattacatcttaaatttattcaatcgtaataatccattatttaaatattaaaaccccata

SEQ ID NO: 35051 - DNA, 2662 bp, Arabidopsis thaliana landsberg
atatcgaattaacgtaacaagtatcgttgatataattagagtttatagagatatcaagataagactaaacaaaaacagtgtgattgctgttacagactaattatcatcatcgactcaatgttagctgtcatgaatttgacttattccttctatgatctggattgatacaacgaaatcaatcttcttttatcatcaggtaaaaaagaaagcaaacttggtaataaagaagtccaaataaacgaactataacatatggcagacaaaacctgagcgagacaattgatattagtgtttaaactaaacaaagactaacgacttgcccacttgttgtcttactatatatttgtcaacgtgaatattaacgcagcagcaagtagcatttatataattagagtatatagaggaacaacaactatattgattcattattacattaaaccaaagtgctattaccccaaacataaactttcttctctctccacctctgctaaccgcaaacgccatgactgagaatgtacgtggacacgagcatcttgtatccgtcgttaaccaaggtgatggtatggactgcgatgcttgcgatcaattgcatgttggtggctactcatgcagcgaatgcacagttaatattcacaagaaatgtgtgtatgtgttcacggcaagagagatattcgaccacccatctcatgatggacattgtcttaagcttctcacaaccgagctcctgatcacaccgatcccaaatgtcatctatgcggtaaaaacaccaaacgccttctttatcattgctctgattgcaaactcaatttggacattggttgcatagctgatcacagatctgccccattccatctgaatatgtcgtggcatcaccatcctctagtgcttggtctttcatattttgataggtgcagcttttgtcacaagattggcaacgaagacagcaagggctatcgctgccttcgttgcgggttggtgattcatacaagatgtaccttcatatttgactcaccagagatcactcaccctgcacatgttagacaccctcttaagcgtctcaccgatggagctccaaattacacagaccatagatgtcatatatgtggagaaaacactgggaacttactctatcattgtgatatttgtaagctcaacttggatatgcgttgtgcgattgaaagacctccaccagtcgctctttcaaatctcaaggtccatgagcatacactcacactcatgccaagattgatctccttcgtttgtgatgcctgtggtacgaaaggtgatcgttctccttacatgtgtgttcaatgtgatttcatgaccttccatcaaaaatgtgctcgtttaccgcgtgtcattcatgtcaatcaccatgatcaccgtgtatccttcaagtatcctcttggtcctggagaatggagatgtggagtttgttgggaagagattgattggtcatatggggcttattcatgttctctttgtcctaattatgctattcattcattgtgcgccacaaggaaagatgtgtgggatggaatagaactcgatggagtacctgaagaaattgaagacatcgagccattcaagaggaatgatgacagcacaattactcactgcgctcatcaacataacctcatgagcctcaggaaagacggtgaagaaaacagcttgtgtggagcatgtgttcgtcccatcggttcttacacattttacaaatgttcagaatcagaatgcattttcattctccatgaaatgtgtgctaatttacgtaagaagaaacgacattttctgagcccagaacctctccatcttttctgtattggaacagtctgatgactcgccaacagcttgttctgcatgtcttcaagtttgttctgaaggattcgtctatgaccatgatacatatgggacttttgacttgctatgcagttccattgatgtgccttttatccatggaagtcatcctcatcctttactctaccttaaactacaacacggtcactttaagacttgtcagagctgcggcatcgatcatactaaagtcgtcataggttgcctcaagtgcaattattttttggattttcgttgcgccactctaccattaacggttagccttcctaggtatgatgatcatcctctctcactatgctatggagaaaaatcgagcggcaaatactggtgtgatatttgtgaaagagaaacgaatccagagacttggttctacactggttcagaaagcggggtcactttgcatattttatgtgtacttggagatatcaggtatgccaaaccaggaggaaatatctgtgaggggggttttgtgctacctaacaatagttctacacgaccaatttgctacaattgtcattgtcgttgcccaggtaccttcattgttttaggttgggtcgactatgaccccgagttcttctgttctttttactgtttcaaatctcacctaaagttccattttgacgaatatcataccgtctgccctccatgggcgttagagttagaatcgaatacgagctggtagttctttttttcttttttctttttttgtcaacgtcgtacttttgttctttttgttatttgtttttataaggtggtacgtagttaatgttcgagtttggaacttatttgttatttttgttgtttttat

SEQ ID NO: 35052 - DNA, 2003 bp, Arabidopsis thaliana landsberg
ccaaatgaaattcctcatatacttaagatcatttccctttaatttttcaacaatgagcttatacatttgttagaaatcttataaagaatttgcaactctcttaattggttttacataaagcttaaactacttcaacttgtcacctgagatttcctacatacaaaaacacgatctcttatcttctggtgcgctaaaacatagtaaaccttactctcttaaaataaaaaagcttatatattacttagcacccctttttattcatgagacctctaaaccttaaaccctaacccctaccttataaatccaaattagtgattccattagtctaaatgtattataactaaaccctaactaataccttagggcatctccaatagtgatctctatattttcctctatttattgaagtgactctattttagaggcattgtgctccaatggttaattctaaaatagagtttcctctataatagagaaagaaatagagatatctactttttgtctctataaatagagatctctacatttcatctctattttttcctctatttttgagaaaactctattttagaggtgaacatttgagcaccatgtctctaaagtagactcacctctataatagagaaaaatatagatgtgatcattggagatggtttttgtaatgttataatggggtagtaaaacagtcgagttgataaaatttgtgcagaaaagtgattttagttgataaatgacgttttatttatgaattctaataattataacactatggtaagaaataggggaatcacattttcaaaatcgtaaaaacatgaaacttttattattaacaacattttgaacatttgatgaatacactaaatggtaaacaaaaaaaaaatcatgtttttaaaacatggaaaagtgaggtgtcatttcatcacaattaaaaatcatgatatacatgaatgacataaaatggaatagaatatgaaagaataaatgtaattattacttatgtttttcaacaatgagtggataatttttagatttatttctttaaaatgttaaaacacataccatgcatgttaaattgttaccaatttcgaatctaacaaaatattatgcattcatagcaccaataaacatggaaaccattaatgatataataggatatgtatgaataaaatttagtaattattgatgaaataagtcaaagttttaattatattttatttcttttaaaacatttactataaacacaaccatttggattttggagccttaattgctgggatacgaaatcctttcacgtctcttttcaaattccaaacgttcactatatattatgtggctcacacacaactaaagtaacgaaacaaagtgagacagagcaatggctgattggtctaccttaccagtggatctcctcaacatgatcgccggtcgcttgttctctaacattgaactcaaacgtttccgtagcatctgccgttcatggcgctcctccgttcccggcgccggcaagaaaaaccctttcaggacccgtcctctaatcctcctcaatcctaacccaaacaaacctctcaccgaccatcgccgacgcggcgagtttctctcacgctctgccttcttccgtgtaactctctcctcctctcctagccagggctggcttatcaaatccgacgtggacgtcagctccgggaaactccatctcctcgacccgctctctcgccttccgatggagcatttgcgcaagcgcgtcgatctttcagagttcactatcaccgagattcgagaagcttatcaggttcatgactggcgcacgagaaaagaaacaaggcctatattcaaaagagtggctcttgttaaagacaaggaaggagataatcaggttcttggaattcgcagtaccgggaagatgatgtactgggacataaaaacatggaaagccaaagaagagggttatgaattctctgacattatagttcacaaagggcaaacatacgccttggattcaattg

SEQ ID NO: 35053 - DNA, 4035 bp, Arabidopsis thaliana landsberg
  unsure (1)..(4035): unsure at all n locations
gacgtcgatgaatctcatgatttcgttgcttcggctcctactgaggacatgatcgatgatactcgctgcctcgcccgcaacccaacacttccatgcctatatattatcaccataagtttatactcaaattatcttttgagattcatttgtgtctaaagtagtaaacaagactggattttgcttacatatgcagggagcccgagggcttcgaaatagttcttgttacttcgaccggttatcatctcgagaagcacgactccgaagctgtaaacgtctgtcttgactgaaaatgttctgttcctaacgtactcgggagccatatagccactaaaacaaattcaaattagtttctgattccaagaatctcgaaaatttagggtaaaaaaaaacagagtatcttgttttgtctaaaagaatcagtaaaaacagaggatacttacaaggttccaactactctgcttgtcactgctcgagtctcatccatgttgaacaacctcgccataccaaagtctgcaactttagggttcatctccgcgtctaaaaggatattgcttgccttcaaatctctgtgaataatcctcagctgagaatcttcatggagataaagaagtcctcttgcaactccttctatgattctgtacctcacatcccatgtaagaagccaacgtttgtcttcgtctacagattttgaaagaactctttagtctgattaacaagttttgtgtacattggtcatgtaaaggcttaccaaagataaagtgatcaagacttgaattagggacatgctcgtagacaagaatctcttcatttccttcattacagaatccaagaagcttaactagattcctatgttggagtcttgtcaagagtaagacttcattcttaaactctagttctccttgtcctgaacctccagctaatctctttaccgctatctcttgcccgctcggtaatatcccctgagatcggtataagatcactgaccaaattgttatgaaccaaaaggttttaaagcaaaagcttccctttaacccaagtctctcttagagaattaggttaattgttggagcttactttctcattgatcataatagacctttatataggccttaatacaacttaatcaaaaccctaataacacttaacatagaaaggaaataatgaaaaccaaatcataaagtaaaccacaaccaaaactagttaactaaaatgtcctaaccggtggcctaatggccctaatctacctaaccatagtctcgtatcacaaagtttgataagactttacaagttttgatgaaatttcttaccttgtagacagaaccaaatccaccttgtccaagcttgttttcaggggagaattcattggttgcaattaagatcatgccaagatcaaatcttaacgtagcttgaccatcagaatcagaattctctgcacatattttaaagcttattcattcaaaacaacactccataagtttctaaacgtttactcaaaattcttgaaactattactcactattgatttcagcatatatcctcctccgcatccggccataagcaagcacgaaagcgacaaacatggcaagatttatgacggtaggaaaaacaacaaccacaacgctccatggttgaaaaactcttcctgaagaaaaggttaaggttaagtcaattcaagatttcatcaagaaaatcaattctagtacctttcttgacccgagaatcttgtcgaggttgaggaggtcgaggaggcgcgggaaccctctctaggttatcgaaagctcctgcgaatctgtaatcatcccatcggaaataacaactaggacgggcaactgttcctccaactctgtcccagttatgttcttgattatacctaacattttctctcagacaatgattacagtcactggaagataaatcaggtgtgcattgcatcaacatattaacctcaggagtgtctgtaaactctgcacttgagactccataatacttcaataccgaagactcatcagctgtggacgcaacctcaactgttcgattagccctggcggcaaactcttggctgattcgggttagattggaagaggggtcaagactcgagtgaggaacattccctattggctcaagctttagtttgccaaatctatggatatttgagtagcgtactagacaagaaacgtttgcatcgttttcggaatcccagtgatatgcttctgttttgcctcgacattgtgttaacagagtcctacttgctctatcgacgcagcgacgacaagcttgaacttcgtagtgttttcgacatagggcaagagcgtaaacttcgtctagcgaaacgctgcagaaaccacgttctcgcatgacgtttgaagcaagagaaggcaagttagtatcgaggtttacaacgtagcctgtgtttggagagaagtcttggtcgccgcagacgaaggtagtgtgaacgccattgatgttgaagagaagaaataagagaggaaaacaagggatgtggaaaagattggatctttccatttatctattaacgtttcattattaaaacctattgtttggctttaaataaacaggttttgattcgtaatattttgatcaaacacgaaaagatttttctatcatcatgtcgttttcacaagtgaaaaaatctttttcgaaaccctgactttttagggtgacgtaaggagcaaggcaaaaagacttttcttccctaaattgcgcttacgtaaacgatacgtcgaacacttcgttgtcattatgccttaagtggcatgtaaatgtcttcgatagtaacactggaaagagcgacgtcgtttccgcttccaaatagtttggaaactacaacggaatgaatatgaaacgagtcaaggcatactacgggtttcatatattgtcaaggatcaaaggacaagtgaaagtcaaattataagaccaaaaatggtttcaactttcatgactgattaaacattctcgtttaacaatgcgtcgaagacaatgggtgtgattggtgacctataaaggaatacaaggaatgaagacgaacatgaataaaaatgaacaaacaggaaaagaaaaaataataaaataggaatgaaaaggaatggtcgctgagaaaaaatagaacgaatgttactgtaaatataaccaaaacatagaacaaatagtaacaaaagttaaaaaataaataaattattttctaaataaaatattaaacgaattgagaaaaaatatcaaaaaactataacaactatgtgaaactaataacaatcacgtacttttttttctttttttctataaatttaatttttaataaactaatatttaatttatttctctatttgttcctcatcaaattttgggaatgaacaattttcttctaacattcctaaaaaaatgaggaatgattaggaatattgtgaggtgtacatgttacaatttggaaaaaaaattactagtgattggtgaaaaaaaagaggaacatgttgttcctccccattccttctctaaataatggtcaccaatcggacccttacttttggatttgatagtttaaatttagaaaaaaaaaacaaataaaaattgacaatcaatatcaaagacaagaaaattcactcatacaagtgatatacataaattcaaattcattactagtgacttcaatagttcaattattggatttaggccgcctatatgactattgaaatgaaaatctgtaatttttagaatttgaaaacttaaacaaatttttagttttttttagaaacgtttatagacgatactagaataagatagtttaaaaacacaatattttttggtagaaaaatattgaaggatatgttcagattaaaaatgatgtaccaagttgtatcaaatgtataaacattttttattaatttttatatgatagctaatttctgattattattttctttactagctatcttttttatatattaaaaatatatatatatatatatatcggnttaataatactaaatctgactggtatgtcaattaaactgaataatagcg

SEQ ID NO: 35054 - DNA, 3815 bp, Arabidopsis thaliana landsberg
gtttaaacttgcccaatgcatttcacacgaggatatttgtttcatccaaaaaatcatggcgctggactaaaaacatgtaactattgggtatgtgttaaaggagaaaattacgcggattcatctgatgaagcggatttctacggtaccttaactgatattatagaactcgagtatgatggcatcgtcaatttgaaaatcacactttttaagtgtaagtggtatgaccctgtgattggtagaggcactcggcgaagccatggtggtgttgtagacgttctatcatttaagaaatacaataaatacgagccatttattctaggtacgtaattaagaatacataaggttctttataaattattaaataattttgtatatttattaatgtataatttgagtatacagcatcccacgcagatcaagtttgttatattccgtatccatatacgaagaaaccaaagaacatttggctcaatgttttaaaagttaatccgaggggaacatttctggagaatatgaaaacaatgatccaactcttttgcaaacataaaatgatgatgatgttttgctcactacaattgaagatcttgtacttgaaaatccagtatccaacttaaacccaataatccttgattacgatgtcggggatgctgaacaagaagacgaagtccgatgtaatttatcgtcttcggacgaagatgaagtagaagatgaagatgtataaatgtgtgaatatatgtataattatttgaataaatattagaatgaattttgtttcataatatcattgaactttttatgatatatgtatatttctttcacatttataattttatcaatttaacaggtgactattatgcgactaatgggcgaccaatataagatttattgggcttctaaatgttggagtccaaacccattaaaaacggtgacaaaacgacgactattacgcgacacatgtttgatatgttggggcttttaaatttcgaggcccaaacccattattataggcgtccatatatgcgactaaatacctacacatgtttgatatgatgggctttaaaattttgaggcccaaacccattagtataggcgtctatattgcgactaaataccgagacaagtttgttttgtgggcttcttaatttcggggcccaaacccattattatcggcgataatattgcgagtattggccgacagatgtttggtattttgggcttctaaatgttgaagcccaaacccagtaatattttatgacaaagatgcgactatgttccgacaagttttgatttgtttggctttgaaattttgaaacccaaacccagtataattggcgacaaaattacgactattcaacggtacttttttgattagttgggcttcaaaatttcgaggcccaaacctaatgaatatgcgacaattatgcgactattatgcgacttctattgtgttgaaaaccctaaatcgagtcatttctcttcgagccaaacacttagccatttcttcttcttgttcttcttcttcgtctcgaaaaccctaatccccaattctctttctaagatcgatcctttctccttctagatcgatcttcttcttcttctgctaagatcgatcgatcttcttcgatctctcaccttaaacctattcgatccaacctcctcttcttcttcttcttcatctcgaaaaccctaatccccagaactctttctaagatcgatcctttctccttgtagatcgatcttcttcttcttcttataagatcgatcgatcttcttcgatctctcaccttcaacctctccgatctgcttcgtcttcttcttcttcttctcttcaatctcttcatttggctcactatcatgcctatcgccggtcgaggtggctcccggaagcgtaagacgacgccgaacgtcacttagagagccggcgccggcggatcaagacctgcaaatcttcctccccaatacaacttcactccggcgccggcggttcaagttcctgcgacggagtcagctcaacaacatggaccttcaacgtctgcacccaacgtccgcaactatccaccgcctctgcaactcttccagaactcaacgactcaaccacaacatcaagctcctccgcctctatctgaagaggtccacttattcagcttccattcttcgtgatacataatttattctacctaaagaaaatcctcttaatcgcggatttcattgcttattcttaccatctcaagtataatgtgctggaatctctgaatatgtgagggtctttgctaaatcatcgtggctattcaaatacaaccaagcagtaaactgataatcttcatttgcttttttttttccaaaacatcttatttatctttatcctcatcgaaacaacacgggtgatttccttctttgtggaaagaaagcttatgcaccagtgtatttctaaattgaattggaaatttaaaaatcctctatattgcttttgaaacagatacaaatctgcaaaggattacaaaaacaaagaaattttaatagaaaacatccttgttataaattatataacaaattgtttcttgcttatataaatataaacaaacctggaatcaaagtaatccttaatttcattcttctttggcttatcttatttaggaatgttctctgtatttgaagtttgactcttgtttatacgctcaacaaccacaacaacacgatcaggtcttttattaatgtacgtgagtaagtatttgatagaacctgtttgattacaccattccatattgatatgagctcgatatcgcaacgatagcttcgcattggaaggcacaacatacctattgtcacacttaaaaccacacttttcaacaaagtctgacgtctgcgtcctcctataaatcggaaaaccatctttgcctactttagtcaattttgcataaggcttaggatacaattttgaacactttccatctaccatatatggggaattcgtaaacgctgcaccacaaggtccgtggatcattgactctttgatgacctcataaagctccagatttttctctttgttgggtatttcagcacaaatgatcctgttaatatcatcagaagacggtagcttactcctagatgccatgaataaaagtatatgagcatgtggaagacctcttttttgaaactcaacgttgtagatagctgaatcaaaaacattaacatctttacattcaaagatattttaaacatatatatatatatatatatatactactaaaataaatactataataattaacttaccagcaacagttttgcctagaagatgtttttcagttaaatcaaacattagagaatctagcttaatcttgaagatacaacatataatatttggtcgatcatcaggattcaaaccacgctcttcataatacctagtgatctctggctatttaggattacacgtaaaagtgatgaaaagatctgggaaaccatagtgcttacatatggccattacatcgtaatattgttgtaccatatatcgagggccatcggtgaatgaggaaggaataagcaaaggtcttccctgttcattcattttcttgtttccagcagcaaccgcttctttgatgttactgaatttctcacaacgtagttttgattgattgaatttaatataagacaacctattagcttcagttgctgaatatccatcaaccaaaaactgctgaaacaatctcctacacagaagaagagtatggctttcatgctccctttcctgaatccgaaaagcaaaccattgtctcatactgattgacttaaacttgctggttttgcttttgccagta

SEQ ID NO: 35055 - DNA, 2132 bp, Arabidopsis thaliana landsberg
atgggcacaaagtctataacaaaaccaattataacagatttatttctgtttatatatacgttttcggaaaagctaaaactaaggttttttaatcaatttctcttcggtcttgacagtaccgctttattagcagtaaccccgccatcaacgaggttaaaatgcctagtcttgccttgactgtcttcgttggaaaagtaataaggaggaaagtaagtgggagcagctgatgtgccgatgcatatgtccgataccttgacgtccaagctaggatcagtcaacgccttcaaacaaaaagtgaactaatcaacaacttgtaaattaggttgaaccaagaactttagattttagtatatacatgtgtgtagtgttaggaatagagacctggtagaggagaaaatagtgggttgaagtttcttgatatcgaaggtaggtataacaatgtttgtgagggtctggtgaagtcttgtctctccaagaagcttactcagaagatttcgcagatactttccgctgtactttggaccagacagaagctttggaagcttcggtaacagagcaagcacgcctctgcatttttcattagaatgttttttcaattgttacgttggaatttctttaatttatatgccaattgttcattaggaaaaaacaaacaattatatgagacaccaaaatactggttgatttattccttaaaaaaatttaaataacgtttactattttcgaaattgtgaacataaagtttttctattctaaacagaaatacaagtgtctaattattattgtttttgtaattagtgtgtatatagagaaatagaatttctttacgtgggctggggaaatatcttgggacaatgttcaaggtaaaacggcacaatgtctttagccgcgaaatgaggtcgaccggtctcgtccggtacagtcaacatcgccgtcacaagaccaccggtgctagttccagctatcacgtcgaagtaatccgcaagcctcgcctcttctccatcgagttcctatgtataccgagaaagtttaatttttcaagaaaataactacaagaagaaagatgttgtttaattactctatagtaaagatcaaatatgaattcgtgatcataaatcgatgcagggacttaataactactaagtataaaattcgcatggcgagttatatatgatatatcccttcttatctactagctagtaatttgcattctactattaaacctgaagttgtttttcgagaaaggcaaggattactccggcgatgattcctctgactccaccaccatcaaggctgaggatggttacgagtgatccgcacgatggcggcttgtttttcttggagggcgatttgttctccataatagttgatcgatcttcttttgagttaagattataaatcgagattttggtaaagttttggatatagaggtcaagatatataaatgcacaatttcgtatagatttaattaaaaaaacgaaaaaaatatttggttagacttttcttcatacatttcgtacgaataaggattatatatatagctagtatatattttcctttgaatagataatttatagtaaggaacaaaatcaattatgtcgtcgaccttgagctgtcataagcttaattaattaatttacgagacaattattttctttcgtggactttgaaataaccaaccacacagccaagcgagttttgcgttcaaaagtttcaaaaactgatgagtttggatattttggatttgctgtgacacatttcccttctgaatccactatttatacttgttctaaagacatctgtcaattgactgataagatctcaagatttgcttttatcgcttttcctctcttttatagctagagtctcttatgttgttaacattataaaacctattaataggaatcacttagtctcgtgtcttaattaataaaaaactaaaaactaacacgtgaaatattatctttgtcagcggaatattgtagctttcagaaaaactgtggtttctctgcatgcactatcaacagaatagtatatgtaaaaactgtttgttggctttgagtcatttttaaaattttgcgttaataagcgaacaaagcacaaagcatttaatatgaatttcatatagcatg

SEQ ID NO: 35056 - DNA, 2450 bp, Arabidopsis thaliana landsberg
aacggtggtgtttttgataaactgaggaaaatttctgttttgaaaaactttaaaagtaagggtaggatgaggcaagttcgtagcaaatgacaaattcgatattcaataacacagagctattctagcaaccaaactgaggtcttacatctatgcatattattgagtcaaataattagatgattatcctctttgtttgctcctttttttattactttatttttaggtcaagtttgaagttgggtactcacaaaaataccttttttttttgtcatctggattatattagaaaattaaaagtttcagaatatgaaaccaccaattacaaggctaaactaaaccaaagtgaagcgaacaagttagcctaccacaagacccaactccaacatattcaaaagtggtctaaacaaaaaagaataagctctgaaccatcgagcaccacataagccaaaccctccatatacaaaccattgatctcaaacactgagcatcaacaccaaaacgacttctcactatcaaacagaatacaaacctctttcttcaacaaacacaccattcatccaataaggatgccccacagccacataggattgagaccgagacgcctccgtaacactttgggcgatgaggtttgctcctctgtttgcagcagaaaattccaattccaccttccacaccaaaaaaggtaactatgatctatttaaagccacactctgagctttaaaagaaggccacgcccttggtctcaacactgcaccaatcagagacttatcttgaaaggcaaagataatattatcaattttatgactggccatactctccatagcccataggagacatctgagcaaagcatcagccttgctagagataggagcaaaagaacgtctactgtgtaacaacactataccatcctgatctcttaaaacccaagcccctccagcaaaattgtttcttttttaccaagaagccccaatgttacatttaacccaattcgctggaggtttaatccataaattctccgatacactgcctacaaaatgaacaccattactcaggggaggattaagggcagaaccctcaccatctaagcattgagcttcaaaccattccaccacatcatccctaatctttatcactgtatcagtagctgggtagcttatcccctcaaagatgaaagagttcctatttttccaaatcctccacaaaatccatggaaaaattttcctgaggttaataggccattctttattatctttgttctccaagagatgattgatgttggaataaatagagccgttactaaaaccatcaggaggaaaaggataatcagaaagagcccaaatttgtctagagagtgggcatagaaacaaggtatgattcgtcgattccccaagctcaccacagacctgacatgtggtatcaacgacattcctctaccattcaagttctcggcaaccggaagaataccactaagcaccttccaaagaaaaatcttaatctttggatcagtctgaaggttccacacctgagttttcaaccctagagtagaaggctgcatagagacttcgcttctcagattttggctctttgtttgataagctaaccaataggcagacttgacagaaaaatctccacttttatttaacttccaaacgaaaaaatctgcttgagatatcactggtttaatagctttaattctgagaatgtcttctggcaggaataagtcatgaagaacctcttcatcccaaaaccccgttcttggttttaacaaggctttaacttttaaagtcacatcatatatcaggttttttctccaaggggccctaaaaccattatcatctatccagggatctatccatacaaactaagaggcaccatcacctacccttttttgaagacctttagacaaaagctctctgccaaaaagaatgcttctccaaccaaaggaaggtctctgactcaaagcggcatccagaaaatcagtagcatcaaaatatctacttttcaacaacctagaaaggaggcaatccgggaaatgaagcagcctccacgcttgcttcgctagaagagcctggttgaaagactggatatcacgaaaccccaaaccaccactatcttttggtaaacacagcctttcccaactttgccaatgaatcttccttgaatgatcacaagaatcccaccaaaaagatgccattgcactctccaaattttcacaagtagtaatgggaagcttgaaacacgacatagcgaaaaccggcatcgcttaagcaacagatttaagtaatacctctttacccccctgtgaaaggcatctggtgaaccaaacatccagtttctcttttaatctatccttcaagtaatgcaacatatcaacctttgacccactaaagcattctggaagccccagataggtcccaggcccaccctcagtgaaaattcccaaacaagtc

SEQ ID NO: 35057 - DNA, 1157 bp, Arabidopsis thaliana landsberg
accacaaactgttttccattttttttgtctccatccatatagtattgaaaactactttctagcatatcaatcctctttaaacagctcaactcaagttataagaaatagtagagcaattggtatttcgaaatacagagaaatttatttcgttgtcaataccattgtgtttgttgtgtttttgttttatagtgaatgcttggaaatctaaaaaatttgttgtttagctagatcaagtaaagtaatttattgcaagagtataagctttcctctcaataattgcattgaaaaacatttggattcaatgcagctacatatattaaataaaattgttcaatggagacacaaatgcatttgtgcaattccatgtgatgcagtaaaaaaaaaaatcacactcccaaaatatctctctctacagcacaagtcaacaacacaatattcacagtcacaagctatatgccttttcttatttatagcttcatctagattctgttcaattttttttcatttgttattgcattcttgattacttctgtctaaaagattcacaatcaattagaacttgtttagtaggtggaacttaaaaaccattattagttaacttatcaagaacggaatcaaactagtgcatccattcaaatgacaaatgtaacaatttgtcaaaacatgtgattcaatattttacactaaaatgcattgaaataacaaagtggaacaaaaggaaaaagaagaaaaacccgtgatatgattcatgcaatcataagttgaacataaacagtaaaacttaacaatacaaaggcaaatgtgacataactacacaaggaacaattttaactctttttgataatcttgtcccctctctcatatcatcaatgcttcttcaaccacatccactctgtttttcataatctctctctctctctctctctctctctctctctctctctctctcacacacacacacactcacacaaaactcattaatccactgaaacaatcactattcattctctttccttaagtgtcaaactcttgaaaaaactactttgaaggaaaaaatgtctaagaagaagaaaggcagcaacaactttaagcttctctgtttcttcctgtttttgggtggtctggttcaaacagatgcttcttttggagtaagaggc

SEQ ID NO: 35058 - DNA, 4631 bp, Arabidopsis thaliana landsberg
gaaaagctaaaacttctaaaatctggttttctatttcttaggaaatctacattttgtaaaattatgaatgagtaattatttggtttttcaaaatctaaaaactattccaaaaattgcagacattcaaggccttatccaaaaatatacggttaattttaactaaactccaacaaaatttgaatttcatacctaaactttatttaatatctaattcgatatcgtaattaaccggtacagatgcgaatcaactgacatatgtttaatagtatggcttaaaacgacatcgggtggcttgcttaagttaacgtttgaatttttctacaaaaatcgggtctcgacaaatcgatatatttcgtaaacgagtgaaacgatgcgggtttgagatccgagttttgcagaataattcaaactttaacacgggtttttggccaaaacaaaaggggtgagggtaataataaaaaatgaaatctagcctctaggccacaaatatacatttgtccatcttttgcataatggataagagtacgacaaaacattgtggatatttattttctcccaaaagcattcttcttttaatttagtccattttatagttttttgtggtggccgttatttaaaatccagtccagaaagaaacaatgttgcattgattgatccaaggaaggagcaaagtagaggatttaacaatggcgtctctttctctcagttctgctcatttctcttcaacttcttcttcatctcgctcctctatatccacttcatcgctttctccgtcgtcaacttctctccctctcttacaatcaccgatccgccgccgttaccgctccctccgccgccgtctctccttctccgtcattccccgtcggacttctcgctccttctccacttccaattctcaggtacttcttcttacttaccttgttctcttcaaattactgatccaatccgtttcctcaaatgtgcttaattttacacaattcatgaccaattcggaatctgtagatggagaattactgtaatgtgttttgtatccgtttgtgaattgtgattgtatagattaggtgttcgataaatgagccgttgaaggtgatgatttcgggtgcaccggcttcaggaaaaggcactcaatgtgagctcattgttcacaaggtaatattatccactcttctctatcgggttcttgttttgagctcattgttcacaaggtaatttttttatactctttcatgatctcttttctggttgtcttatgggttctgactcatggtagattctctcttgagtgcggtgaagaatggatatgcatttaaaattatctagtatactgaacaatgcatataaaacgtttgctgtgactcataaaatcttatttgccatccaaaggttgctgaattttccttgatctttggactgttcattaaattattgcaataatcacagtttctagtacgtttgatgtaaggaagactatctatgttgccattgtttgtatgtcttgatttatatcaagtttctctttcttggtcatgcagtttggtttggtgcacatatcaacaggggatctattgagagcagaggtgtcatctgggacagatattggaaagagagcaaaagagttcatgaactcgggtagtttggttcctgatgagattgttatagcggtactgattttacttacctgtttcatgcattattttataatattactctgatatctactacctttctagatggtggctggaagattatcacgtgaagatgctaaagagcatggatggcttcttgatggatttccacggagttttgcccaggcacaaagtctggacaaactgaacgtgaaacctgacatttttatcttactagatgtacgtgcaaattactcttattgcgtttgttatccatttcagcaataggtgttgaaaccaattttcactatcagtggctatgtttctttgcttatatgtcattcttaatgacaggttcctgatgaaattctgatcgatagatgtgttggtcgaaggttggatccagtgactggaaaaatttatcatatcaaaaattaccctcctgaatcagatgaaattaaagcaagactggttacacgcccggatgatacagaggagaaggtgaccttttggacctattatttgcttttgaattttttaactaccgtcaattgtaatctcacaagtttacttcgttgaaggtaaaagcacggctgcaaatatacaaacaaaattctgaagcgattatttcagcatactcagatgttatggtcaaggtactaggcaatttttttttggtttcccttaacctttggttcttaaagtattgcaatgccatctttgatatttgtggtttggtatcatctcattcgaacacagattgatgcaaacaggccaaaagaagtggttttcgagaagacccagactctactgtctcagatacagttaaagagaatgataaagactggcaagtagtcacacatttatatatatatgtatattttcatggtgccgttcttgatagcagggtcagtgttttccagttcaagatgagtttccccaatctttgtaatcttaacttttatcttgttctattctaggttatttagaaaataccttgttcagtaatttgtctctttgcttccataggaaataccatcttttggttgttattagaattttgattctggtattctaaacaataatcttggttaaactttatggacacatgtaacatagaaagggagattcaggaactcccctagtgtgtttgaagattttattgtcaatcattatgttttaggactaaatttttccttttacttcttgtttaactttgatttgatgaccactgtatgcatgcgacgctaattctgaaacaggtccttgcagataaagcatctcctgttcaggtccttgaataatacttttctttgaagctatcaagtagctggaagtaaattgggagatattcttatctttgtcatgtaacatttctttcaggataaatggagaggaataccgacgagattgaataacattccacattcgagggatatcagggcttatttttatgaagatgtgctgcaagccacaattagatctatcaaggatggtaacacccgtcttcgggtgaggctaatccacacaatctatttgcaatgtcgcatgttatgtcatctttattttgcaattcctaaagcagctgcttgacgggactgatactgttacaaatgaataggtggacattaatatccctgagctaaatccggaaatggtcagttattcatttcactaactgttttatacgatttctaaagcttcataagttgtaccaaaaagcaagctattgtgataaataggatgtttaccggataggaaccttgatggaacttgttcgagctttagctttatcattcgctgacgatggaaaaagagtgaaggtatacatggtttggaagacttaagtgatgtcacatgaatacagtttcacaaatcttgttcattcagcttttttcctcttccaggtttgtgttcagggatcaatgggggaaggtgcactcgctgggatgccattgcagttggcaggcactcgaaagattttagaatatatggactggggtgatgatgaaactttgggaactttcgtcaagcttggtgcaattggtaaatatccaaaaccaaatacttttcaaagatgtattgacaaaaccatgtttaacactagaaatactcagatacctcttgactttggtgtcttctggctttagtaactagagaatctctcaacttacaaaaactgcaccatcaacagaatattgttgtgtcaataatcaaacttgtgatgcataataaagttggatacattgaattacacattattctgctctttgattatgtgtttgcaatgacaggtggtaaagaagttgatgaagaagatgacatgttcatcttagtggctccacaaaatgccgttggaaactgtattatagatgtgaggagctaggaatgcttgaattcgttattcatttgaacttatcgacctcattttatagaatataccggattcgtttgttaggatctacaagcgatgactactgctgctgggaaaaggccagttgtacttatcaatcctcgcctcaaggtacattttctgcttgcacttttttatatagagacaatgggtaacaatgtgatctatattgtgagttacatgtttcatataccttattatttcaggacttgcccgcttcgagtggcataatgcaagtaagcacacaaagtgattctttacccatccaataagaagattatgttgcttataatttccttggtgtctcagacaatgggcagggagcaaaggctggaatatgctttgacgtttgacaactgctatgtattccggcttctctattatttgggaacacaatacccgattatgggcgctctaaggtacagttgttgggttatgaagtagagaaacaactatcaatgtcaattcattctgaatgtttgacctgaatttggtcaggatgtcttatcccccccggtatgagctttataagagagtgaacgaggaaaatggaaaggagaaatatgtcttgctagcaacgtacgctgagaggc

SEQ ID NO: 35059 - DNA, 3147 bp, Arabidopsis thaliana landsberg
  unsure (1)..(3147): unsure at all n locations
tccaaggcctgcaattccacgttcatatgctaggctttacttatggaaaatatgcttagcagatatttatggtgttaggatcttatcgtcaccgtaacataattcaggctttgcttagcatctgttctttcaatgctttcttcagtagaatatggtggcaaggatactatttcccacccccatgagttgttacgatcaacttccggagttgacgggaattccccagtgagtgtatgcatttcgcctggtgaaaggttttcaacttcttcagaggcatctacatctgatgccaacagcccgtcgagggaatctacagagattctgccacaggcaacaaatgcaatagtgacttcgaatcggttaaatttaaatggaatttcaatgttccaagggtacgtgtactttgtattacagatacaaattccccatactagtagatatgtaaaatcttaatactatgaatatgtgaaactgaagcaatacaataatctctatacactactacttcttgtcaagttttcagcatttgggtgattgatctattttaattcaatcaggctcattgagcgggcacggaggactgttcgtggctcggcagatgacataggatggttacagcgtgccccggagatgcctcctgttgaagatggaactgataggttcaataaaattctggaagacatcgggtatgaattggttgtagttgcatgttttgtgtgctttgtggccttttcaatatgctgtttaacatcctgttttttactaaatggctgcgttgatctggtttttatatccaggcatggtgtacacaggcttccaaatacagtggtgtacttattggttccaggtagcaattcttattctttgctgccagccacttaaactacattactgtatattaggactctcaaaattagttgaattttttttaggtcttttcagcaatcatggacctctatattttgtggatacgaaaacgaaattctcaaagatgggtttggcgtgtcatattgcgaagattcacagcgaggtaatcataactaactcaacttagtacagttacatttggtgtatagcatactaatatatggagaaatgtttatatatcagtcctcggttgagaaaaatgcgagagagataaaggaatacatagaggaactctgttggggatctaataagcgggttctacttcttgggcatagcaaaggaggcatagatgcagctgctgctttatcactatactggcctgaactaaaggataaggtcgctgggttggtactggcgcagagtccatatggtggaagcccaatagctacagatatcctccgtgaaggacaactaggtgattacgtcaatttgagaaagatgatggagattctaatctccaaagtcataaaggtttgcaacattcctgatctaacaaagtcatttcagttgcattatatcagcttcttgtgattgcctgttaaaatccttagttaggtggaaccgagaaactagggataaaccaaaacttattttgtttctggattctattgctctgctgatctttctgatgaattccttggaacattgtgaagggtgacattcaagcattggaagatttaacatacgagagaagaaaagaattcttggagaatcatccgcttccccgagaactccccacggtttcattccgcacagaagctagcattagcccagcggttctatccactttatcacacgtagcacacgctgaacttcctctgacaaaccaagccgcaaaactgccagtggtaatgccacttggtgctgcaatggctgcttgcgctcagctacttcaagtcagatacggtgaaaagagtgacgggctagtgacttgctgtgacaaagaggatactggttctgtggttgttagacccaaacggtaaactagaccatgcctggatggtgtactcttccttgaacgaggttcctttaaaagctgatgctgctcaagtttgtgaagcgctcttaactttgcttgtccnagttgagcaagagaggcaacaaaaactcgcaacaaaaatcgattgataaaccaaattgttttatttctactttcgtcttgagacttcaaattactgtatttgtttctatctttttgttttatttcttactaatttactatcaggtttgaatcacacgataacaaaaaaattattacaaacggtagattttatatttataagactacttaatttgcttctttttttttcttttattgttgattaatttttatcagaagattagttatgtttttctctctattcctttaacgaaccgtgatcgtgcggctcggatcgttggagattctatggacggccgatgcttatatcctgtaagtggaatatgtaatttcccgaagtgccctccagatgttcacaataatacgccatcgtactcgaattaacttcaactctctcttctctctctctttcttttcactcttgtttttgtttctgagagtgctgtgtgtgttctcggtttgtaatatctaagtcgcacaaagatcagacaaagtctgtttgcgtttgatagcattagagtctcgatcgaatttggaagacctgtgagattagggtttctttttgtttgtttttttttattccgaaggagagctgcggagcaattggaattgcctcggttaaagcaatcacgtagctttggatcgtttagggttttctcattgggtttgggggatttgtattcgagcttcctcaaactcaatctgatggtgatgtgagacaaggcttaatcctgttaattggcgattctagggtttttcaatggcgagcacaggcgagcctgaccgtaaaaggcgtcactttagctccatatcaccttctgaagctgcagccgccgtaaagaaacagcctttcttttggccctcctccgaggacaaggtttctttcttcttcatctcccccttgtgcatgccctttacatctattctcttacttatccaatcaatcatagctttccagctattagagattcatatactgaatgtcttttgtctcgaatttggtctattttggaattgggattctctctcttaaggagtttgttntcgtttgatacagcttgatactgcagttcttcagttccaaaatcttaagctatcac

SEQ ID NO: 35060 - DNA, 8266 bp, Arabidopsis thaliana landsberg
  unsure (1)..(8266): unsure at all n locations
tatcgttgatctatacttccatggacttgccgatgagatctttgaacatcctgttcactaagcgttggtaagttgcacccgcattttttaacccgaaaggcattactttgtagctatacgtccctcgtttggtgataatagatgttttttcctggtcatccggattcatcataatttgattatacccagaaaatgnnnnnnnnnnnnnnnnnnnnnnnnnnnnnnnnnnnnnnnntacgagtagttcgatgtggagaagtgggaagcagtcctttgggcatgctttgttgaggtcagtgaattgaacacaaacacgccatttgccattctttttcttaaccactacggaatttgagagccagtcggggtatttgacttcgcgaattaaacctgcctcgaaaagtctaataacttcggcatttactgcttcttcgcgatctgggccaacctttcgacgtttttgtttgactagtttaaaggttggatctacgttcagctcgtgcgagatcacctttgtactattttggtcatttccccgacagtctaggcgaaagtgcttttatttttctcgagaaattggattagtttacttcggaaattttcgcctaggttggccccgatgctaacaggttgatctggatgctgaatgttgataaccactttttccacgagggtatctccgactattttgatcgggttcagagctgcctcaagctgtggttgctatttgattttgagcttgtgcccaatcatgtagcacatcctcgaagtgcgctgactcccaagaatttgcttaactccaattggatttgggaatttgacgcattgatgataagttgatgggactgccttcatttcgtagagccacggagtcctgagaatcatgttgtatgcaattggatggtcgaaaacggtgaatttgatcatcttaacaactccttgtgcagtgacggggagcgttattgtgccaagtcacatcgaagtcttgcttgtgaaggagacaagtgggcttggggcacctcttatatcattcttcaaaatccccattcgcacgagggtatcgagaaaaatcaggtccactgaacttccggtatcgatgagtaccctttgtgcttcgcagttcgctatatccaacataattacaaggacatcatcgtgagctttgttcaagtcactggtctcttcctcggaaaagataatttcgggcctgtcagcttggcttgcttttgtatttttcgctacctttccactcgtgctgcttactcgaactaatagagtaacgagaaagtttcgatcctcccataatcactttgaccattttcttagggcctttggaggtttcggaagtggattcactcttctgcttcatatgctgcttgtgcctgctcgattgttgtgacattgacttcgggaatttcccctgatgcgtacttggcagccaaaagtcttcccagagctttgcaatccttggtggcgtgaccattcattttgtgaatatcacaataagcgtttgggtctctgatccatttattactcggaaaagccgtttttgcccttcggagagaaaggcggtttagatggagaagcttttggagaagcctttggcgattctttatctaccgagaaagttcctgctgcgggcttttggagttcggccgggtttttcggaacagggggaggagaagactttggagagcatcttgaattgtttatggttggttgacagttaatgactcgcagaaacgtgactcataccacaatccattcttgagagcggactgagctgccgagtcagatagaccaggtaactgcaccattatttccttaaaagcgatgatataagtccgaagaggctcatccgcggactgagagagattccaaagctgggcttttgtgacctcgtttttgatgaagtatccgtactgcttaatgaaagcggtggagagctgcttgaagttatcgattgaaccttcttcaagctgggtgaaccaggtgagagctggccctgacaagttccggcatcttcctcatgcggttcgagtggacccgacccgcgattacttgaaaagatgttaaatgctcctttagatctccctttccattgtagcaggggagcttaaagtctcggaagtctcgaattcgaaatctcgagatccttggagtaaaaggtgttcgtcgagttgcttcggtcaccctatcgactttgggagctgatgtggtagctcggtgaactttggcgttcatagcccaaatttgatctttgagagtctgaagctctgtattgaaaacatctgactcctgggtgactatgagctcgggagtctgactgaaggctctactagaaacaatgatggagtctgggccgctactccatccacaggaatgtcaggatttgccgggatagtcagaacagccgggttttggttcgaggtggttccaattttgattggagagacacaaggtaattgagggggcgcagtctgctgatttgctcccgcctgcgaagtttggatgctaggattgatgtctccttgaaaatcgaggagtgctcggactccagcggtgcgcgatgctctgacatacagaaagtcaactcgatcctcgtatgcattaagagctgtcctaatttcacaatgactggtggtgagcgctgcgagctgtccgtcgcactactcctgaaaagaaacgaacttatcagataaagaggttactgcggtctgttgtcgcttggtcttttcggagagttcttgaagtagattcttgatatcgtcaagggtggaggcttggtcgccggaactttgactgtcgccggtgctcatggtgattcaacctgagctctgaagtaaaagatttaattaccctccttctaccgccaaattgtggatgtcagaatccgcaattaaaatcttgtggatgcttcgaggatcttaagacttgttagatgaacaatgatcaatcggaaaaaagtgtgtttatttttctatagtttctgtgttaatccctccgtactgatcccagtcatctcaccgactgtccaagcgaacgttgctctatttgttctgagaaaaagaattaatttgcttcggaaatcctcgcccagattagccccgatgccaacaagttgatccgggtgatcgtcgtttataactacccgctctacgaggtcgtcgcccacttttttgatcggattcggggacgcctcgagctgtggttgctatttgattttgagtttatgtccggtcatgtagcacattctagatgtgtgctgacttcccaggacttgtccgactccggacggagttggaaacttaacacattggtgataagtcgacggtactgccttcatctcgtacagccagggagttccgagaatcacgttgtatgcggcaggtcggtcaaaaactgtgaactcaaccatcttgacaactccttgcgcggtaacaggaagcattatagggccaagagacatcgaagtttcgctggtgaaagacacgagtggactcggggttccttttacatcctgttttgagaatcccatccgcagcaaagtgtcgagaaaaatcaaatcgaccgagctcccagtgtcgataagaatcctctgtacttcgcaattcgcaatgtcaagagttattactagagcatcgtcgtgcggtttgtccagatcgctggtctcttcctcggaaaaggatatttctgggcaatcagttcgacccgtctttggtttctttgcaaccggagtgacagatcttctctcgtgtggcttgatcgcgctaatagaatcacgaaaaagttttgaacctcccataatcaccttgaccattttcttcggacctttaggaactacgggagctggatcacttttctgctttttgctcggaggtgaagcgtctcctgactctgaaacttcgttcgcggtctgagccaaatcgattgttgtaatgtccacttcggaaatttctcccgaagcatacttcgctgccaaaagcctgcctaaagctttgcaatccttggttgcgtgaccgttcatcttatgaatatcacaatatgcattcggatctcggacccatttgttgctcggtaatgcaccgtttttgcccttaggagagaaagggggtttggacggcgaagctttaggagaagacttcggtgactctttctcaacggaaaaagttcctgctgcgggctttcggagttcggcaggtttcttggtagttgcgggctgagatacctttggtgcagcatttggagcactgatttttttagctagaaaagctcgttcttcttctgcatttatccagttcgttgctcgatgaagtgcatcttggattgtctcaggtcgatttaccgtcaaggactcgcggaaacgtgactcgtgccaaaggccattcttgagcgcggactgagctgctgagtcggacaagctaggaatttgaaccatgatttctttgaacgcagtaatatacgtccgaagtggttcgtcagcgaattgagaaagattccaaagatgggcttcagtgatgtcactcttgatgaagtatccgtactgcttaatgaaggcggttgatagttgcttaaaattatcaatcgagccttcttccagttgtgtgaaccaggtgagagcaggtccggacaaattttcagaaaacaatttgcaaagcccggcatcttcttcgtgcggttctagggggacccgtccggcgatgacttggaaggaagtcaagtgctccttcggatctccttttccactgtaaacgggaagcttgaaatctcggaattcgcggatgcgcaacttagagattcttggggtgaaaggtgttctccttgttgcttcgatgaccttatccacttcgggagccgaagtagtggcttgatggactcttgcattcatggcccagatttggtcttgaaggctttggagctccgaattgactgcgtttggctcttgtcgaggatcggagattgggattctgatggaggaatcaagcggaaacggagttcgagctattcctccatctgaaattgcggcaagtcctgctggtgaagatgaggtgacaggattctgagtcgacgtcgccccgacttcaaccggtggtggcggagtctgctggccagacgcttcctgggaattttggacgctcggactgacggtgccctggaagttgagtcgcgttcgagctccagtaatccgcgcagttcctgcagaaagtgaatcgactcgttctgcgtatgcgttgtgagccgatctgatttcggaatgattagccgctagtgctgcgagttggccgttgcattgctcttgaaaggtcacgaacttgtcggagagagacgtcacggcaagctgctgtcggtcagtcttctcggatagctgctgaagcagctgcttaatgccgtcgagggtgggggctcggtcgccggagctctgatcgtcgttgctactcatggtgactttgatcgttgttctgaagtaaaagactttatttcccctccttctagcgccaaattgtggattccgacatccacaacactatgcatgctttcagctacagatgatattacaacatcaggttcacttcaattcgaactcaaatctattgaagctgcaacaagtaattttcagaagaggaacaagcttggtcatggtggatttggtgaagtttacaaggcataatgttcttaaactttctcacctactagtttgtgttataaactaatattcaaaaatgagaaaagacattctgaaagttagtgaaagatcatacgaattgacagggaacattcccgaatggaactgaagttgctgtgaagaggttgtctaagacgtcagggcaaggtgaacaagagttcaagaacgaggtgcttcttgtagcaaagctccaacatagaaatctcgttagacttctcgggttctctgttgaaggagaagaaaagatacttgtctacgagtttgtgcacaataaaagtcttgactacttcctctttggtaatagatttatattctctatatcttagtatcttataggcatagtctaataatggctctatacattggatgtgcagaccctgtaaagaggggtcaactggattggagaaaacgttataacatcatcgggggaattactcgagggattctatatcttcatcaagattcacggctcacaatcatacatcgtgacctcaaagcgagtaacattctcttagatgctgatatgaatccgaaaatcgcggattttggaatggcaaggaatttcagagtggaccagactgaagacaatacaggaagagtagttggaacattgtaaataatcttccatttcacttacattctgtctgtcctttttcctttattttgatttctgatcaaactaaaagtgatatgtgctgtgttttgcagcggttacatgcctccagagtatgtggcgaatgggcagttctcgatgaaatctgatgtttatagtttcggagtaatgactctggagattattgttggcaaaaagagtagtagctttcaccagacagatagttcaataggcaacctggtcacatatgttagttccaaaaatccagtttattctccaacttctttttactcttttaaactgtgaccatgacctggacatttgtttcttgacaaatgacttaacaggtttggaggctttggaacaacgaatcattcttggaactcgtagacccggccatgggggagagttatgataaagatgaagtcatcagatgcatccatataagcttattgtgcgttcaagtaaatcctgcagatcggccaaccatgtccacagtatttcaaatgctcactaatacttttcttactctgcccgtgcctcagtcacctggatttgttttcagggtcagatccgagtcaaacccactagccgagagattggagcctggtccgtctactaccatgtcgtttgcttgttccattaatgatgcatcgatcacgagtgttaatcttcgttgaaattagaggttaatgatgatatgtttgtcctttcagaacacaaaactttaatagccacaattactaaaagacgtatacacattctcttaaagaagagtagtatttttttcctctgtttcttcttctttgttatctgaagtgtcatactgtcatttctgttgctgcacaatattgtgtgtacgtgtgccatgtagaggcttctataatccctagtaaacactaaccaaggtttttcgtttcggttaggttaaatggcaaagattcgaaaggcaaattttaattggtgagttaacaaatacagtatatatattactgtttagtgtttagctatcaaaaatgtgtaattaatttcacaagtttcaaaccatggcatttacaaaggttgttaataaaatttaaagagttaaaaaagcattttatcatatcacaattagaggttaagaaattaattagactgctatcttaaaccatatacatagtagctagatgatatccgagagctatcgtttagtctactttttaattttaactatggaaccaaatttttctgaaagaaaaaattagaatcgtttactttgacttattgactttgattgaggtatcgttgtcacaaaccatcttctacttcacgttattcagcagtactaatcagagagagagagagagaagaaaccttttcagtttataaatgggagctctatgatgtgaaactcaaatcaagaaactcgaaccatgtcttctctgatctctttcatgttccttttccttttctcattcctcactagcttcagtgcttctgctcaaaaaccttattacctaaatgggggatgtctaactacgacaaattactcaagtaacagcacttacttcaccaatctcaaaacacttttgtcttctctctcttcacgtaacgcctcttactccaccggattccaaaacgccacgtcaggaaaagcccccgaccgggtcaccggactttttgattgtcgtggagacctcccgccagaagtttgccataactgtgtcgcctttgccgtcaaggacaccttaattcggtgtccgaacgagagagatgtcacgctcttttatgatgagtgtacgctaagatactcgaaccttgtggtaacatctgctctagatcccacttatgtataccatgtttgtcccagctgggcaaattttcccagaagcagcacttacatgactaatctcataacccttttgtatactctctcttccccctccgcatcatactccactggattccaaaacgccacggcaggaaaacac

SEQ ID NO: 35061 - DNA, 3419 bp, Arabidopsis thaliana landsberg
caagttcctggaagtagtataatttatgttctgggattccttcattcatctgaggctgttgtttatcagattgattccaaaagtggagaggtagtggcacaaaaaagtacggtgttccctggtggattctctggcgagatttcatcagtttcaagtgataaagttgttgttcttgattcaacgaggtcaattttggttactattggcttcatagatggagatattagcttccagaagacccctatttcagatcttgttgaggattctggaacggctgagattttatcacctcttcttagcaatatgcttgctgtaaaagtcaataaacgcactatatttgtgaacgtcggtgacaaaggaaagttggaagtggtagactcattatctgatgaaacagccatgagtgattcacttccagttgcagatgatcaggaggcctttgcttcagttcatcatgaagggagcaagattcacctcatggtgaaacttgttaatgacttgaataatgtattgcttagagagaccattcagatggaccaaaataggggacgtgtccataaagttttcatgaacaactatatcaggacagacagaagtaatggatttagggcgcttattgtgatggaagatcactcactcttgttactccaacaaggagcgattgtttggagcagggaagaaggtctggcttcagtgactgatgttacgacggcagaactccctctggaaaaagatggcgtatcagtggcaaaagtggagcacactctctttgagtggcttaaggtatgagcggtcttaaacgtctggttgggttttcttaatttccgtagagttgtcttattttgttgtgtttttgatgtgttgtacttgttttctcaccctaatcagttgtttctgtttcttttggtaggggcatgtgctgaagcttaagggatccttgttgctagcaagcccagaggacgtggtagcaattcaagaattgagggtgaagagttctgggaagaacaaattgacccgtgaccataatggctttcggaaactaatcttagcacttactcgagctggaaaactttttgctctgcacactggagatgggaggattgtctggtccatgctgctaaactctccgagccaatcacaatcctgtgaacgtccaaacggtgttagcttgtaccaatggcaggtccctcatcatcacgccatggacgaaaatccctcggtgcttgtagttggcaagtgcggatcagattcaagtgcacccggtgtactttcatttgtagatgtgtacacgggaaaggagatcagctcatcagatattggtcactctgttgtgcaagttatgcctcttccaattaccgactcaaaggaacaacgtttacatctaatagctgatacagttggccacgtccacttgtatccgaaaacttcagaggctctcagcatctttcaacgcgagtttcaaaatgtatattggtacactgttgaggcagatgatggtattatcagaggacacgtaatgaagggcagttgctctggtgagactgcagatgagtactgctttacaacccgagaactttggactgttgtgtttccttcggaatcagagaaaatcatttcaacactaacacgaaaacctaatgaggtataagtcttgataatgttttttttgtcacataaatgtttaaattttttaatcatggcttacgattttttatttccaggttgttcatacacaagccaaagtcaacacagaccaagacctattgtataaatatgtatcaagaaacttactgtttgtggccaccgtttcaccaaaaggtgctggtgagattggctcagttacgccagaggagtcatcactcgtagtatacctcattgacaccatcacaggacggatactgcaccgtttgtcacatcaaggctgtcaagggccggttcatgcggtaagtcctcatgcaatttcatctcatttctttttgtcacagattcaatgcaactttcttaggcttcaaattgttttcaggtgtttagtgaaaattgggttgtttaccactatttcaatattcgagctcacaagtacgaggttacggtagttgagatctatgatcagtctagggcggtatgacttcatagttcatactcaaaaacattttttcagttgatttgatgtttgcactgcgaatttataaattttatttgcaggagaacaaaaatgtgtggaaactcattctgggaaagcacaatctaacagcacctatcacttcgtactctaggccagaggtgtttacaaagtcacagtcatacttctttgctcagtctgtgaaaaccattgcggtgacatccacagcaaagggtataacttcaaagcagcttctcattggtaccatcggggatcaggtttgtacgtttcttctcatatagagttactccatagattgaaaaaactgatactcaaaactgttgttatgaatgattagatattggcacttgataaacgatttgtggatccacgccggacacttaacccgtcccaagctgaaaaagaagaaggaattatccctctcactgatacattacccatcattcctcaggttcattcaaacccattttccttatatttgttacaactgagcaatccctggttttggttacagttagattaagtgatgtatcgattctaacgcacttgtcatattccacaggcgtatgcacacactcccacaaagtagaaggtgctaagaggcatagtaacagctccgtccaagctagagtcaacaacacacgtctttgcctatggagtggatctcttctacacaaggcttgctccttcaaagacctacgactcactaaccgacgatttcagctacgctcttctcctgatcacgattgtagcacttgttgcagccatctacatcacatgggtcctttcagagaagaaagaactaagcgaaaaatggaggtgattggaaccgtaaggtttaaaatccttcctctctttgggctttttcacattgtagaatgtttatgaaccatttttcgcactcttagagaaaaaaaaccattggcttagctaaattcttgatgttaggctttggaagttgagtactttttacagactcttgctttgtgacctttgtcacattctagagttgagctgaaccttctgaatttaaagtttatagaagcctctgtttaaccttttcttttttgtaaacagaaataaattccatgttttaagacccaaatcagcctgcattttatcgtcttcagataatgattgatccaaaaaaccaaacatgtcgccattatacttaaaccctcgtcataatcgtaaattcttttgtttggggaccatcccacacacaaacatgtgattataataaatattatttaatggctttaatgcgagcaataatctt

SEQ ID NO: 35062 - DNA, 1415 bp, Arabidopsis thaliana landsberg
gctctcaattcatggctggcttaccaccacaatatgattcactagatgatacactcaagtatgggagtgggaaggataccctgacactaaatgcagtcataagttcagcatactctaaagaaattgagttgaaagaaaagggattgctgaacgtgtcaaaaccagattcagaagcattattgggtgattttaagggcagatcaaacaataagggaaataaaaggccatgtacaggaagttcaagtggaaatgggaaattccagtcaaggccaagtaacaacacaagttgttttatctgtggaaaggaagatcactggaaaagggaatgccctcaaagaaagaaacatgcagaattggctaatattgcaactgagcctccgcaacctttggtgttaactgtgagcactcaaagcacatgcaaagaatgggttatggactctggtcgtacattccatagtacatccgatagagctgtcttgtttgacttcaagaaattcaaagatagagcataacatagagatgatagtctctagcaaaactgaagactatggacggttaaaaaccagaagtctgttataatgccaaatgtgaaatcacagagcgacaatgatcagattagatgatcccgattttgttagccacatccaaagcatcataatcaggagtcaacctcacatacgccttgtttgttccatggggcctgcatacaaacatacactcatcattccatgtttacatacacccatatctaagtgaagttttagtgtttacctaatgagggtgttgactttcttggtctgaatgtcatacatcttcttgacagcatctttgatctttttcttgtcagcacggatgtcaacaatgaagactaaggtgttgttgtcttcaatctttttcatggcagattcagtagtgagagggtacttgaggatctggtaatgatccaatttgttccttggagtagcactgatctttgggtacttaggctttctaggaacggtcaatgtctttggcctgtggaaagtaacctttgtcctgatcttcttcgcaggctttttaacgatttggccagatttcattgctttcgcagctttcaaagccttagccttagggtcggctttcttggtgacatcaactgcaaaaataatggaacattaagccatttacactactggtaacaaatctcattcaaggaaagtttgatcattggcaaataacagacaaacaagcacataatcagatgaatccataacagagtaggtacgagcaagagaatataaaaaatacgaactttacagagccagataagaatcatacatttcagaaagctgtatacagtagtaagttcagtcacagtattgaataatgataaacaaagtaattacacgcaaaagagaaatagaagacgggtgtag

SEQ ID NO: 35063 - DNA, 2410 bp, Arabidopsis thaliana landsberg
aggaaaaatctgttggtaataatcagagatagcagagactattttttcttcctcataaactggtaagcccgctgatgggtcaataactgctatattgttgatggctcttctattttttatagcagcgtgaaagaaaccagagttcttatcccctagagccagccaaagattacgacttctctgcttccaaaaagcctcttctctttggtaagcactcaggagccttgtgtttatggagtcaatttcctcttgaggtgagctgttgctggacatttcatcctcaagttgttcacgaagcgtggaaatctcaacctgactgttaagatgatgttgtttactccacaatatgatggaagaacgacaagcagaaattctgtgatcaacagttgcagacaggtttgagttccatgaatccaagactaatttcttgacctcatcattatccttcagcctcctatcatatctaaagatacattttcttttcttagttttcgggtcaaaggatgtgacaaggggacgatgatccgatccttcaaagtgaagatattcactgcgacccgacgggtaagccatgatccagtcactgtttgccataagccatgcgtgtgccttttgcccctccaggatagaaatttgcccgtgtgatttagatcatagaggtcacaagaagacatcagagatctcaggtcagagaaagagccttccggtcgaggggggccaccaaccttctcagaaatgtgtatgatatcattaaagtccccagtaagaatccaagcagaagatttgaaggcagccagatcctggatttgattccagattcaactctcttagtcctgtcgggttcaccatagagaaaagttgagtaaaagcaccgacccttgactttaatctttgtgtctatgaaatgttgacatgaagagataatttaaacttccacattgtgcttcaaaaacagggcaagaccaccagatcctggggaggatggtggaaccaagtggtgagaggagtaatcaaggccatgaaggagttgtaagacattttcagacttgttttttgtttccataagaaagaacagatcaggaaaaaccgatttacggatttccatgattctctggactgtcatggggttccccaacccacaacagttccagctcaccattcttaaggaaaaggggttggcagattctgaaaatccaccttctttttcctggatacaggaatcagatcaatttttggagtagcagaggaggaagctcctagggtgcctcctgcagagaggttaatgttcttggcctgaggtttagaacttgatgaaccagggatagtttgaggcctagggggaataataagagatcccgtctttttcccagatttggagttagaagtcttactcggagaaccctgggtaaaatttctcttatgagactttgtgcctagaagttatatggcaggtttgttggcttgtcttggtagaggaggacgacctctacctcttttagtgggggcagcaggaacacactctaggtttgagcctgtagccaaagaccctggggggatttcagtactctcataagctagaagatcagagccagaagcggctgagaggataccaagagatgtggtttccatcaggtttctggtttccccttgaaaaaccctggttttccttgctgcattttctactggatcaggacaagagaggtattggactgttacatccctcaactcactcatgacttggtcttttgtaggtggaggggaagaaacttccatcccaagacttctgggatcactgccttttaaggttggaggagtaagaggatcagaggaggcaacatctctctcaagaggggggcgacaagccctggacccacttgatgacgtagcatgaagtcctgctgatgaattagatttctctcgccattggagttgctgaggtggaaaaggagcagaccctccatcctgatggtaagacttagaggaatcctgagaatgatgtctgcgttgattatctccatatctatgggagttttctctattaaaaaaacttctctgaggggagtatctgagagtagaaggggacttggatctaaccccatcctgattcaatcttctttttgcagagtttactgcctggtgagggatagcacttctctcagagcgctgagaggaactcctgggggcgatgaagttgtcttgaggaatgtagtagttccttgagcttgattttgaggcatggagggaagcagattgtacaggagaggggttcctttgtgtttcagacttctgtgcaacgccagggcagtgcttttcctcatgggtaaggcggtggccatgtcgacaatgattcttaaggatcttgtagtctagataaaccacagcttctcttgcatcgtgggagtcaacaatc

SEQ ID NO: 35064 - DNA, 4105 bp, Arabidopsis thaliana landsberg
aagaatgagagaatcattagtacaagtcgagaaagaaacaccacaacaaagagaagcattttggaaactactcaaccatttcattcagaggttggctattgtgaagatcatcaacccacttgggtttcttaagaggagcttttgtctgaggagaagaattcgaaaagcttaacgagaaatggtgagaaccaaacactggagtgtcatagactatgacctgacaatgacatgtccatgtttaagggagtcaaacactggcagcgtgtaggttcagaaaagaataaaacaagagaaagacatcatgacttacatacgtggacatcgcattgagatacaatatccccattccagtgtatatgatgcaatctagaacttgaatggaattccataattctatgctctgcagaatcatgcaccatatgaatccagtaatttctcacagaatctttcctgaaatcctctaataagccatcaaccttatgacaaccacaactgaggccactatatttgcaaggcctaacataagctccagccttgcgggacatatctttgtctcttataatctttgatacgtttccattagcattacggcttatatcataacgaccaaggagtgtaaatgctgccttgtcccgtaaagttgagggcatcttctcatttgtttcacggagtacatcctgttagaaatcacaaaagagaaacgtcgcatacactgtttatcaaaaagctagagaaaaaggattttttgttttgttgaggtggagttattacttggagcttagatccggcattggacaaggagctctcatcagagatgaaggacacaacaacgtcaagacaagaagaggaatggcaaacgaaccacccaaacaatagactgtgactcaaatcatcagttgatgcgagctgtttaggcaaccaaatcctacattttctcttcatttcagctctctgccacacaattcccaaaatgccaaacgaaagacaacaacatatcaacaagaatttgaaaaagtgaacataatacgagaaaattccaaaataaaagagagtaatttatcgatctaagaagacacaacttcaaatgtgaactagagaactatgtaagtaaagtaaaaccccagaaaaatactcgcatcgaagaagagacgatgagtagtatcaacttctacaaggcaattggcgatcggaaagatgaaccgagattcataacacaaatctgaaccctagaaattcttcaattcaacttaaatctaatcacgaaaagacgaacctcgtgtttcaggagagaaggaagtctagagtcgaaacttggttctgcaaccggaagaaagatacattccggcgacgagaccaacggcgacaaggggaagagatagatatttttcactatgggccgggcttttcttaataacgaggttcactggattaaacaaatttgaattcaaccaacactacacactttgttctttttgttacaatatagtggatttgtctaaattctcaactatgtctagaaataaactgtagaatttatttctaaaatagatttttattaatactgtactttggaaaaaagctgaggacgttattaaatgcttgaagatttcttagttaaaacatacaaacacacaaaatcttaaaagtactttgcttatttgataatccactaaaatcatatgaattttttaaaatgaattgaaataaataaatagtcgatgtggatttaaaattgttttaaaatacataaaccaatataaactttccaaaatgactacactgatgaaagctaataataagtcgatacaggttatactaagcaacactatcagagagaaaatctgtgctgtcttgttgcttcttcctcctacgagcatcaacaagcttactagaatgtgttccaagcacttcggtgatggcttttggcaaccagaagccaggccgctcaagatatggtgcgcggtcaataaccaatggttctctcaaggttacatcaatcccctgataagtccacaatgctagtgttgctgcacctttgaggccaagggataaccagccaagaccagccactgaaatgtctatgcttttcacgtcccagctatttcccgacacctgaatctccttctcttcccatgttcccaattcagacgctctgttctctccaattggtggctatacataaaagtaaaatgggttctccgttacattctgatgttgcggaaaagaggagatgcgcaagaaacaagctttacttacctgaaggcgtaaaccggaatggcccttgaatatttcttcggcattctctgtttttcctagatgcaatgaaacactatgtgatgcccatattgtaatgtatattgtttcaactgaagcagaaacgaggtctagcctgaccaggccaccaatgtgaacagactgtcctgcctgcaaatgaaagattcaacaaaatcagcttacttcttgcaataagaaattcttctacttgaagctgtataacagttcaagtaaattcttcttggaacagtgtactggtaaaaagaagctccagggtttagaacattagagattaagtcatcaattccaaaaccaaaggcttaaaaataagtaagacatagcttgccttgactctgtaactccgaggttgaacttccttccttatctctaccattttccgctcctctgaattcaatctcagggacataaggtagggatgcaaaaggccgggagtgtcatacatcttagcctttgcagacaatattccgccaattctcaatattccaagagttgttccaggaactggagcttccgtgagcctcgtgacctttgcaccatctttcttggataaggcattaatcaaagtagatttccccgcgttctgagctccaataacccacacatttcctcttggaccagccaactctttaatgtaagctaacagattcttaacaccaatatctttgcgagcactaaccatataaaccccacttagcttaggtgctcctccagccttggcacggtggcgcacccatcggtctaaccgagctggtgaaatctgtgtaggaagtaagtctacttttgttgcaacaagtacaagttttgggaggtttttgctacccttaggatcattttcagctttttgaagcacttgaaacagagacttggcagctcgtttgggaaacgaaccatcaaagtctacacaatcaacaaccatgactacaactgtagtgctggagttactcatcggtttgatcagtctagttgagatcaacctatcgaaatcaaaatcgggtaagagattctctgcagcctgattcttcacctggccataattcctcagagaatggcaacgagcacacacagtcacatcatcataattgtctttctttgcttcctctctagctatcttcttcctctctgttttggaaacccgtttcttcttctccttctcctcagtgacattaccatatccaacaccagccggagcaaaaccatccaattcaacatcattcacttccttcttttcttcccactcatctgattcccattcaaacccactctcactttcagagttgctaccttctattgcattcttgatctcatcatccatttcatcatcttccccttcctcctcctcatcagcatcatcatcaaccatttcaaacccagcaagctcatcattttccacatgttcatcaccttccaagttattcgtaatgacctttctcttctgataatatccgggtaaatctggatcattgtcctgcataaaaatcccacaacctggacaaataatcttcccatagtcctcatcttcatctcttccttcgctcatgataagattttttgatttcttcggaaaaatcgtcccgttaacactctccacgctttgaacaacttgttctttcttcacagctaaacacataaccgaaactgcacatttcttcttcttctcattactcaatcctagtcaaaagttgagtactttctcagatatccatcacgaaaaccagaaacttaaaccgaatttcaggaagatgaaatttacctgagaaaaatggaacctcgggtctgtgtatcaaccggctaacgcgaaaaattccgtctt

SEQ ID NO: 35065 - DNA, 1383 bp, Arabidopsis thaliana landsberg
tttatcatatttatatgctaaacctatgacctggggcaagttgacttttacaaatacacaggctcatcataaataagatgatattagcacgaataccgaactctgcgttcgtcctaagcgatgaaccttatacgacacctatcgaattgagtcctgaacctatcgaaatgcttactcacacctgtaaggagctaatggacacactaatagctcagccagggatgtatgcgagcttaaaaaatgctagaaccgattttaggcttacacactcccaaactaaacttgggcttcttgccttccttcactttcgggagattcagctccagaaaacttctcagctcatcgctcatgtatcctacgatttttaaggtgtaaaaacaatacaaatattaatactttattatcaagacctccagcaaaagctaaaacagaacagaataagctgattccaacagtagtaagagctcaatttctaagaattaagctctttccagcataaactataatagaagcaagtaataaagtatatggtgcaggaaactaaagagggaaagagctgtaatttagtagtgagttcaccttcagagacggcgttgatttggttaagagcatcgagtgcagactggaacgggtgaaaagcagtgagctggacgacccgcccgaaccgactaaggtccgagacggagctccgaaccgcctccgtgttctgtccaatctcatcggaaccgtgtccctcgaacaatccgtagccggagggtgattcggaaagaagataaatcttcattgtagagagaattctgtaaaaaccctagccgtctttttcaaaattgatttgaaaatcgagtatttatgcagtttccgtttcggagaagaatcagagaaattagggtttaaggttatttcgcacggaagatgatgcggctttgctcttagattaactacatgggcctggcccattaattctatcggactcaaccaaactacgcaacatacaaaagatacttacatgggccagttgtcttcatgtcaaccaaacgatagcacacaagaaaaatcctcaattgaaagatctttagtttttgtttggttaatatactttagaaattggttgaaacagatacaaattattttaagtcaaaatttttcaagtaatatattttgaagtggttgaaaatttggaaaaaaaagttgtttactaactaaccaaaacaaactaatgtatgaatggaaaaaaaaacctaatatatagtactgtctaatatttacgaaatgggctaatctagtataaaatatgtttacttcttataagagtaaaatttccttttttgttttttaaatacatcattataaaatatgtctccctattttacaatcctgagctga

SEQ ID NO: 35066 - DNA, 644 bp, Arabidopsis thaliana landsberg
atcctgttgtcaaagggtctttatagccaactaaataaagattctgacagagcaaaaggcaccaactgttaatatcttgaaccatatgattgtacactattgataatgagaccttaaacttaaccatggtgcatcttgtaccctggagagaggagaagaggccatcttgcacaagcccaatgcttaaaaatggaaaagggtattttagtcattttacgttttcgacactcggacttcctagttcctacgcctggagaatatcaatagccgccaaaggattgatcgtgcttttgcttcgtatcgtctctgggtttttaaatagagagactcgagagactctgtttgacaaaaactagggttttgagctttctgagagttttatataacttgacaaagttttgatctttcatcaccgatcaatggttggtacgaagagagttgctgattccatccacaccaactcggatgacacacttacgaggaacccagaggttgaataggcatccatactccctgtgagaacactgctagagtcaacaacgaccaggtcccccaccaccaggacagcacacattgcctagaattgctctaaacgaacattgaaccgtccttagaccgctgacctagtacttatgggttgtagt

SEQ ID NO: 35067 - DNA, 7173 bp, Arabidopsis thaliana landsberg
gggcacactgcgggcacactacgggcgaactggggtatactggggcaaactgcgggcgcatcacgggttaagtcatactcaaggtgagggtcattacaacgcgattgatcagttaattgtcgagtgtgctcaagactatggtccgaatggggaagaaggaggagaaaatgggaacgatgggggtgattcctagtcggactcatttgaatccttaacgccagaacctaagagtccgagtgtgatcaacatctccttggacagtttgaaagctatcttgataatattgaaccctagcgaggcggattcatgctgggaggatgaaatgtttaaagggaatgaaccgagtgatgatgaaggaaatgggaggtgggatccgatgctacttgaaaaggaactgaatcagaagtctttgatgaatcgtttaagacttgatgaagaaaggtccaaaggaaagatggttgataaggagggagaagatgagaggcagaagggaaagagagcggcagaattggaaatgggatcagagaaggcttaggaccagcggatcgttcaaataaacctgcatccacttgggatcgtatatgggattaactccaaggttaaacacataatacgagcagcagcgaggaagtcaattggggagaagttggccacaccagctaagcgtccgtgcaaaatatgtggtcataccgatcatctgaccgaagagtgcttgtatccaccaccgactatgtcctatatggataactataccaagtgctattgttgcggaggactagggcatgtgtccatgtactgcctgatgttgtgccaaatgcgggcgaaggatcttcgagaggaatcgggccattaatgactacggcggaggaggagaagtgtttgaatgaagggatgccctcatttttatgggtaaggtgtgagtgtcctaagtgtaggaacccttgacagatggtccgtaagatcatctaggaagaatatagttaacttttcgcgtaagtatagaatcggctgagtcatagcgaaattttgtttgtaaatatgctaaggcttagaacttgttgaataatatataaagactaagactaaaattcgatacttataacttgtatgaaccttttgaatgtataataagttaagtattttcttgcttttgtgtggccgaccattatatgagtgagaaataacttctataagcatcagatgagttcgaaaccccatcggaagtgcctcaccaacgttcggccaaatgaagaatcagagaaaagaaattgaacttagttgggctcaagataagtctagatcgggcatacttcagggaaataagcaaaagaaaggaagttcggttcgaggagcaggcaattgtataattagaacaaggaaattcaaagcccttgtaaaaatgttgggagaattcatggaagttggaaatgaccgaaggttagaatttgagggcaaattctattaaggaggggagaatgtagtgacccgcataagggcatcgggcacggccaaaggaccgaatgagaaacttttgcccgaatgcaaagccaattgaccgcgtgtgtccaaacggtgccaaaacatcaaagggcaagaatggctatgaatgggcaaagatggaaaacgttgggcgtgctgcatcgaagtttgtcccgccggtcgcggaaactgacatgagtaatacacctcactcgcggtgccttgcggctcaagtcaccaaccttggagtcaaagtcagctgagtcttggagccgaagttgatggggcggtcgagtgaaaaccgtcaccacctttcaccacaccgtcgtctaacacacttgtcgcctgggggcgcggtagctgtctggacatgtggcagcgggcgatactgcatggcaaccttgggcggattataaatagagctctctccgcccagtttcatttttgaaggcaagagagaaagactgaaaggctctccgattaaaaagtcgaccgaaactaagaaaaacttgcccgaatcgataaaacattgcccatggtcgaggaaacattgtctgagactagagaatcgttgcctgtggccaacaaaacctgaccgtgagtaagggatcgttgacagtgcttgagaagttttgcctgagacctagaaaactttccgacataccgaatctgtgagttgttatcgaattgtgtgtttgtttgcatgttttctagagctagtctttagattatatgcatgcttactcagtaagacttaaataatcggaattcggcttaagttagaacttgaatcttaaagtgaatatggtcatttgacgaactttataatactatcactaaggaatggaacagactggtgcatgactaggctaaatgaatatggacttaactaagtttacttgatgaattgagatatgattcgagggcgtacttgccttgttagattgttatacttatatgagatatgctatgaggttgtgaataaatccttgctatattatgtatatatattgatacgtgatttggtatttgattttctatacttgtttggggcatggtaaactacttatatatagttctgcatgaggttattgtttccaagtggtattcatggtttacccgataccatcatgcttagagtaagctgttgccttcctttttgtgttgtgattgtgtctgtaagtcttgatcctgagtggtcacttacatgatggcacaaaactcggagcgtatgccgggtaatgcatgacgatgcattaaaatgatgttctggttataagcctttgtggctatagctcgggtgttcacaattgtgtgtgtggtaacatacatgtggtgtgggtgtgcacgtacgtgtggtgtgggtgtgcatacgtgtgaagaacacgtatacacgcatgcgggagtttgtgctgatgttgtggtgcacttttttggtaaggttggcagtatgctgggcccaaggttcatccatttgtctagtttggttgcatgttctggtattattataagtatttgataatacgtttattacgtactctatgatctctgatggataagtttacctattaagttgattaaaccttagaaatttatttgtgcatagacccagctcactgagtaatcttagattactcatgattctacttatcgtacatgtaaccatagtgggatgaccatagcgggaagacaaacactagaaaatgccagaaataggatgttttacgttgcttctgcaaaattacttgttttatgtaaatttgaacaaggatccgatataaagatatatttttcgggtaactctttgccaagtatatgctatatactatgcataaagcgttttcttaaaggcagccgagtgtttaatgatataagacctagtccgggtcgctcatctccagaatatctcgagggttggcaagcctaagtggtgttcctagtgggaggagggtcgattataatttggtttaggaactggattcatctggaacctctactaagttgtgatcgatcatcttcactgtagcgtaatagggtcgcccgtggcttgtccgaccatagggcgattcgggggtattacaggcagcctctcacttccgctcactttctcttccgaaaacaattggcgcgagttgagcttatataggcaaggaaatggcgagtcagcgcatgggcgagtcaccaatccacgggtcatccgcccgagatgacacacgcgccgttctagaggatgagcgacacgtggccacccaaacttcagctccacgcagctcaaatttggctacaggtaactttgcttgggccccaagttagccgagccacgcgtccttggcgcggtcaaaggtcggtcaacttccccaactttgcttgggccccattcttgcccaaacttacccatctttgccctttgatagtctattatgttttgggcacttaacgtcaattggccatgtattcaggcaattgtttaaaattcaaactcttgcccgtggtcgatgtccttacgcgggtcagtataacgtcagtctgcgtctaccgagcggggacatgtcgtgcagataatccccccagcgcttctttaccttgtacgaggggttcttctaccattccttcttatggctcccgttcctaaggctggttgtagagtatgtgacgtcttatcaaatcgccctctctcagattacgacgcggtctctaaggcatttgctcgagattttaatacagagttataaaacttcctgagaaacttcctagagatccgacgagttcccaaatccagggtggatcggtactacatttctcctacaaagaacaagaaaattattgatgggttcccaagcaaggatgaaccttacattaaccacttcttcttcgtggccctcgaatatgctgttcacgacgacttcctcgggacagttctgacgagatggggaactttgggtagttgtgactaaaatattgtttgtgcccgaagtgacttttatgaatgtgctaattgtgtttttcttggttgcagaacgcactaatctgattcctcgaaccgattccagaggacttcattttggcctatcacgcattatcagctaggaagtgcgactggttgaagcactttttccgagatcaaattcaccaagcgtttcgattgtttcacggtgttccttgcccttccagctctaagtattcagatcatcgcactcaattcttcgtggatatgcagtcaaccatacttactctgaggaaggtctacacgaagccgaaagaagataaagagaggcttctggccgaggagaaacattttgccgaggcgggtttgttctcaccgtgggattcccccgatgcggctcaaaaccgggatgttattcccaaggcgacattaccgattgcattggggtctgccgaggcgtgagaggccaatccgcttacctctgcgcctgtacctaaggtagtcgttgcactgccggcgagtgacaagttggcggacaagcgtattcgaatggacgactcggcggcgaaaaagaagaagaacaagaagaagaaaccctcgagcgacgaggcggagtgggagcttccgatctttgaagatcgagtggcctatgcaaatctgcttgggggctgcgttggtcctttgctccctcctccagatactcttcttgagtcgcggaagtttgccgagacggtgtctcacttcttccaggtacgtgcattcttttttcttctcctcgtgtgtcgtttaggttctgatcccataaaatttgcttttgcctactcttcaggccgtcgcgttgattaaccggatggagcattcaaacgactcggccatgcagacttatatggaggaggtcaataagttggctgaggctgagtttcgagcgtagactgccgagtgggagagagatgaggcgctttcaaagccaccgcggtgaacccggcgaaggaggaggcctagagagaggcctttgtgaacaaagagaatgtcgtcagaatggccaagctcaatcttaagacggattctgaggttgtccgtcttaagcgaatgctggccgaggcgagaggactctacgacaatgaggtggctcgggccgcccaaacggtgaagcgtgaaacttcggaagtttttatcaccaaacttaaggtcgccgaggagaagatatcgctgctcctgggagttaacgatcaattcatttacctgtcccaggtgcgggctaatgcgcaactgatcatggcctttgagcatggtggggctctggcgaccgagaagcatcaggtcgaagaatggttgaaagatttcaccgatgctgaggctaatctaaatcgtttcatcaccgacctaaaagagaatctcaaggctcctgctcccgagcctactcctcttactcccggtggacatagcccggttgaggctcttgctgacgagatgggggtcaccgatcagtctgggtcgcttgtgccagccgagggagttcaccgatctgaagagctggattagtaatccaaggaggaagggtctacccgttctttttgtttgtttttatcgttcgggagctttgccctttttatgtaaactcgtgcctggatggctttatccacatattttgctgaacttatgttttggattttgtgtttgaatataaaagccgattcgttcccaaactattgactagggctagtgtgaatgaactaggcttctgatagaaacttcacgattcgatccggttcacttctttaccagcgtttaaaaacgagtcagggtacccatgttaaagtataaccggatttcttaagataaaaattctgctcagaaataatctgctagattttatctcaaatttatatagcgttctgtagccgagtgggcgtaaagatactctgaggcgtcgctcgttgtagtaaacggaacaatgtgaagtatttttacttatgccgaagtgaaaaacttacaaaataaataaaagtgggactatggatatacggatccattccccccctttttaatgggggggggggtagctgaactcgtcagaagacgtactgcctacgtacccatatcatggatctagccacctcgtagttcaagtttagtcacctcggatttagttgtagtatctccttaggtgcattgcattccaagatcttggaacggtttgccgcttaagtcggcaagttcatataccccaggtcggactaccttcgagatcaggtatggtccttcccaattcgccccgagcttcccagcattcggttcggcagtgttttgaaagacttttcggagaactcggtccccttcgtgaaatctttgctgttagacgtttgagttgtaataccgagccgtctcattctgataattctctattcgcaccaacactgaatctcttcgttcatctatcagatcaagttcgtcgagtagcctctgagtattatctgtttcgtgctcgggaaatagggttcgccgcaggcttggtaccgtcatttcggctggaattacatattctgttccgtagactaaggcaaatagggtttctccggtggcttgacggggggtcgtcaaatgcgaccataaaacaccttcgagctcgtcagaccacgagcccttcttggcggcgagccgtttcttctgaccgtcgaggattgttttgtttaaagcctaggcttgaccgtttccttgctgagtcggattccccatttgtggcagaagcc

SEQ ID NO: 35068 - DNA, 7823 bp, Arabidopsis thaliana landsberg
  unsure (1)..(7823): unsure at all n locations
gttggcctggctataaaatccgaaatccgaaaaccgatccggaaccgaacctgaaccgaatagttacaaaatccgaatggataatgaattctcctatccgaattactcgaatcgaatccgatccgaaccgaaatccgagaggatatccgaaaactgaaaaatatatatatccaaaaatattatttatatttagttgtaattttataataaataacaaaatatcctaaataataaagaaattggaaatcttttagttacatttgttaatagtatacatacttttgcaaaatttaaccaaattttagtaaagattaaaccaatttttatttaagttgaacaatttttagctctttaaaaaccggtccgaatccgacacttatccgaacaaaaaccaaaccaaagattagtaaaatccgaacggataataaattttctatccaaattatccgaatccgaaaatatccgatccgaattcgatccgaaaattcataaaatccgtacggataataagttctcctatcctaatgatccgaatccgaatatatccgattcgaaatccgaatgtccaagcctagcctggctactaaactttgtctatatttaacgacaaagatccctagcagtagtagtggtagttgtatcattcaaaaaatgagaagactgttacagagactaaagagagagtgtaccatgcgtatcagattgcacccaatggtaagttcagcgaaagatttttccactcgcgataagtaacagtgtggagcttcttttcctaagaaaacttttgtgttggacctcaacatttccttgatttcatttgatatttgaggaatcatatccaagtcatcgatctgcagtgggatcttggatgctattgctcgccactgagcacgtgacttattcacaatcacctatatatgttacttcagggtcaatttgatttccctccatgaaaaatgtatcacgtatatagcaatcagattcaaacagatgagataactaaatgattgcgagtgttaactcagtgtggaattctgaaagctagagcattagcttctgcaataagaagatgaatagtgtgaaacagataaactaacctgactcgaaaacagtgaatttggtaccaaaaccggaaatttttctgcattcaacaaagatgttgtcgtaagtcccatttcaataacttgaccttctacggatccagcctgcaaagtggggacaaggaagacactatatcttgagaaaaatatgagtgagaactgccaatagatttgcttgctctatgacactaaataaaagaagagagcagaaaaaaaagttcagctaactttgatagtatcacccatagagaaaggccgcgagaattgcattgacagaccactcagcacattaccaaggatatctctggcagcaaatgcggtggctacccctgaaaacgcaaatcaaaattggtatgttatgagcaaatactatagaatcagtactaataatgttagcaacccctgaaaaagataagactatatgcttgtggtggcctctagaggcctttattttctgctgaatcctagcaattagcattataagcagagcaaaacgactaatatgaaatggagaacattagacagacctccaactccaccaactgtcaagatagattgaacagctacaccacatgcttcagcagaagccatcaaaccgatagcgaaaagaccaacagatgatactttgtctaaagtcaataccttgtccctatcaagcccaccaaaactcttagccgacaacattcgggtaatcacattggtcttccaccgatacaggaaccacacaagtgagagaataaccgctcccttcacagtcggggaaaagtattgagctgctatagttgttggcgccaccattgcagcactgcagcatatcacattcatcaagtctatctattttctacaacatacatgtcaaaggaataaagctagagagactcacatttgtgcaaaagcaatgaaggtgaccaagtaacgagcaggatcctctaaagctccccaaaagcttttctcataaggaacatcttcgttagagaagccaacgggaagcagcttagcggaactttgcatagcataagtgtgaaaccttctaagaatcctaggcatcacaacccaagcaaataaagtaccagtcacagtgagactaacaggaactataacatctttgagatacgggttagagtcaaggaactgctgaacatgaggaatcatctcatcagagacatctttagtcttctttgcagtctcagcaacagcattgacactagtctgcaccacatctttagctttctcaacccaatcattcccattcccatcaccagacccagtaacaccagatgctacaatacttccgaaatcatcagatttggagctgaaagctcgtgcgtacgacgaatggcttaagtaattgaaaggcttagcatcactatgcaggcgtatattcgatgaaaaggagatcatcgaaggagaagcttttggtccatcaagaaggtttccgcaagtaaaggccctggcatgagagtttactaaaacgttaggttaaacgtactaatgatatatagtaactatagccgaaccctaaaaacagccgaaacctaaaaacgaactcttttctccctaaaaacgaactctttttctctcagagaaccgtctgataatggacaaagccaataccaaccggtccaaggtttgtggtggttccggtgaagctaagctaactgggaagaagcggaagaacgtgagtgccaaacaatcaaagaaagatgcaaaaaaggagaattctcaaaggttaaagtggagttcgaaagatgaggtccttgtgctacaaggtatgttggatttcaaatctgtaacaggtaagaatcctgttgatgatataaacggagcatacgaattcgtcgtccatgaatacataagcactgttattgacgaagacttcatagagaagatgaagagtttgaagaagaaattaaagaaaaaacagaggatttacgataaagatccgtcttcttcggaacctctataccagaaaagttccgagtggttgaaaatgatttggggttatgatgtggaatctgcccttgagaaaccaaggaagagtaagcggattataaagctttgaagcatcatcatccagttagatgctaaattaacgtctcatttcagtttgttcttgcaactttggttatcttttgttctatctatgtttctggtttatcttatgatacctctatgttaagataatggttttatcttttattaaatggaatctgtttctattccagaacatgtgtttgccattctgaatcagacatgtttggtactgcaacatcaaacaaactagttagatctctcaatgttgactgaaaaattacgcaaatcagactatcaaacaattcctgaatacacacaacaatgctcaatgccaacgactctggttttttctggagttatattgaaccatatgttaacagggagcaataagattcttatcacagagtattttccggaacttttgttttcatttgtataatcaatcaatcaatcagtcctggtttgatcatcaactttcatgtacaagtctgcaagccgtggtaaagtaagtttttgctgacatcttgagaaaaccttcaacatgatcctgctcaaacaaacataacaatctaaaaacagagaaaagcctggatatcggtaaattgtgactgcagtgaaccttgttagaaactgaatctccttctagaaacagaacaccagagaaagagaatcagactttgtatcacaattggtttgatcgtcaacagaacaatatagagaagaacttgcaatatagagaagaacttgcctttctattatagagaaagtgaaacacaacaactgcttagacggtttacaacaaggaacttaaatacaaaccaacagacatgaaaggcttcacaaaagttgagctgaactaattgatcatgcactgcaaaccacatcaaacgagagccattttctgcttaacatattgaattgatcatttcatgtacataggaattgttagaaccctataaatacctacctataaatacctacctgttaaacagaaactagaaggaaagaaataaaagcaaggccaatatgaaacatttttctcttgaaacctaagaagtcatcacgattttctgtaatttcccaaaaacacagagttttggatccatctagctagatagcttccggatcagtattccttgtctctacaaaatgatcactcacaatgtagaattgtcccaggtggtacctagcgacacaccgtgcttctttatgatcttcaccgcctcaagaaggacctcttgttgtgtattgtatagctcctcttttccctgagacaaatgaagcttcaggtgtcattgacaagctttggcctggctgttttaggatcaatttcaaccctgagaccaatttcacggagttgaggcacatccacagagcctttaatctccaactcagccactacttcctggttttcagggttcccttccagtaaatttcttatacaccacaagccccattctctcaagaacgggttctcatcatcggtcacacactgctgcagcattaaaaagagcccatctctctccctgatctcatcttgtacctcttttcttctgtacgcgcagttcccaatcaccgacacaatatctctcctgaatcctctgtaaggacacggctttaatgaagaagaagaagaactaggactctggtttagagccttctttattgttgttggaggatcaagtttactaagcagatcaaggagaagttctattagtccagaggacaagagcaattcaacagtatcacctgaatccttgttgtcctccttgagttcttcaagacgtcctccagcacaagcatcccttattatcaccagagagtagcccatcacatctactatagttgaacccgttggaagctccgatctttcacccgaaacaaaatcaaaaacatcaactgattgcctaaacaatccgagaatcgaacaagctgtatccttggggattgacacttttcctatccgctcattagcaatatcagacaccatcctcacaagaaaggcttgctctgatgaaaatatctcattttcagcatcttcgtataatttagagaagagcttgaggaagtaaccatcttcaacacagattctcgaaaccagtaacttgagccaataatcctccacagacccaactacaaacaattataacaagattggctcaaatcagataaaaatcacgactttaagatcaaaatggcatttttggcttcaggaataagagtgttaccggaagaggaagtccgtagagtttcagcgatgatggtgagcccttgacagctacaaagctctgaagcaatctctgagcttccatcaacgcaagtatacaaaatcatacacagaggatcaaatgtttcacgtttcctaattttagcgattgataagaacctctccgggtaaaatcggagccacacatctctctgacgtttctctccgaacaatacaacgttcgctagaacctgtaatccgaacctaactgtctcgaaatccgcaatggcggaatcaagcaagtcggagacgatagcagagccgtcatgatcgacgaaagagttctgattcgaaacctcacctgcgcagaggtttcgaaggaccttcagagagagattcagataatggcgggaagatgggtaaggaagaagctgaagaagacggaggatcgacggaagtatagacttggaagcgagatcggaacgacctgaatcggtcttggaagactctagaagaaatttcaagcaatcttctagagagtatgataaatctgaagcatgtagaagcggctgaagcacctcttccggtagagaagcnnnnnnnnnnnnnnnnnnnnnnnnnnttgctttagggcttttccgatagagagagaggtagaggttattctgtaaatagtgtttcgtgtaatgggcccaaaggcccaaatattctaatatgggcttattggcctataagtttaatacagtggttttttcaaattaagcagtggaatgagttagtttacgaacaagtgagaggattacattgaagtaaaatgttgttttggagatgtgattaatttcaatccgaagtaggactataaataacaatggggctacgaacagagtgacgtgggctcttccacacgagcaagccggacacaatcttcccaggagtcatttgtttggccttcaccaccactttgaagcttctcttttgtgaagcctttgaaaatgacaaactctgtggctccaccgtgatttctactcctttcggtgctctgacggtggcggtgtagaccgacgacggtggtcccacgttggtgactctccgcctgaacacagccaatgtggacgttttggcggatctcaacgtgagttggattgttgggtagttgagggaatcgtggccgagtccagggacaatggaggaacagctcacggagcgcgtacccaccaatggagctagagtggttgcgttgtagccttcgccgcacaagaactgaacataggagatgtcgtccatgtcgtagactaagccagggcttgcggctcgtcgtgggtttatttggcctcctccataagcaaactctgcgtccttgttcactctccggcttatcggttttgctgcgtaacaaacagataaataattactgctttctctgcttttagtttcacgagaacttgacgtgagttacctgaggtaatgatggcggatttgatggcagcaggggtccaatccggatgaaaagacttgacgtacgcagctacaccagcaacatgagggcaggccattgaggtgccagacaggatggtgaattttgagaactgggtgtcaccatctaacccagtcagtgatctctttagagtgaaggccgccaatatatcaatcccgggtgcagcgatatcaggctacaatccgcaaaaatggcagaaacataagatcatcatctatcaataaacagatgacattgatcaagtcatatataccttgagaagacgtattgatcccggattgggacctcttgatgaaaaagaagcaacaaatggagcagggattgtcacttgccgagttttctgaatcacagccgacgctgatctgagaaaagcaaaaacaaagagttacttagctgtgaacacacttgtagtatagtatcatacccaagaatatcaaagaggaccttgtggagttgatatatcggtagataatatcgccaacggagctattaacactggtggcaggtgccatgaaaatctgagcattgtcaagatattgatcacttacaatgatggcaccagcacctccatagcttttgatagtagactccacaccacctcctcccattctacacaccattacctttcccttcaccttctttcgatccaaagaatcagagaaacaataccttaaacatcatcaaacaaacaatgtcttagtttctcttaacatattcaaatgaagttgatggtgataatgatgttacctagccaagtacttatcgtctgtgttcttagcagcatcaacaccacttacaagcggatacgatttggcttttggactaaacatgcttattcccatcccctttcaatcatccaattatgtcaaaaccctaaattgaatttagctggttaagagattgattttgagatgcttacagagaaggatttgccgctgccgagatctattttgctcttgaacgtccgatcgattccacttgcagcaac

SEQ ID NO: 35069 - DNA, 1329 bp, Arabidopsis thaliana landsberg
aaaaacatatcattaaagcttccacaaacaaatccagaaattaaaatttataacttatgaacaatcagacaggaacaaagcgaagaaaacaatttgctttatgggtgtcattaccaagatctgatggagttgatgacactcaagatagtttaaattatatatgagtcttgttgatgttagctacattggtagtctcgtagactggcaagcctccacgagataattcgtaattttgcaactcgaagagatcagaacttgaatcactctccattccatcatcctctccttctctctttattctcctatcatcatcgatatcttcatcatccgaccaaatcctctgattctccgagaggctctccatcaccttgagtttctcgtccagccaagagtactctttgttggtcttagtttcctcttctcccacttgttttgtggcagaagtgtagttcaagaactgcttgtagttcttggtgggagtgttcaaataaggaggaggagttctgaaacccgagcttgatgaggaaatcagagattttgaagatgatgacgccgtggtagtggtggttggtgagtacatctgcttgagctaaagaaatggctgatactgcttctcctcctcctcctcatccatcctcctcccggggatctcctcttccacttctggatctgttggctttgtctttgactttgactttgatttgttttacttcgaacctgcttgatggaacaaggagttcaagaagctggcgattttcccacctggtgaactcggttgcttgtgtctcacgttaccaagtctctccctcgattgttgtaacttcgtgcttctcatgatgatcatgttgaagatggtacactgtgttctgagcatctaataggcaaatccaagctgattcgtcttccacctcctaatattccccatctcctcggattctgctctctcgctgcgttatagccatacttttgtgtatgtccatggtcaccaggaggaggcttcattgtagccgaagtacacggcagcttcaaacacgtcaagctcttcggaattgcgcttgtgggtcaaagatatgctcctagagagcttatctgactctgctgatgagatcctatcatggacattatattcttagggtctgagaatcggatacttggatgatctccaagagtctctttctatgcttgatttgcggagaatgaggaacaagttgctagggaatgatataatgaatataatgtgtttaggttttatataacaaaaaatgtgatatggaactccttcatcattaaataaggtcgtagtatgtgaatatccgtatcatgcgatac

SEQ ID NO: 35070 - DNA, 1508 bp, Arabidopsis thaliana landsberg
acattccccagctattttccagcctgtgtttcctctcccaattctttccatttttataccttctctctttctcctttcttcttcactcatctcttcttcttcgcttcaaccttcataatcagtggctccttcgcttattagtctttgtcaatcttaaatcgttgagtatccaaaaatcttaaactcaatggatccgtgctctttcgtacggatcatagtcggtaacttggccgttaggtttccgtcgtcgtcttcttcttcttcttcctcatcaggaccgtctgtttccggaatcaatccaacggctcctaactgttactgtaaaatcagattcaagaactttcctcgtgagattgtttctgttccggttatgttccgaactgaatctgaatccgagactcgttgctcctcctccggtaacgtatccaccgttgctgcttgtttcagtttaagtaaagctcagatcgaagcgtcgttgaagaaacctaaaattagtgttctctccgttgaggcttattcccgcggaaatagcgacggagacgactggtgttagctggcgcgtcagtgtggactcgctacggcgggtgagaagttgcttggtcgatttgaggtttcgcttgatttgaaatcggcggagacgaagagttttttggcgcataacggttgggttgctttgccgtctaagaaaacgaagagtaaaactggatccgatccggagctccacgttagcgtacgggtcgaacctgacccgagattcgtgtttcagttcgacggtgagcctgagtgtagtcctcaggtttttcaagttcaaggaaacacaaagcaagccgtgttcacttgcaaattcggctctagaaactccggtgatcggaatgttagtctcaggtcagtaaattatcagataagttgcttattagaaacagagcttttgcttttttttttactttagggttctgattagtaccaattagatttttatccttgcagcattgctatttatgtttagttttcttggaatttggatctatgcacgatttaggtattccttatgatgatatctaaaaatggtttggtgtttaaattctgcagcttatcatcggtgacaagtggaaaggaacagttttcaaaagagagaaaaggttggtcgataacgatccatgatctctctggttcaccagtagctatggcttcaatggtcacacctttcgtaccatctcctggttccaaccgcgtctctcggtctagtcctggagcttggctaatcctcagacctgatggctacacctggaagccatgggttcgccttcaggcatggcgtgaaccaggcgtctccgatgttctaggttaccgtttcgagctttataaagacggtatcgctgttgcagtctctgcttcctcgtcgatcagcacaaaacttggcgggagtttcatcatccatggctccacttctacgactacgactgcttatagaagaagctctgaaggaagtttcgatctttcttcgtggt

SEQ ID NO: 35071 - DNA, 863 bp, Arabidopsis thaliana landsberg
gggcacattccacctccacctccacttcggatgtttgatgcagaagttctgtgttgttgttatccacctactcgtgtgcgtagagaagcgccactgccaccacctcctctgatatttgtaggagccccacctccaacttgtgcacttaagggtatagtgtgttgttttccatgtccagctaaaaagaagtcctccctgaagcgatttaactgggttaaaataacaagggctttgccggggagcttatgggatgagttacagatacaacaagtatgccacggcgatatcgaggatgaacagattctctggtaatcccttcaagaaaccgaattccaacggattgaagaaggaagaattaaagtgcctatatcattgacctttgctttgcaattactctatcatttttttctctccttttttttttggctagtgcaatagaactatcagtatcagaaatagagaccatttttctctcttggggccaaaccataaaccaaaaccagaacctcaaaaagttccactggtaatgtgaaatattcccaacacaattggttattgtcagatattttaacttgctcctttctggtggagacttttgtcacgtagctataaacaagtgacttttgtgattcaatatacattccactctttttgaagagttgtttgtcttatgactttcaagattgacctaaggagagccactaacacggaaattaggctaatgttattaaatattcggctgcctgatatgattgtaagctccaaaacctacattaccctaagaaaaagtcatcactggttagtcattcatagcttaatgctaattatccacatttttctttgcatcgtccgggcggcagcca

SEQ ID NO: 35072 - DNA, 986 bp, Arabidopsis thaliana landsberg
gaatgaagaagcgatggtgttttcgaaagcttccgaccaaaattgttttgacttgtcgagaaagatttggggaagtaacggtgtattgtattcgaaatcaaagaagatgcgacaaggacagcttggaggaagtgtcaaggttgatgaagatgatcaagagccacagaaacatcggtttgtcataagcactttatcttctggtcaagagttggtctcttacttgaaggttgagaatccgaattctttgggtgttgatgacacaaaatggagtgcaaaattggataagatcaaagacggaaaacaaaagagaaagatggaaaaaaccttgaagaagattcaggctaaggaagaggagctctctatgatgagaagtgaatttgttgctgccgtgacgaatgtgctgtctaagcaagacaacgcatcttattcctgtaagtagatgaaagggctagctggtggtttgttgttggcttgtttttcttatccttttttagtttgctttttgcattttgcggctttagtttcttatcggtggtttggcttcttaagacttttgttctatcagataattattctgtttgcttctattgttggatgctttgattgggtataagaccccttcgtttatgttaagtggtaatttatgttattgatgtcttggaatggcgtttcaaaacatgtttcagtagaatactttctgttctattcaaccaatacattgggaaataactttggaaagaggcaaaaactcatcacttagtgttgaagtttacttataattagagacgataacctttcaaaaataatttgagatgactcctacacacacacacacctaaccaaatgtttttatagagaacttgaattcatgatgtacaacaaaagtaccattgctgtaaggtgacattgacgatgtcgggtcttttaagggaacttctgtgtaactgcatttctttgaacgttatgtcccgatagctctgtctctc

SEQ ID NO: 35073 - DNA, 716 bp, Arabidopsis thaliana landsberg
ttataaacgttaatcaagagctttataaaattacaccttccatgcatttagatgtaccagcaacgattcctgcgtgctggaggagtttctctgtcaaggaccagagcctgacaacttctgtttttacctcaccaagacactcattacttccttctgaataccctctctctggcattacagtgtgagttgtgtcggcctcaatgctcatgtcagcttgagttaacagttccgtgctcatttttgcaagcttctgtaatgcactggtcgcagcttcaacttcaaggttagctgcctcaagctgaagcatctctatggccagatcacccattgttttttccccgactctctcttgtgccaaggcatatagcactttcaaatcttcactgtcattgatcgtttcttctttcaatttcttgagttcctgctccttggcttctaatcttcccatgaccactttgttctcttcgtctttaaatgtcaaagcgggcgggaccgctagaacttccatttctttcatccgtagattttctctggtgaagcttaactccatcaccagccgtttgttctccattccgtaatcatcatgaggtttctctagtggttgctgcattgagtcaatgcttatctcattgttaatcctcattgcattctgattttgaccgttggtggttgacataagcagtctgttcgtcaattctgcaattctttccaccacc

SEQ ID NO: 35074 - DNA, 5879 bp, Arabidopsis thaliana landsberg
tttagatacatacactaatttgcttttgtctcagactcactctatctatgatctatcacaagctagcaacaatgtttactgcttaatatgtgtctaacgtaactcgtgatcatttctgaaacaagagtaacccctaccaacaattcgttttaatctcgaaatacaaagtacaaacacaagataaacaaacgcataaacaatcgaggcacaaagcctattaacaaggtctgaaaattttcaacctagtcatcaaggacgaaaacgatttcattataattgaaaaataaacacacttattaaaaaatatatatcaattgcaaccatttatatccactgtttcgttatgaactgttcaggataacgcattagttccttttcaataaactgatccaagcaaatacttttgaaaaagtggatatcaatgaaagctaaattagttaaaacatataagataaaaattgtggtcgctatgaactcaaaccccaccaaatctaaaagttgaacactggttccactcttttaaaaacatatttacccaattgtgtgtctcttcttttctcgaacactaatccgatataacatgaaaatattaaaaaaacgtcaacaaaagaccacagccagggaaagtcaaaatgagctgtcatggaatcaagtcgtgtttactctcagccacatgtttagatacggccttctcgtctgacgtggcaacccgttctctctcagccactcgtttggcacgtgaccatttcatacaaaaaaaaactcttttttcttttttccactgtaactcctttctcttcccatatcctttgagcacgaaggaggattctgctgaatcaaggtttttcaaagcttgttgctttttcagtttaatattcttttatttatcgttttttccactttattattgtgtgtggatttacgttatccgatttgttgatcttgttgttttttcctggatttttttcgttgtggagctggcgatgtgtggagcaatcagggagcttgattttgggtctgtgattcgattttgtttctccagtcatgtttgattgggaagaagaagaggtaagtttcttctgttgctatatatacgaatttttatgtggaatcagtataattctgttttcttatggatttggttaacgatcaggttttgaatcactcatcctgtaatttatcagtctctagtatcattggttcttaaatattttagttttggtggcttgttgttaatacttgctttgtgcctgatccctacttgttttatggtcttaacctacttttcagcttactaatatgatatggggtgatgatgctgagacaggcgaccatattgtgccttttaaagtcagaagtgaacaacttaacaaaaaggaacagattgaggaatctaagacagctgagcaaaagataactgggactaaaattgacctccatgataaaaatttggggagcagttcgagccataatgttgatgaggggcttcctcagccagatttctgtatgagctcatggcctgacacgtcgctaactaatgctacaaaggctgatcaagatttgagtgcgactgaactttcaaaatgcttagctgagccagtcagatatgattcaacaagaggtggtgcgtttctcttgaaacagtcatgttttacttgggtacgttcttttcaatctaatcattttaaaagttgtgcgctcactctgtttttaccagagaaaacgtctgaacttgggaaaggccctgatatttttcatagctctgatgagagtaaagagcaaggtgattttgatgactacagctgggccaacattggtagttttgatgatcttgatcgaatgttcaggtaaaacgacttctcatcctcactgtgctaggcggtaacttttcaatgacatactccttttctgccatgtataaaatgtgttatttactgacttgatttcgtcttagaactataagataccagatgtgaatatggtggaaaggtgtaataatgaaaaaaatactagctccttatttcttgtgtccaatttgtttcatgcacattggcctctaacacaatatcctcacaagtgatggttttgcagcaatgatgtccctatatttggtgatggcagtctcagcggtggtgatgagttatggtcatcttctaaagatgtatccaatagcccaaaatcattatcatcaatgttggactctcaagatctaggattggatattagaactgagtttgagcaacaagagaaccagcaatttccattgactggaaaagccaatggtctgtcatcccaaagtgtcccaagtgtacgtgtaactcttaaggctgaccaatatcgtgagcataagggtcaaccctcagttgaggaccaggtactatgcgtagcagactgctggttattgctcacacgtttatgataaattgaatgaaagtatgtacctagtttctgccaatgtggatctgtagcatgaactatgttgtcaaattcttatgcattctcatttgtacagctccactgagcctttttcgtttcattttcctttttctgaccagccatatcaacaaaataaaatgatgaagttttcgaaaatgcctgggacttctgaggcaaggccctttcaagagctgtacggtcagaggattccatttagtaattcagctggaaaatgtgtaaatcagttggcaccgccacaatcgtctctgatggctgttaatctcctgagtgagtctgaggggtctgggacatcacactattcacatatgccaaaccaatacatggctaattctgcttttggtaatcttgcaaatccatattctagtgtgcctgtaatttcggccgtccaacatcctgatgttaggaatcagttgatgcatccttcctacaatcctgctactgctacctcagtaaacatggcaacagatgcctctgcacggccttcaacaatgacaccacaggaaaaactagaaaaacttagacgcagacagcaaatgcaggcaatgcttgccattcagagacaacagcagcaattttctcatcaggtgcctgtagcagatcaatccattactcaaaactgtctccaagatattccactccagcttgtcgacaaaactaatctccaagggctaactgcaatgccttcctttgatcctagttcatctttggaacaagatgattctggcaaatttgctgctgctgttgataattcagcagaattctcagttctttatcggcttcaggatgttgtagcaaaggtactcaaatggttgattgacttgttatgtttgtgttgggagtaaactaatactctttattgacctgcagttggatatgggaacacggacttgtatacgggatagcttattccggttggctggtagtgcagctcagagacattacactagtgatacatcccacagtaacaagactagccaggatgaccaggaagtcattcccagagaagaatccagatataggtaagcaaatttatgcgtattattcaatatggttaacttcgtacttagacaatgtaaactagtaaaactacaagcatactttttcgtaaatgggggttaacctttttaataaatgctaccgagttcatcatcactatcaatcaaattgtggtttacataactagcttttgtatttgatatttacagatatgctgggatgccagatacagaagcagtgaccaaccccacagacagaactgtggctcatttgctctttcataggccttttgatatgttggcggcaaagcgaatggaaggaccagaatcacccgcttcttcgaagatgggaactgaagaaaaagggaattttcctaaatgcagcatacgagagactcacttaactaagcagaaagctcaaaaggaagaaggacctgcagattcacttgctttggggaatgcacccaactctggatctagtagtactgttggtgagagggttgttgaagcatcccaaggaaacaaaagaaaattgtgaaatttagaaggttgttatttccatactataactctataaatcgtttccatgcccttttgtatacgtgcatagagcttgtatacagattgtaactaatacgcaggtgttgcttttgctttcaatcagtttaggttgccgtgttagagaggagctttgggtatttaagcaaactagacagcatctttctgcgtctcttgaaacaatctcctgactgctcctttcttgtaaagctcttattcttgtaattagattttttttttttttgttacttttcgaaaacctcttttgttatacgtatctccatgacaactacattttggaaaacgtgtagtttgcaatgtttttcccccattcgaaaccagattcaatctcttaatacaattgtaagcacacaccaaggacacataaagtactgttttgaggagaagaaataggtaacaggagtgtcttagttaatcatagagtagctgcaacgaatttgcctttcttcagagttcagatgatgcatcggtatgtcacaaaatccccaacaggctctttactgtatgtaatcttcaccacctgttttttctttaacccatagtacctcacaaagctgtccttctcctgcaaataaggaagctgaaatggaaaagaaacatccattaaaacatagcatacacaaataggcaaagaagctttgtgcagaatataaacagacctgtttgtcctcaagtgcatgcttcctcagcagttgttctttctcctctttgtttaaaatctcaatctttggctgctgaatgtgctttgtgatgttgaccaacaaatctccaatctgttggcatattcaataagtataaacatgtaactgttcagttaacgtatttccaattcaggtctcaatttcatgatcctcaatagatatcatgcaagacaatccaaatccagagctataatgtttcatcatgtaggaaaacagataagtgcttaccgggaaagtttcaactgtaaaagggaaggtagtcaatgccttctgggcaaagtggttcattttgctctgtaaaaccagaatcatagcatgcaagcctacattgttggaaatctgaatatgaagagcacgaactgacttcacggtgattggttcagtacccatgaacacaacaaggatctgcataaaaccatttcaataagcttaatgaaaaacaggtaaaagcatgagaatatgtctggttacattctcatctcaactagctgttcaaacataacattttaatgacaccttaatatgatcccatcctttcccattataaagttaaagcaatatgccattcgttacaacacaagtaccatgcgaggaaccttactgctacaacaaattttcttggttcccaagaaaaaaatgggtatgtattagttcttcagcttttccaaaacatataccaaaagctataaattaaacagaacaagaccaaacgcaaaccacacatcattggaaagaagaagataaacccatatacttctcagttctcactagtcttatcctaaaaataccctataattaaaagttgaaatctttttgttgtattaaggcaaatttaaaccaaggttaaaccctaaatctaaaaagtcgacgcatttctcaaattttcttctgttttaacgcaaacccaagctggaagctcaaaatcgataaaagtttaagcgttttacacattttttttctctttgaaggcgttaaaccaaaatgcaaacccaaaatctaaaaaaggtgatgcctttttcacattttcatctgttaaaaacaaaaagtaacacccaaatcgaaaaatagcggtggaacaaagaaaagctgaaacctttttcttgggatctgagcgaagaggaacgcagatacggaggcgttcaagctc

SEQ ID NO: 35075 - DNA, 1036 bp, Arabidopsis thaliana landsberg
cattggtgtttatcaaaccaaagatgtgcgatggatgatatttctacgctcaaactgatcactagattcctagattttccttcttggatcacttgcagctatggccacacatgcactctcgccgtctcaagaatcccggtcacacagcgactgcagtctaagagtgccattcactctttccctgctcaatgctcctccaaggtatgaactccatctgactactacataccctctgtttatgtgtgtggtacagtttgttttattggtttctcttgttacttacttgcacagaggctagaagtcgctgaattctccggtctgcgtatgagtagtatcggtggggaagcatctttcttcgatgctgtagctgcacaaatcatccctaaggtaacttatttattgattgaatcagtaactgtattgttatcatgatttgtgaatatgtgatgagtttgtgaaatattaggctgtgacaacatcaactcctgttagaggagagacagtggcgaaactgaaagttgcaattaacggttttggaaggattggtaggaactttcttaggtgttggcatggtcgtaaagactctcctctcgaagttgttgtacttaacgacagtggtggtgtcaagaatgtaagtatgtaataaactttgtgaactcttcttgtggaacacatttttgacatttgatgaaatttgcaggcatcccacttgcttaagtatgactccatgcttggaaccttcaaggctgaagtgaaaattgtggacaatgaaactattagtgttgatggtaagctcatcaaagttgtctccaacagagaccctcttaagcttccatgggctcagctcggcattgacattgttatcgaggtgaaatttctaccgaaaactgcttattatgatggcaaatcgcgctagggaacttagttaatcgaaaactgtatatggttatgatcatcagggaacaggagtgtttgttgatgggccaggagcagggaagcaaatccaagccggagcctcgaaagttatcatcactgc

SEQ ID NO: 35076 - DNA, 7950 bp, Arabidopsis thaliana landsberg
  unsure (1)..(7950): unsure at all n locations
gctgccttgaaagctttattggaccttgggtgaaggtagacagcttgtttctcagctcctcaaacttagcatcattttagaatttgttcaataaggctatcttgatgcttctccaactcttaagggaacctgctttcaattgtttcatccacgaagcagcttcccagcaagagaataagggaagagcttacacagtagatagacctatgaaactccattagctttgatgctcaatgcgaggtcctcaaaacgctcgatatggtccattggctgctcatgagataagcattggaacggatgctggccaactaaatcaaaatagccaagcttcagctcatagtcgtttctctggaatggtgggggtacaatcgctgattgattagcatagaatagatctggtctgttgaaatcccaaagagtacgacgtggttccgcggctggaggaatagctgcaagaatctggtgttggtgtcgatcgacacctctattgtgttgttcgacaccaattgcatccgcgttctactcccgatggtgtcgatcaacacccagttggtgtcgctcgacaccgagccttgctgcatctctaacagctaattgcgcattgagacgcgcttgatcctcattggcgtcctcaggtaggatgagtccatgatcatccaatctctgaccagcctcattgtaggcttgcccatcctcatctctcaaaactccttcagcatcatctctgatgactctgtcagccattgctaatttatgagtttttgggttggtgcgttcaagttttcccaagtccagaacaaacaagttgataagctcgttctgttttgtgctccttgtttgtctaggcatacacctgaaacacagaaaagaagaaaacaagaaacgcgtgagtaacaaaatagaagtaaaaactagacgaaatctctaaacaaaactcaatgatgattcccaagaattccggcaacggcgccaagtttgatataattcaaattacatagaactactctctcaaataagagatcaattccagtattttaggatcgaattcacagagttcttttgttcaaacagtgagttaaatgtcgagattaagctagaagggtatcagtcaaatagtaagtaaacaaagcaagaaaacagcagattgattgtgttgtgaaagatttaataaagaggtagaagcatgatattctcaggaaactattggttagtagatctaatgaaacctaggttgttatcgcaccattcttaaactcaaactttaattatcgaatacctggtgggcgtgccgggaacctccctatatctatagctaataatagccggagaagccgagaacctatcatcctaaatacgcattcttagcgagtttaattgttcatctggcctgattcgtattacacacctataaaccagactcatcaaataatagatccaactatagatacctatggcgggaatatctattttctggattcaagatttagttaattactctagatctagcattaggcataattaaagatgaagaattctacagataacctagcaaagggggcaatctactaaaccatatgaatccctaatgagaaaccctattcctaacaagcagattacaaacaacatatttgagggtgaaagcataaacacagtaaatagagaaggggaaagaaaggatctcttcactgtatatagatctgaatgaaactctgaaaaacaatggatgaataacttatgtctcttacaaaagggtttgcaaagaacttgataaaagaaacttaggtcttaaaacaatatatatagaccctaaaaacgtccagagactaataatgcaaatagggaaatcttttggggcaaacttgagcttctgtaaactcgaaagcgtctagggttcttgttgggccgaaactggtgtcgatcgacaccaagagtgtgtcggtcgacactcctcgctgattcctgaaccaaaatcgtccttcgcttccttttctttagcttttgctccaaaatgtctccttatctccattgttgtaccattgcatagaatacctgaaaagacactaaaaagactcgagaaataacataaagactcaaaatcctatacctaaaacatagataaaatcggtgaaaatcgggttatatcaaatggtttgcaccagaagattagaaaggagttcacttagaggaaagaagccgagagagcaagtttgtgagtgacgaggaaatccctattccaacttattctccaggagtgcctaaacagcccaccaacccctctactgaagaagaacactttattcctgattcttttgctgaaaaactcctagagctttgagttggatataaagctcaggaggatacaattggaaaattaactcataagatggaagagttaaatagcacaattctggaacttcaagaaatggttaaaggctaccccagttttgaaaatgaggattggtcaaagtagcctggttcagaagaagaagactactctgctgatcagaaagaagcttattttgaagaaaaatcaaataagtactcatcctaccatatctcaagagaggatgcagagtatgattcaagcactgaaaattcgaccactgaagatgaggacttctctgttcctctcttccatctcttttctgactaagctctgtaagagtcaagcttagtgacttaaaaaagctcacttgggaggaagtcccatgtctatccatgtatataactttctatttttcttgttattttgatgtttttgcttaagtgtttcaggtttatttcattattcattatggagtcaacggtcgagtaaattcaaaccaagtcaagaaaaatatcaaccgttgattgagtagaatgaggaggagtattttgagccattgatttgaatgactaaatgtgggaaatcaccctcaccgtttgatcgagtgaccaagggagaagtattctccaccgcccgcccaagtatttcacacttcaagaagatactcgattctttactcgagctctcatatttcgaagaccaaggcataacttcgtgacccaacttgctccccaaacactcctttactcaacggacaaagagattacccatgcccctcaccatttacaatcaacttttctatcctttcccaaagaaaccaaacaccattctcctccacccattgaattcgacaaacccacttttgaaactctctctttcatcatctcattttcgcaaaatctccatctctcacaaagcttcaaagtttcactccaaactcttcacgaattcgttctcacttcatcataattcaccaaagtcactcgatcacttccaagttcnnnnnnnnnnnnnnnnnnnnnnnnnngctcaaaatttcatcaccaaagaaactgattcccttcccctttgatagctcttagagaagtgttcttgtttgccctgtcaaagctcaccaccaatctccatggattcaagaaggaagagttcaccacgggcaagaagatcctctattgataatgaggaagttgaggcgtttgacatgagtggcatgactgagcgccaaattcgccaagctcgtcgtgctcaaagatcaagcttgattcaaggtggaagctcaagccgctcaaccatgcaaagagaagaagtagctcgaggaaagagggtcgttgaagctgaagaagaacaccatgaagaggcaccttttgaagaagcggtttctgaggaagaggttgagatcatcggggatgatacaccaacccctgttgggagaagaaaccgtccaaggaggaagagagagccaaccccgagcgaatactatcaatacttgaaggagttgaagtttgagggaactagataccctcataaggaaacgatgcaagagcttggtatttgtggtgatgtggaatacttgatggaattggccaatcttgcaacattcattagcagccaatgtgggggatacaaagaggagagctgccaactccttgcaaacctcaaggttcatttttgtgttgatgattcggagaaagaagaaagaggagggcttggttacataaatttcaaggttgggggtgtcgagcttgatattagccaccttgataccatttttgggtttccaagtggagaaagaatccgccaagactatgaccaagatgagataaaatctctttggacaacaattgccggtccaaagccctactcgcccgccaagagcaagagttcttcaattcgaagtctcgtgattagatacctccaccaatgtatcgccattacccttttcccaaagaagactaccagattcgtttatgaaggagagctattcatgattgctcaagctttggtcttcattctgagagagaccgaggatgggaggaagatggcgggtgatagagtagacacttcgttgactgtcgttcttttggaccacctattgagctatagagagtatgttgcaaccatccatctctcggggatttgcggaagtctttgtgttggtggtctcttaacaccaatcttaggagcttcaaggatacaatttggaacccctgacgtgttccccaagttcatcgacctcaactatctcaaggggaaggattttcttgaaaagaagactccggcggatcattatatcttcaagttcaaccatccaaagcttggaccttctttgttacctctaccttgcgagaaccggacttcattgaagacaaggcacaacatcaacttcatgccatctccctcttccctaaacatcgacatcgaaggagctagagaagatgaacaagagtatactcaagctgactatgagcaacaagaatattatacacaagctgactatgagcagcaagtcgagttcgagcaacttagcgaacaaccggagcaagagaccaaagaattcaagcaagctcattatgaagcagatgctgatcaaggaggagatgagataactgaagtttacaagaagctccgtgtgcttgaagagcttgggaaccttcacagcaaaacgatgaagggtttcaagaagaagatgagaacaatgaagaaatcactaaagagtatggctaatcaaatcaaagacttccagagcaagccaaggccaccgtctgccacccccgaagtaagaagaagcggttccacaagctcagctgcaaggagggctgaaaggattgatcaaccccgagcttcatcactcgagcctcgggaagtgatctccgagttgagagagccaaggagtaggcagagacgaggttctacacgctcgaccaactactcgaccagacagaacgagcaaaatgctgccgcatgaacatctgccccttcttctattctatagagtatggacgattaagttttcatctacttcacctgaccgcttgaggtaataccacctcaactattgcacataccattagctttttatttttctttgtgtgttttgtgttttggtcttgaattctttctcagatttttattacacaagggactgtgtaatttaagtttgggggagggttcaagacatgtttaacattgtgttctctttttttatttcaaattttgcatcatctaaggcatataaaaaaccataaaaatttgaatatttttcagaaaatgatttcacaaaaacagagtgtcatgtagattgcatatcattttaggattgtatatagagtgcttgcatttaggattgctcatttgcataggggataatgatgatttcgaaccgttaagcatgttttgattcaatgaagtaagttcaatgcccatgttattagttctctgttgcataaccgattgtatctctgaagtaagactacaccctgctttaaatttacaacttgactattctgctttgattcgaaactcgcttatctaatgccattccctatctattagaacctgaactgaatttgcaattatcatgtctaagcattgtttgtgaactcatggctaccatatacatacttggattatcttattcacttcaccaccctttgttaatccaagtagctgtctctcatttttggagcagtttcccttacccttagcctagccttatttcaagccaaagatcatttgtgtgtgattgtgaggtctttttcgattgagcttggtataacgtattagctatgagccgacaagagcagtctttcatgtagacctagcccacgctttttgggttagctaggactaggtggagacttgtatttgggattgggactgtgtatgacttgactaggaatgagaatgagaatgaaaagaaaaaaagaaaaaaaaaaaaaaaagtgagtaagagtttagagttcttaagggggatacaaaaaagtgttagtctagtaaaggtttggaattcaaagaagttaggcattgtgattcaaagaaaagggtaaaactccctgtgtgctaagattagaacaaaagccttaagtttgtcaaagtatagaagcaaacccgctagactcttaaatcatttcaaagagaaccccttagaacttgaaccaaaaagagagaaagaatgagaaaaagggtagagttaggacatctatgggaatgggatcatcttctgagctatcatactatatcattgggtagatgggagtctgttcttgtatgtgtccattggcttttacctttagcattctactaaagctcaatcttttctctgagagtcccctgttactcgaccaaaccattagagggaacatttttgtctcttagcctaagcccgaaaccaagtgagttcatgaccattgcactgcttgatccactgttcgtgcttaatgaatgttaaagggaattggttgatgtgaatgcttgaatagattaaggcaagttgttaggttacattgtgacgagtatggctaacgtttttgagtaaggtctatcatcttgcaacctagaattagctacctggacattgagtttacccattttataggcatgcttcggtttttgaatccccaccttcaaacctctccttcaacataagattttttgtttgcttgagggcaagcaagagataagtttgggggagttgataacactgtattttactcatttaaggtgtatgtttatcatcatttagctttgcatttgctcattgtatcatatcattttgcaccattttaacttgttttgcatacttagacatctaggatcatcttgcattcacattgcatgttatggtgtgttttcaggtgcaaaaggagcttaaaaggactctactcgatccattgtctcgatcgaggcagctacagaagaggcatcattctactcgacctcttgacttgatccaggcagctacagaagaggcatcattctactcgacctctttactcgatccaggatgccacagagaaggctgcagtttactcgaccctcctactcgatcaaggcaacctcagatgaagcagcagattgatctactcgcctctcctactcgatccatttactcgaccaagggtgaccatctctacaagacttgttgagctatcaaagcgtcttcggatcctcctaattccccactcaaccagacatctgagcatacagataggagaggatgaagcatcttcttgaccaattgatcactcggagcatagacacaaaggcgcagactttgcagcaccctctttactcgatccccaagatcgagtattcgtccaaaccgcctcaagtctcttgtcttctagtgaatctagggtttccaatattttagtataaatagatcactttgggatttgtccaaaggatctatgctttatctttcaatttttctttgtgtttatgaatcttaaaaccttaattactcttaatctatttcgtgtttgcatttgattgtttaagtaaagttgtttagcttgtttagatctacattttgatatgatttttgtaatttctgggtttgtgttcttgataatgttgcttgagtggtgattagggttcttgagtatggattacaattgggtaat

SEQ ID NO: 35077 - DNA, 993 bp, Arabidopsis thaliana landsberg
attcataagcaacactaaagcttgcattgtttgaagagacgtttgtacaagctgtaattcatttatgttatttaaaacttttttttttataattctgcagcttagtaatgatacttgtctagcatatacgctagctgcaatgagcaacttggtatcggaaatgggcattgcaagtacctccggtgttttcggattctcatactcacccgtgactagcactgcgtcttcattatccgtacaacaaagagtgtacatacttttgaaagagtctttgaggagagctgacagtctaaagttaagacgcttagtggcttctaatcatcttgcgatggctaaatttgagttgatggtaaagtctttacttaactgtgatgaacatagctctttccttatttatttatgatatatctctgatctgtcgtgagaatctggggtatgatttttcatttagaacctggtgtgtctctcatatcttttgatgcacaaagaacctgtgaattatcactgtgctcgcagcaattctagttctttatagtactcgaaaaatgttaacatgtgagggaaatatatatagaagaatttgtgacgtcgcttatgagaaaaagaaaacacaaaagaaaagtgatgaagcacatttgatagatagataggaggaagctggagcaattaaagtttttttgtttccatagaaaattatttcagcgtctgaattttctaatgagaaaaatgtgatgtatagagaaagaaatcaccagttttcctttggcatgtgtatctatttcatctctttccttgttttttgtcctgtaactagacatacaaagcttgaattttcacgagctttttcattcaaattatttgtttgctttgtttgttctgctagccctatatatagggcattgtcaactaacttagacaaaatccatatacttaagtttctactcttttgatatacgccaaataaaaatagttattttgttgtaacacagcatg

SEQ ID NO: 35078 - DNA, 3135 bp, Arabidopsis thaliana landsberg
agtatatgtagtagtcatgtacaaacatatatgaaaaattgtccgcgaaaatcttatgccatatttcgaacttagtcggcatacatacaaaattatcttgacaaattgaataaacaatgaatgtgaattaatcttgagaatccaagaagaaatctataagaaagagatttgggaacaaaataacgcgaaagagaaacgaaaacatgttttttcaacaagagtcaaacatgtcgtctccatcggcattaaaattactttaaataatattagaggaaaaacgtgacgactaagctgacgtataacatatctaatcctaatgcacttataattcatcttctactatatatatttcaattgcatccaagttgcattcaccaaaacatttatctccaatcatcacctctctctttctctctctctcgctctccttctctcgctctccttctctatatctctctcaaacacatggataaaatatcaatccgatgctttatcttcttagttctcaccagcttcgtcaccactgtttcgtgtttgagtgcagcgacagattatagagaagttggtaagctacacaagtgatcttggttcattttgttcttacaaattacatatggcttaacaaaatttttttttgcattttgaaaactaaattatatgatggatggatgaatatgtagaggatgaacacgaattcagctacgaatggaaccaagagaacgggccagcgaaatggggaaagctaagaccggaatggaaaatgtgcggaaaaggagaaatgcaatcgcctattgatcttatgaacaaaagagttagacttgttactcatcttaaaaagcttactagacactacaaaccttgtaacgccactctcaaaaatagaggccatgatatgatggtatcaattattacccattctcatacatttctctcatttataaggttcaaaatttttacatactttatactaattttgtggcagctgaaatttggagaagaagggtcagggagtattacggtcaatggaactgagtataaactcttacagcttcattggcattctccctctgaacatactatgaatggaagaaggtgtgcaacattctataactatttttatatacatgaaatgtttataaaaatttgatatactacttttatcaacaaaagggagtagatacattaaattgatatgatggcatataaaaatttaattaaatttgacataaaattctaatcattattaatgtactttatatttatagacaaaataatttaatcaaaaaaataaattttttcataaagcgaaaaccactttaccggttaaatatttataacaaaattttgctctcatttactcttgattataaccctctcaatgtacatatccttacttgagtatgaaatgaaattatataattcaaaagttttttaaagtccactatttttttagtaccataacaattgtgtattattttcatatttttattaaaagcaggtcatattttggttctgtttgttaccaactaaaattcatctctataaatataaatttggacctaatcaagatttaagcaataccataattgttgggaccaatatcaatactataacttaatataatacaaactagctttattctaaagataatttagaaacttttaaaaaacatctcatatgagtaaaaaataactcatctcatatgacttgaactaattatcaaaaaaaatctcatatgaattaaactacgaaaaataaaaaatataatatagatacaagaaaagttgttttccgttgcgagtacttagtatacatcaagacgacaagactttataatttaaactttttgcattaaaaatcgttgatgctatttaaaaggttagctgttttttttagtaagtacttagttcacatcaagactttaattgaaacttattacaattatgaatatctagataataaaagaatagttttgctatttttgattatttgtagaaagaatatatattacaaacttaagatgtcgaaaccatacttttaatctatctctgaaccataaaactttgtagatatagaaaacaaaatgttctttcttgtgttgataattgtttgatattggagccatttatacctacaagaaaatcttatagaccaaaaatacattaacatatacacaacacattttgaggcattaacagacccaggccatgttaataacattttatgttattctatggattcgcagatcaagataaattgaaaactgccatttttagtctagtttaggattctcctatttaaatatgaaaaatgatggcataaataattcctacaaaaaaaaatccaattttaatagttttaattatagtgttgaatttatatatattatctatttgatctaaatgtttaattgacacattatttcttaatctagttacttaaaagttatgctatttgtcgaggtttaaaaaaaaaattaacttttgataaattaatggcatagaatcttatagtatgcaaattaaaagttactttcaatttttacattccagttaatatatatagagtatatggtaaataataaatggcaggtttgctctcgagctacacatggttcacgaaaacattaacggaagtttggctgtagtcacagtcctctacaaaatcggaaggccagattcttttctcggattggtataaatcgctagaactattagttattaagcttttaaattttataaataattaattattatcttaactaatcttgatcttttttattttttatttttttggttagctggaaaataaattgtcggcaattacagatcaaaatgaggcggagaaatatgtagatgtgattgacccaagggatattaagattgggagcagaaaattttatagatacattggatcacttactactcctccttgtacgcaaaatgttatttggaccgtcgttaaaaaggtaaatactcatcgctattatcttctcttttttacttaatcaaacatagcattaatagatcattacaaggtactaatagtgtgaatatgcatatccaaaaagtttatccatctacatgttaactaggtctatttttccaattttaaattttgactttttattttaaa

SEQ ID NO: 35079 - DNA, 1413 bp, Arabidopsis thaliana landsberg
caaaaaatatcaaagagtcattaatagaaggacgagaaagaaagaccaaccctgaaacatggctgaagaacaacaaaactcagatcagagcaatggtggaaacgttattccaactcctgaagaagttgctacgttcctgcacaaaactggtgaagaaggggatttattcttccctcaatatcttttctcaccattaacggggatttaggtttttggtccatatatataaacagagctcgtgattatgtatagcgccttgtcacactaaccaaaatcaagtgctttccgatcattaaagttatattttgttaagtttaacgaatcttctacttaaaattaagattgactcatatatcactaatgtgattttaatcatctatggacccaaaaattctgaaaattttaaattttggaagctaaacaaaaggaaaattaaataagaaatgtaactaaataaaattataaacaggtggatgggaaaaatgttgggaagacggggtaacaccatgggaccaagggagagccacacctctcattcttcatcttctcgactcttcagctctccctcttggccgtacccttgtccccggctgtggcggagttagtcttctctctttccattttggtttggtttgagttcgagctttttttttagtttttatatctttgtagtttagaacatatttaaggatttggagattacaaccgaatctagtttgagttggtaacttggtatgataggttttcggattcaaattctaagacttaaatgcttgtacattaaaattgtatgttgtaatattattatgaacgtgagtagggacacgacgtcgttgcgatggcaagccctgaacgtttcgtagttggattggatatttctgacaaggctctcaacaaagctaatgaggttaatcataataactaacttctggtagttaatcacctcacttcctaataattaacgtttgtctttgaatactgaaaaaataaatcactttccgttgattatatatatatagacttacggctcctcaccgaaggcagagtacttttcgttcgtgaaggaagatgttttcacttggcgtcctaacgaattatttgacctcatcttcgattatgtgtgagtttattaactatgaaaacataattttagcaataaggaattgaaaatccaattaactaatgtagtaactaacaggtttttctgcgcaattgaaccggagatgagacctgcatggggtaaatccatgcatgaactcctcaaacctgacggagaacttataactcttatgtatccggtaattatttcatatttttgtcgtgagaatgttccatatacaaatacaatgatatataaatatatgaattaatactttgcctttctattaattagatgaccgaccacgagggtgg

SEQ ID NO: 35080 - DNA, 2435 bp, Arabidopsis thaliana landsberg
ccgggggggggaaagacaacacagagaaccaaaacaaattaaacattctaagacagcgacagaacaaaacgggaaagggagcacagaaaagcagctatagaaaaagatacacacagttgcaacctatattgcggaacgcaacaaaacaaagaaagaaacaaaattttgttccttcctcttctacaagcaagtacgatcttttgctatattttgcagacaaaagtttcatcatggtctattcctctaagaagctgttcttgttcttcctctcgtgcattatgctgactttcaactataacactagtggcttcgtagccgcagcaaatagcataggcttgaactacggcctcctcggagataacttcccaactccatccaatgttctcaacctttacaagtccataggcattacaaaaatccgaatcttcgacccaaaaacagaggttcttaacgccttacgcggccaccgtaatattgaagtcactgttggcgtgagggaccaggacttgggtgctctttcagctaacgaagaagctgttaagggctggtttgcaaccaacatcgagccttacttagccgatgtcaacattgcgttcattactgttggtaatgaagtcatccccggaccaatcggtcctcaagtgcttccggtcatgcagtctcttaccatcctcgtcaagtcgatgaaccttcccatctcgataagcaccgtggtggctatgtcgaatcttgagcaatcatacccaccttctgctggagagttcacgtctcaagcgcgagaacaacttgtccccgtgctgaaactattgtctcaaacaagtacgcctattctcgtcaatatttacccttactttccttacgcatccgacccaacgaacatccctctagactatgctaccttcaacactaaggccaccgtcgtccaagatggaccattgggctattcaaacatgtttgatgcaatctttgacgcattcgtgtgggcaatggagaaggaaggcgtgaaagatttacccatggtggtgtccgagaccggatggccatctgccggaaatgggaacttaaccacaccggatatcgcgggtacttacaacagaaatttcgtgaaacatatagtaagcgggaaggaaacgcctaagcgacccaacaatggaatggatgggtttttatttgcaacgttcaacgaaaatcaaaagccggccgggactgatatgaagcccatctataagctattttaagtttgaaagctgcttggactttccctattcactaataataatctctgctagtttgttagtgaactaagattaacacatgttattggctattggcttatgtgaaagtgatgagatctggtagcgagcttagttgactttttaataaatctgaaattggtagttgatcctcttactgcgtcgtttatggttgagccccaattttgtttctcgttagttaaaacatctttagcaaacatattcaaagttaatcgtcttctataatccaaattaaaattttcacttctcactttgaaatataaacattcttaaatggtcttgttaatcattactccgaccccaaaaaccattacaataaggtcaaaaccttataatgtcatctcatgctaatgtatatttgtacacaaatgttccttctcaatccaatgaatctctttttttactccacattggcaatccacaatagtagattaagagtttaaaagaagacattacatagacaactagacatgcattgccattactacaacacgttttcacatactaacttcgattccaaactaccacgaatgcaatttaccattgcttcttatttacaattttgttgagactccttcattttgaatccatgtcttctccttcctcgcatttatcaaaacacattaaaagcctgtttttagaattgccgacaaggaaaaaaaaactattctacactaagccacaaaaataacttaaaaccaaaataaaaacaaaaggaaagtgatgcttagattgcgatgtggtagggactcggtgagggttttggaagagcatgacaaaagatccgtgccattgatctctattaacacaccaaaagcttcttcttcttcttcctctcgtctctaaaaatccttcctttctttctgggttttctcgaatcttcatctctcattcaaacccacaagtccgatctcgcgatccaaacaccatggaagaggttgaagaagaagtgagacgaatcgtcgagctagatcagattgttcatgactcttccacatccttcgtctcttcttcttctcaagaagagctttctctccgtaacagagcctccgtcgttgactcatcaatccgccgtcttcattctactcttgcctcaaacaaacatctcgatcccaagcttttcgaaaaggttaatcttttataacctatctctctgtctcg

SEQ ID NO: 35081 - DNA, 2889 bp, Arabidopsis thaliana landsberg
  unsure (1)..(2889): unsure at all n locations
catgattgccaatacacaggctccggttctagaaagtttgagtataaaactaattagtcaaaagagttatgcttatagagatattgaaagtatgtgttggaaccgctattgaacgatgtgtgcgtgagctatgtttcgagagtgatacttgttcaattgggtctgctctagtggtacttccaagtagcttgtgtacacgttcttcagacttcagtgcttgtgactttgatgctgtacaatgtggttcttatggatctgttttcattggtttcttttctgttattagaatgtcccacattaactgatctcaaaagctagctctagagttaaagattgtcaccttctttatatattgtccaaaaatattaatttcaaccaatatggatattctaataggcctcctcgagatgtgggtgtgaaacgatccaacagaaatcagtgtaagcctaacatctcgaaaatacaacaagacattccacttgtatatgggccacataggtgggaaaccattttttggaaattttgtttgttgagccaaccatgagctctgataccatgttgacatttctaaacttatgctcaaataagctaattgacatagaaatctaatattggacaatacaatagctcaatgagctttattgaaatgtaaagaatagaaatgaagaagctttnnnnnnnnnnnnnnnnnnnnnnatactttagatttgatttcataaaatggtgaagaaggagagttgtttccaactctcaaagtcgcttacattgattctcatagcagcatatatatatatatatatatatatatatatatatatatatatataatctaagatactagacaagcctaatgacataagataatgggcttcttatgaggctaattgttggatttgtttgtggcctctaatactctcccggaaacttggcgtggtgtgaaagcaacatgacaagtttgaacttcaaatgaaatgtcagcgcaaatggagatgacttgacaagagcatgagtagacaaagcaagatcatttggatgtagatagcatcatctcttcaccacaaaatcacacattagtgtgataacttttcaggttcttttgacctatttgtctcacgaagaaaccgagttttctttatctggtttaactcccctaagctgtcccatgaagaagaagaattctcttcccacaactacttagatcctacttgctatttgctttttattctttagccaaccacaatttgcatttacacaatctgtttttctctttgacattttatcaaacagcttctgtgcgctcagcaaaaccagaaacttgctcccttaaacacatccttatcaaacccaagtaagttatgttgcattctagcttcttaaattccacgtctataaatctaagccaccagcggaatcactaaacaaatgactactctcatgatctaaccctatatctctagccatgtttccctctttttttttctcaacccatcaataacctttgttctgtctcagatgaaaggacaaattcattaccttgaatagtgttgttgtggttacttgatgggattgagatagaaagggcttgaaaacacgatatgtgatatttatactttgcctcttctttgtcgcaaatgtcttttagtttggagcattctctattcacatcatccaatggagaatagcgacgtttgcaacaccttggcgttttcattcacaagctctgatgccaagaaacgcaaaaccagaagagcggaagctagaagcttgtgaaaataagacccaaatcaatcgcctaggctctgataccatgaagacatttctaaaacatgaatggtttatgctcaaatgagcttattaacatagaaatctaagattgaaaatacaatagctcaatgaccttttatcgaaatataaagaagagaaagaaagaagctttaggtttttcaccaaaaacactaacactttatatttgatttcacaaaatgatgaagaaggagagttgttccaaatgacaactctctaggttaatcacaatgcttacaaacataactatatatgtgagagactacttgctagataacctaattacatggacttaaatacgtaaatttgttttacttctaaatacaatattaactataaagagttgataaaatgaacatcaaagcgtctgtagtccaacggttaggataattgccttccaagcaatagacccgggttcgactcccggcagacgcattttttttgtattactgagattttttttctttcgtcaggacaacttcgccctgattaatcagtgaggctttttgtcccaaatttttagtaatggaagtaatagttttgtactaaacacatactgtatccttgcataataatactcatttttattacacaaagtaattaacaagaacaaaaggaaaccaaaagttccatcagaaaaatgaaaatctaccaatgctagttcccatcttcagaaaacaaaagcatgaagggcacatcgtaaattggagaaaccatgaaaggtacgttctgctaaacttcttcacggagcagctcaagcgcgagatactgtgtctctatcagaagctagacaagctatacaccagaatccacgcaagctgaaatgtaattcaatcacaaccaaatcaacttttaagattgaagaaaatctagggattatcttaaactagagagttgtagagaggaagagagaagaaatctacataccaggaataaacttagagaagcaaatagaccgtcctggagcaaagctgcgtgaccaccgaagtcttcttcatcgatctttagaaccaatgcatagtaaccatatactatgccagaggagattgcaagaaatctgccaaattttcagtcaacgatgctact

SEQ ID NO: 35082 - DNA, 1260 bp, Arabidopsis thaliana landsberg
tatgctgccttgatcatggaagaactagatcgcgacaacctcggatatattgaggttcgttgtctactatctaatggtacacttgtttaacatcactattaaaaacatggttaaatccttaaaatcagttgtaaatgtatttgttatatatttcaatgtgtttgaaaatatagttgagcaatggtttacttgcagttacataacttggaaacattgcttctccaagttcctagccaatcaaataacagtccatcttccgcgaacaaacgtgcactcaacaagatgttgagccagaagctcataccaacaaaagatcgaaacccggtgaaaagatttgctatgaatatatcatacttcttcttggaaaattggaaaaggatttgggtgttaacattgtggatatccatttgcatcactctcttcacttggaaatttctccagtataaacgcaaaaccgtgttcgaggtgatgggctactgtgttaccgtggccaaaggcagtgcagagaccttgaaattcaacatggctctcattctcttgcccgtttgtaggaacactatcacttggctaaggaccaagtccaagcttattgggtctgttgttccatttgatgacaatatcaacttccacaaggtaaacaaacagacatattctaaaaccttctctgttttaggaatttcttataatatactgatgcttacaaaattaggttatagcggtggggattatagttggagtaacgatgcacgccggggcacatttagcgtgtgatttcccgcggttactacatgcaactccagaggcatataggcctttaagacagttttttggggatgagcaaccaaagagctactggcattttgtaaactcggtagaaggtataaccggacttgtgatggttttgttaatggcgattgcattcacactagccacgccttggttcagaagagggaagctaaactatcttccaggaccattaaagaaactagctagcttcaatgccttctggtacactcatcatttgtttgtcatagtctacattcttcatgttgctcatggatactacttgtatctcaccagagactggcacaataaaacggtacattgtatttagctcatttgtctcacaaggctacatatataagctagttcgttcataatcatttggtcatataaactgttgcagctttggatgtatttggtggtaaaagtggttaaatacgcgtgtgaaaggttgataagagcattcaggtcgagcat

SEQ ID NO: 35083 - DNA, 3874 bp, Arabidopsis thaliana landsberg
ctctacgattgcaaggaaaaccgtatagggaaattctctaaacgtgttatttcattcctagtaaaataactgatataaatgaaacagatcgatctctgacatgtacgatattttgagtaattacgttttcagttctagaaaagaacatacaaatggatatcaagagaatacttgattcaaggaaaacatcgagcgaagttatttacacaacttgtttcctacaaagaaagaattggctttaagggaacatatcaatctctaacatgtataccggatttgtagcatttgtgttacaaggaaaccgtagaatgaaattcttgacacatgtttttcttgtgaacaattaactgactttcaaggtactgatcattctttgacatgtacaatagattgttgagtatttgcgtcttaactattgggagagaagaaaccaaacgagattaagatgatacttaatgctagggaaaccttaaagtacaaaattttgtgttaattcctaggaacaatcagttaactgtaagggaacatatcattcttagacatgtacgacaaatttggagcatttacatcataacttttgggaaaagagacaaaagaagatgaaacgaatttaatgtaagtgaaaccgtcgaatgaaatttctcacacgtgttatttcttattttcaaacaactaactttacagaaacatatcaacctctgacatgtatgacaaatttggatcgaactctgatctttttaaatgtcggctctataaaaaaagttcgttagtctcttaatttttgttttaaaaatctcaatcattacaataaatatgatgttgagattgtattattttattaatttgtaaatatggacataaacattaattcaacattagtttttgttagagaaatactgtaatataccacactgttatgtttttattccaaaaatgccaatactagtttatcttctcaataatatcacaaggttttgtataaaaatatttattcaaccaaaatgaaatacaaataaaattaaaatatgtatatttgagttgcctagctctttctaatttaaggtttatatttccatcatttaaaagaaattttgagtcattttaatattaaatttgttgtactattaggaaaaaaatagtgattgtatttaagaacaaaaactaaaaaatatagtattttagagaattttccaaaaaaaaaattcacgttattgagttattcatttataaacatttacttaatttatcacaacataagaattttgttccctagtttcaaaagtttcttttaccgaattctaattatgtaaagagataaacaatttatgcttttataattttttattttgtataggtcttaaaaaatacgagattctattttttatatgagaaaaacaaatggacgttttcgaggaaaaagaggagaaaagaaattataacggcaaaaaaaaagttgctggtttaggcaaattaataataatttgtgtaaagaaaggaggacaagcgtgaatcagaaaagaccactgtaaccgtagctttaaagcggcaacgcgccgcctcacacgacaacctcgtaaaaccgaattgaaacaagccacgtgtcttatcctaaagaacgtgtgatacactctccgtaagtgagattgggagtgagaaaagaatttgccaataaaggaaggatcaaaattataaataaacaaaaaaggaaggaaaaacaaaaaatcaaaagctgagaaagtaaatgggaaacgacgactgagactcttcttctccttctccttcttcttctacttatttcatcgtttcatttcttaggtttctgatttcatcacaacctctggatttgatttttgattcggaggtatataaaaaaatgtttagtggggtttgcgattcgatgaactagggtttgtaatttcactatcttcttcttctcttcgatcgtttactcatcgggtgagaaggaagcgtctttcatgtgttcttccgtgtaatcgactgttttattgggcttagtagctctaggtaaaccttaatttcttcttcttcagtacttgattcatcggatctgcgtttttcttatgttttttcttctgggttttggctcagagtcatgatctgtagctttatctctgttaggaccttaaagttataaactttgatttttctgtaatgggtattgattctactaatgaaagttttcgaatcttatggtaaatagttaacctagttggtttcttcgttttgactagctcgtttgtcttaatttgggtatgtgcatggtctttgagagcgaaagtagtttttttttgtttcaaggttcttgttttcatttttgaagcaagtctttcatatttgatatgttaattttgatgatagtaagatcattttactgatggctagtgctgttaatgagactttgtttccagtttttgagctaatgcttcttgtttgtgtttatctttgagtctaaagattttatttgtgtgtacttgcagtttggtcaaagaattcgtaacaagtgaatcttagattgggaagatgctagaaggagcaaagttcaacgtgcttgctgttgggaatcatcacaacaacgacaacaattactatgcttttacgcaagagttttatcaaaaacttaatgaaggttcaaacatgtccatggagagtatgcagacgagtaacgctggaggatctgtctcaatgtctgtggataacagtagcgttggtccagcgatgctcttattgaccaccgggtttgaagcctgaagcattactactctcggttggcaaagcgtgtttcgccgggaagagtaccccatgcgttgaaagatgatgctttggctcaagcactgatggataccaggtatccaactgaagggctgacgaactatgatgagtggacgattgatctgaggaaactcaacatgggtcctgcctttgctcaaggggcttttggtaaattatacaaagggacatacaacggtgaagatgtagctatcaaaatacttgagcggccagagaacagcccagaaaaggcacagttcatggaacaacagtttcagcaagaggtgtctatgcttgctaatttgaagcacccaaacattgtgaggttcattggtgcatgtcgcaagccaatggtgtggtgtatagtgactgaatacgccaaaggaggttcagtgaggcagtttttgactaggagacagaaccgagccgtccctttgaagttagctgttaaacaggctttggatgttgctaggggtatggcttatgtccatggacgcaacttcatacacagagatctcaagtcagataaccttctcatctcagcagataagtccatcaagattgcagattttggtgttgcaagaattgaagttcaaaccgaaggaatgacaccagaaactggaacttacagatggatggctccgtaagtttccaaagggacacatgatctttttaacgcactttatcattcttgccttctgcaagttacattaatagaaaaatatgtttcttttgatgcagagagatgatacagcatagagcctacaatcaaaaagtggatgtgtatagtttcgggattgtgctgtgggagttaatcacaggactcttaccgttccagaacatgacagctgtacaggcagcgtttgcggttgtaaacagaggagtgcgtccaacagtcccaaacgattgtctcccggtgctgagtgacattatgactcgatgttgggatgctaatccagaagtccgtccatgttttgtggaggttgtgaagctgcttgaagctgcagaaacagagataatgacgacagcgagaaaagcccgtttcagatgttgcttgagccagccgatgacgattgactaagtaatc

SEQ ID NO: 35084 - DNA, 2059 bp, Arabidopsis thaliana landsberg
gagaagttggtggaggcaatgaatctaatggaacataggtatggagcaaaggactttgtgacaaccaaggagggtattatagatcttttggcaccgggaacttattatctgaaagaggttgattccttgtaccggagattctatggcaagaaaggtgaagatggatctgtagccaatggacactgattcttgaaaaggaacaaatcataaaaagtcacctgaaaatgttatgttttacttgcaccattttaatcgttttataagtttgttgttactttgatttagggacaaagaaggaatgtattctctgtttttatttactgtttgatttactctctcatgcaaatgataatttggaacttattggaatctctattttgtatgtttgtgttcttaactaagtccataagggttactaaaagatacagtaaaccaaccttaaggtgaatgagtcaaggcacaactccgatcttattggactagttgcatgaaggtgaaagtaggataggatccgatctagaactcaccgagagtcgaacaacggcaaatcgcagtctagaaggtgaccttgaagaaagctgagatagtttgttgcatgaactaatgtcacatctagcaatgtgttgaagaatgagattaaatctttctccatatttccacattcaacagcttcaccaaatattactttgctcttataatcagataatatataattatcattaacggttctagaataaacatagatagagcaaacaaaactttcactaagagatcaaagtaaaagccaaaagaaaagagaaacaatggaacctaggagttagcttaattatctcaaaagctggattcctatggggcactaatacaaggagttataagtataacaagtagctaggatagacccaagacagatgatcaaagaaggaagcagagtaacattcaaaagcatactctgtcccaagaaaccagccaaagtgatcgtcgcatccgctatcacacgtgcaatcgtgccagcttccgtcgacagtaaccctccgttataagtcccgcgggacagcctcgatgacatcactctcgatagtaacgataagttcacacctacaaaatccccgccaaaaaaacatgttttcaaatgattaagagagaacttttcaatcttttaccttcaagtacgtaaaagattcataaaagtgttgatcttgaaaaagattcatcaatctttttttaccttcaagaacttcagcagaaacaaacatgataaatcctgagataacgtattgtgggacagtgtaagggattactacatggaagctgagaactattccaatacaaaccataatctctgacgccaacagaatttgcctgtaatgagaaattcacatctttaggtaacccgaaaggcgaaaaaagcaagaaactaacatatacaaggatctttaccgatcttcaaacatgttgcttatatagcttccaacaacgaggttaaccggtagaacggttagaccgagacagaacaagaagatggaaacagaactcatggaccatccgaagtaatatgtggttacaacacttgattctgatagtagaatctccattgcatacttaagcatgaagtatatcaacaattgaacctaaaagcaataaaagaaaatttgaacattcgagatttaagtaaatggactttttatagagagaaattaagttttggttacctttactgaaggagtgagcagtttgtaagcagctacaaaggagttagctggtttacgggaatcatcagaagattcttcgcttccatcaccgtcatcttcttcatcatactctgtttcttccgatgcaagcaacagcggttttttaagacctttctctatatttccatcttgatcagcttcaccacaaaagatttgctctaatcagataagaatatagtaaaaaacagacctatttctctttagttccataccagaggtagattcttgtgaagtatgaatctcttcaggctcacgtgcgggttcacgaaacgagatagctaaccagattaagtacaatagccaagcaacag

SEQ ID NO: 35085 - DNA, 1400 bp, Arabidopsis thaliana landsberg
cagggtcgattctgttgtctttcctccggcggcaaccagagagaggttagttttcttacttacttcccttgattcttcgaaaggacaaatcttgtagaatctgctgaacccaatcagagcgtacataacatggggtcgaattgtctgactctttttgaaaggtcttactcaattaattatgcttgttactgataaggttctgaacaagtttagcagctcaactcttagctatatgtctactgtatctagtctaggactgagtgtagcagattaaatccgctgtgagttagattcgagagtaggagtttcataagtttgtgttgattggccatttggctgagagtttcaagttcctctttaatcaactctctctggtttggtgaattcgtatgagaatagcagttggttagcaataacttcattccaggaagtacaaaaacccacactttctatctctctgaatgaaaagttttatgacagagcgacaaaactataagagagacagataagaggtagcttcatgatttggtggctaatactctgccgttcgatttccttgattgtgcaggagcaagctcgtaaatcattggaaagcgctcttggtgggaagaagaatgagtttgagaagtgggacaaagagatcaagaaaagagaagaatccggtggcggaaatggtggtaaaggtggaggaggaggaggtttgcgtttggacgggtggtaggttcgccttactcggggggcgattatctgtaaagaggctcaacatattgcctttaccctcttagcaatacttgccgtggtatgctttaagaaaatgcatttggtcttttatgaatatgacttttcgttgttgttggttttgaattgtttaatggttgctgcagtatatggtggttgcgaaaggtgaagtcatggctgcatttgtgttaaacccgttgttgtatgcgttgcgaggaacacgggaaggtttgtcttctctaagctccaaactcatgggaagagaagcttccaaagtgagtggtgacaactcagaggagatgtggaagaaggaaggttccactgctaaagagagcgttgtccggaaatggggaagtgactgaaacacaattcttaaagctgactcaagaagaatgactttgagtgtttttgtaacatcaagatgagataatatgcaatcgaccttttcagttttgtaatggaggataggtattttctgtgaacaagaaagagtgactctgtttgtaacttccatcatccatttttttaacatcaagaggagagcaaatatgtctcatagataaatgcttgtccacaaataatgagcaagcttagtgttgtagcctgtaggttgtgtctatacagcttttctgtcgcgcatcttaaattataaagagatggac

SEQ ID NO: 35086 - DNA, 1392 bp, Arabidopsis thaliana landsberg
catcatctcgctcaagatgatcgtttagttgaaaagatcatgaggtttgtacttcttgatatttctttcagtaactacttccgacctttttgcataccatgagaatctcttaccattttgttttataatctaatgtgccaaaaactaggatatatgataagagactatcatcaaagttgggacacatttcattctggtgttttccgtcacctcctggattaacaggttgcaatacttctcttttacttaatgagcaggatctaatctcaacgaatgtttttctctgtgtcaatctttagacagacttccttaacattcttggtgtcttgcagagacagatgacaattgtgccccatttgttacactgatggacatcataacattccccaaggtaccattcatgaatctatttgctgtattccctgaaaagattaagaatacttttatgtgatcgcctacgttgttattacaggttacatgcaagtacagatgtattgttcgggttgtagctgcatatccttggcaagtagaggatttctgttcagatgagaatcgccgtcaccaccaagttttgttgacactggaggattcaacagcgactttagaggctttcttatgcaataaagacgcagtaaatacaccatttggtctatttgcatctaaactgtcaacaaagatcgtctctgatagcctaatctagattttattggcaggagtacttttggggtttagggtttcaggacacagggacgctgaggaagaagcggaattggttgctcggtatacgggaaagctcgaactttgtggctccaagaaatccaccatggatcgagtgctgcatcctctcctactatactaacaaagctgacccgtggaatactagattatacagaatctttggtactagactacttcattaagtatttgtaagtgttaaaagaggattaaatagtttagtattaggctcatgttaagaatgttggatttggcttacttaagtatggtagttgtgttgttttagttcatgaagaccttgtaaccaaaagaacatcttcatgatattaaccaaatccaaagactgaacacaaaaatatcttcctctagaccttggactaaagagttaatagaagcagcaggcaatatacacattttcattgtggaacaactataccttcttcaaagttttaaaatggtttcactaacttgtaaattcaattactaaataaaaggcagcaagaaatggaaagataattgctacatttataactctacttgtaaaaattctgtcatcactaaggtcaacaaagaaacgaatacagaatcgaaaaagaaaaagaaaagaagaaacagagtaaacaaaagtcaaactatgctttgcttactcgttgaaca

SEQ ID NO: 35087 - DNA, 3774 bp, Arabidopsis thaliana landsberg
tgctacaaccgaagccaagcgacctagcatgtggtgacgagcatcaaccaccacgcgcttcgcgaaattcctgatccagacaccatttttcactcagctctgatcagccgcaagcttactactccggggtgattaaaagtgagcagcttattcaaattagggttttgcggtgccttttagcaccattttattgggccgtgataattgtctgttgggttatgtacttagtttaggatagtcaggcccatcttttctcttatgttttatatgtaaattttaaatgccaaagggttgattagggaaataatataaaatattggggtttaattgtgaaagtagaaaagaaattagaagaagaagaagaaaaaggagaaaggtatgatacacttttacttacgtgaatgagtttgtgtgacaacaagacaagcgtggattctggtactcatacgatagaaacggttgatgttagagctaatctcaattttcaacaatcagataaacaaatacaaaaacattctctttccttgaaaatttacacaccacaattttggaaaaatctataattaaaaatggtcggaaatggaaaggttttaaacttgtcggagctttctcaacacagaaatcgccatgttaagtgagttttatgttggagacatagatctctctaccaaggccagtgatattgctactactactaccccaaatcagacagagcataatcaagataacaagagctttgaattgaagagttctgagttgttgttgattaagctctttcagtttcttgttcctcttttcatcttaggtttggctcttggtgttcgattctacaccaaactccatcatttccatgaaaatcgatttgtggtttgggggcaatcaagaagatttctatggactatggttattggttaacattatttgcttttatatctctctgtattgtctgtgtataagacatcttatatattaatcatgtaagtgacattaccttagtttcttcaaaactatgcagaattggttctagtcttcacagtcatgcattatactcctactgattttccggatagttatagcatgatcatgtgagcataataaatcgataaaatcttggcataaaacatcaatgaattctttattaatttcttataaaattattgtttataactataactttcttatttataatatctttaaaataaattgatttagaaattccgaaaaacataatcaggaagagttttaaactgttagtattaaatttcattttactattttataaaataatagaaatgaaatctatgaaagtaatatttacagatttattctttatcaaaaaggaaaagaaaaggatattttattaaaaaaacagtgataggacgaaactgttaaatgggctggagagatataaactgttagccactacctggcccataatatatcacatcgtctctttcgctgcacttggtggttctccaattccgtatcgaaaatcttcttcgggtcagacgatctgaagccgatcgctgtagaatcagtttcgtgctccgcagtttctcgagtttcctctcacttcaggtagtcttcgacaccctaatcatgttagattgatattaatgttgaattttagctgatattcaatggttattgatccagatcttcatagaagaattcacttacggagagggactttttcgtagacgattctcactggatatctatcacccggtaagatcgtcttgctcgaaaagaattgaaaagtttttaagtaattgaataaggaactgtgaatcggagaggcttacttttttgaaaagatctaaaccattttagttgatcgtcctcaaatatctcacagaaggtacggattttgaaagatcactagagatagctacggattttgagaggcggatctgtccaggtcggcactgtgaaagagaactacactggttttttccagatgatatgaagcttccgtgaacgaatctgattctaaggtactcatcgaagagaatctgggattgtattgatctggtcccttagcttccagtttggctataactctgacaactgttgtaagtgataagttgtgatcaataatgggtacggagaatcagggctatccaaattttccagctaggcctgcttcctctccatttgcatctgctccgccaccagggattcctcctcaatcaggtggaccacccactggatcagaggcggttggctttagaccttttacaccatctgcatcccaacctacaagacctttcactgcctctggtcctcctccggctccaccagtgggtacgatgaggcctggccagccgtctccttttgtttctcagattcctgggagtagacctccaccgccatcattaaattcgtttccttcaccagcatatggtcctcctggtggtgccccttttcagcgttttccatccccgccattaccgactacacaaaaccctcctcagggcccaccaccacctcaaactcttgcaggacacttatctcctcctatgtctcttcgcccacagcaaccgatggcacctgtagcaatggggcctccgccacaaagtacgacttctgggctacctggagcaaatgcttatccccctgctacagattatcatatgcctgccaggcctggttttcaacagtcaatgcctccagttactccgtcttatcctggcgtgggcggttcgcagccatcttttcctggttatcctagcaagcaggtcttacaggctccgacgccattccagacatctcaaggtcccccaggaccccctccagtctcatcatatcctcctcacacaggaggttttgctcagcgaccaaatatggcagcacagcagaatctgcatccaaactatgcacctcctcccagtaacgttcaaggcttgactgaagattttaactcgctatctctttcatctattcctggatcgctggaaccaggacttgatcataaatcattcccaaggccattggatggtgacgtggagccaaattcatttgctgaaatgtacccaatgaattgccattctagatatctacgactgacgactagtgctataccaaattcccagtctctggcttcaaggtggcatttacctctaggagctgtggtttgtccacttgctgagactcctgaaggggttagtttccgttattattaacaagaatgtctttgcgattctttcatgttctagtgccacatataactttgcctttctttgcaaattgtcattttatctgttcaggaggaggtaccacttattgattttggctcaactggcatcatccgctgcagaagatgccgtacctatgtgaatccttttgtgacttttacagattctggaagaaagtggcggtgtaatatatgttcgatgcttaatgatggtaatttgtcaaaaatttctttttccataaatcatttgatcgatgatgctagaacttcaatactttcaggcatatatttataagatgactattcatagttatgggtttaaatttcttgttcagtgcctggtgaatacttctcacatttggatgctactggccgaagaatggatatggatcaacgacctgagctgactaaaggcagtgttgaaatcatagctccaactgaatacatggttcggcctccgatgccacctatctacttcttcctcattgatgtttcgatttcggctataaaagtggaatgcttgaggaagcatgatcgatttgatatcccacttgtaattttgctggaaatgggcttta

SEQ ID NO: 35088 - DNA, 2234 bp, Arabidopsis thaliana landsberg
gaaactctcggcgaaaagcattcagtttggtatccatcattttctcaaaggcttccaccaaaagtttgttgtttcgattgtggctagtctcttcctcctcagattcagccattctttttgcaatagagacaacaaaacaacaccagtaactagttcttttgaaacaaacacgaaataacccttcagatgccctagaaccctaattacgacagtttcacttgttcggatgctaaatattatcataacgttcccaaaaattgcagaaacaattttaaaaaatactagagtatttttcgaacccgtgacagttcatttcgcaattttagcatgcaccaaataattatgaaaattaaatcaaggtgacagacggacacagatctgaagatgaaaatacacaaaatgataacgatggaaaactcaactttcagagtgtgctctgataccacacgatgagatcctcccaaggactcgacactcttaaggttagcaaaggatactagtggttgtgaagccgtgatgatggatagatttaaatgaatcgatggatatcacagaagcttgcggaagggcttcaagatatcgagacttagatcctttggatatgcgcaccaaaagagactaaggattttgctggatatacacaccaacaagatgatcttcttagaaaaggtttctcattaaaagaaagataagttctcagcagagaatacaagagtatataaagagaaggagaagagaagatgaagaggcaagtcttggaacatgctccaaggctgcctagaaaacaacagaaattaaaaacaaattttgaaattcaaaataaactcttcaactactaaggccacgaatttgtctctttattttagtggggttgggccttgaatcatcaaaatgaattatatgaagtgaaaacataagcctcattaaaaaccttcctttggaaaacccagtgggacaaaaccaaaggcagggaaaaagagcactcatgaatcacttatccatcttgatgaggtccttgagcttgaatcaaaaccaaagaggtagtgacttggctcaagtcatttggtcggtcccaaatgtggttaaacatcccgccaatggcttggttgaatagcttagctctagaacgagtcattggaacggccggtgtgacaagaacatcctccgctacaagcttctcctcagctacaagctcatcctcagctacaagtttagctccttcctcggctacaagatcacgttcatgctccggttcatgctccatatcgttaatgctatccatgatcatatcacgaagacatcccaaacgtgcccgggagagggccttctcaacctcgtggcttcttccggtcctaaattcgagctccatgtgcactgatcaaaggcctttgggattgaaatcaagaaatcgcgatggctttcatcaaagctcttacagttcagcaccaaaagcgttcgttggaaaaaaggaagcttcgaaaaaagattaatcgaatgttacgtagggtcaccgcgatatcaagggagctttacaccctcactctcacccctgtgactggatcaagctcgaaatctccgaatttgctcgcatcccgaattttatgatgttgatccttgacctcgctggtcaaggagtccaagtgttctctccgtcgagaaaggtttcctaactcgaaatgcgtgcgtggtgaaacttgtcttttttgctgattgcttgaataaacgtcattttgtttcctgtatttgcatgttcgcactgtcgaacttttctttgctttgtttgttcgcacaatcaaactcctttcccttttaatgaataaaacaaatttgattagaagctgaactcgtttccgagccgcttacgtacccatttcgggatcaagccacaccgtagttcatgtacataacaaaaaatgcgtgttacttaaacataaaacttctttaaatggacgttggattggcctgtcttctaaatcttttaacctgtaaacaccattctgaaccacttcggtaacaatgtaggtccttcccaattaataccgagcttgcctgctcctttttccttcttattgtcaaaaacacggtttagcacgaaatcacctacaaagaaaggcctgcttttgacttaggtattgtaatatcgagctgctgcttgctggtaattttaaatatagattgaggcctgatctcgcctttcattgataatatatatcgaatcatcgagcattgcagag

SEQ ID NO: 35089 - DNA, 1469 bp, Arabidopsis thaliana landsberg
  unsure (1)..(1469): unsure at all n locations
atccaagcacgccttaacgctataatgttgctccagcgacgccttaataagcatgcaccggagtcaatttattgatccatggccatatacatatatgagcgtattagctgcactcatattcatcttaaaccacatacgttgagatatattgaagtaaaagttagctagttttatttacttataatgtatctcaatacatatagctaggactgtgcnnnnnnnnnnnnnnnnnnnnnnnnnnnnnnnnnnnnnnnnccgaaatagcaatataaagaacccagaactgactagttcggttctcggttcttcggttctaaccaaactgtaacagccactttaaaattctgaataacgacaacttttgtgagaaatttcagcaacatctccccacaaacaaccacaagtgcacaatgaccataatttcatagataatacatggatgattagaggttcaacataagtcgataaaacaacatccaaagttacaaacacatgtaacaaattgaatctaatacttttagttttttcggttctttcggttcttaggagtacagaaccgaaaatatctcatttatttcggttctcaaaaaaccagaaccgaatttcataacggttccttcggttcgtttagttcggtttcggttctcggttatttcggttcggttcctcggttccggttctttttgcccaggcctacttttgagtactatttatcaagcagtattagcacttatctgtgtaccacttgtccctgttgtgtgtggtgtaaccgattcctccttggtacctggcccccttgtgatgtaggctcgatttgtcgaggctgcagaccagcatacctaagaaagagttagcaatggcccctaggaggtagccttggctgggacctgggcttgcacacagcttcggctagggagcattagtagtacacacacaggacccgtcatctgacactagtcatcctttgatacatgctcgggacttgcagggtctagtctgggggagccaggttgtgcgttcggactccctggatggtggttctaggtactaggatacccgtcacagagtggtggagcgtgcaggctcatggtacgggaccaggctgagcggctacacggctccggaccaccctaggagacaagtgttccttctctagtttcggcccccaggttgtcggacccacaggacttatagttccaagtactagggtacccgtcacggagcggtggagtgtgtaggcttttgggtacaggaccaggctaagcggccacacaggctccggaccgccccatggaacgggttcccattccttagaaccgcccccaggctatcgggccctgcctgtttcgcaaggaggtcctaacctacaagcctggttgtccaattcggatgtcattatgcctgatggaaagggaactgctcgggtgggttagataaaataacatccagaagtctacatggtaagacca

SEQ ID NO: 35090 - DNA, 5833 bp, Arabidopsis thaliana landsberg
tccggaggtaatcaaggagggggttaaaagatttagggttctaaccttggaattaaatttttgggatgttacagctgtcaggggcactgtgcagtcgaccgttgcgccgaagagccgttgctccactgtcacactggacagcctggtgggcaccgtacagtccggtgaattatagcggagtggcgttggaaaaacccgagagtggtgagtttggacttgtacggtccttgtgcaccggacactgtccgtggcacaccgacagtctggtgcaccagaccagggcacacttgggtttctttcctcctttctctttcaaccctttatttaatctttttattggtttgtgttgaacctttatgcacctgtggaatataagctagggcaaactagttagtccaattatttgtgttgggcaattcaaccaccaaaattatttaggaactaggtgtaagcctaattccctttcatttacacctattgcaagctgcaaccatttctacacaagatgttgacttactagctatttctaagttagcattcaaatcatcattaatgctccttaagctagaaattgtctcatggcaagaagataattcacaagaaagcatttcatttcttgtaacttctagagcatgagatttttgtgcttctacaaatttatcatgttcttcatacaacaaatcctcttgcttttctaaaagcatattcttatcatttaatgcatcaatcaattcattgattttatctaccttggttctatctaggcccttaaataaacatgaataatctatttcatcctcatcactagattcgtcctcacttgaagaagcataagtagagtttcgagtacataccttcttctcccttgccataaggcatgtgtgacgctcgttggggaagagggatgacttgttgaaggcggtggcggcgagtccttcattgtcggagtcggaagaggagcaatccgaatcccactccttgcctagatgcgcctcgccctttgccttcttatagttcttcttcttctccctcttgttcccttgatcctgatcactatcattgtcgggacagttagcaataaaatgaccaaccttaccacatttgaagcatgagcgcttcccctttgtcttggtcttgcttggctgccccttgtgaccctttagcgccgtcttgaatcttttgatgatgagggccatctcttcatcattaagtccggccgcctcaatttgtgccaccttgctaggtagcgcctccttgcttcttgttgccttgagagcaaggggttgaggctcgttgattggaccatttaacgcgtcgtccacgtatcttgcctccttgatcatcattcgcccgcttacgaattttccaaggacttcttcgggcaacattttggtgtacctgggattctcacgaatattattcaccaaatgaggatcaagaacggtaaaggaccttagcatcagtcggacgacgtcgtggtccgtccatcacgtgcttccgtagctccttattttgttgataagggtcttgagccggttgtatgtttgggttggctcctcgccccttctcatcgcgaatcgtccaagctcgccttccaccaactccatcttagtgatcatggtggtgtcgtttccctcatgtgatattttgagggtgtcccagatttgcttggcgttgtccaagccactcaccttgttgtactcatccctgcataaagatgttagcaaaatagtggtagcttgtgcatttttatgaatttgctcgttgataaacacagggttatccgtactatcaaattgcattccattttcaactatctcccaaatactaggatggagagagaatagatgactacgcattttgtgactccaaaaagagtagtcctctccatcaaagtgtggaggtttaccaagaggaattgaaagcaaatgagcattggagttaaaaggaatgcgagaataatcaaatgaataatttgaattaacaggtttctttttctcgtcgtcgtcgtctcttggtgaagaagaagattcgtcgttgtcgcagtagacgatcttcttgatgcgtctcttcttcttcccgtccttcttcttgtgactcgagccagagtcagtgggcttgtcgtctctaggctcgttgaggaaggactccttttccttgtcgttgaccaccatcccctttccctttggatccatctcttcgggcgattagtcccttacgtgaagagaacctggctccgataccaattgagagcacctagaggggggggggtgaataggtgatcctgtaaaattcaacactaaatgccaacaaccttggttaaaaatattagtgcgggttaatcaagttaatgagacgagctcttgcgaacacaaatagtcacagtgagaacaagcacaagagacacgatgattttatcacgtggttcggccaagtataacacttgcctacttcacgttgtggcgtcctaatggacgggagttgcactcaacccctttcaagtgatccaatgatcaacttgaatactaccacgacgttcttctttattttactctttcccatttgcgaggaatctccacaacttggagtctctcgcccttacaataaggatcaaagtgaaagcactagagtaagggagggggagaacaacacacaagactcaaatccgcagcaaaacgcacacacacaagccaagacttgagctcacaacacaatagcacaaaattcaccactagaacggagctcaagtcactatcacaaagaatcgagtgcgcgagaatggagtcttggtgcttagagatgatcaaagaatgcttgggtgactcctccatgcgcctaggggtcccttttatagccccaaggcagctagaagttgttggagaccaacttggaaggcaattcttgccttctgtcgcctggcgcaccggacagtccggtgcaccacaggacattgtccggtgcggatttctttccttctttggcgaagccgaccgttggagattcagagccgttggcgcaccggacactgtccggagcacaccggacagtccgtgcccccatctgaccgttgctctgccacgcatcgcgcgcggattacgcggccgaccgttggccgggccgacagttggctcaccggacagtccggtgaattttagccgtacgctgccgacgaagtcccgagagcagccagttgacagacgccagcctggcgcaccggacactgtccagtgcaccaccggacactgtccggtgcacccagacagagctgacttcggctgaacaaagccatctttaattccaaccagatttttcctgtttccagcacttagacataatacattagtctccaaaacaatataataagtcttagaaacatacctttatacttgatttgtactttgtccaccatttaacacttaggcacttgtgttggacactaaatcaccaaaatacttagaaatggcccaagggcacatttccctttcaatctccccctttttggtgatttatgccaacacaacacaaagtaagtagaacaagtgcaaaatcactttaaataaaaactcaaattggttttattcaattttggcatatatggatcatcctttgccaccacttggtttgtttttgcaaatcaaactcaaatctctaagttaaacacacatgttgaagcataaagagaatcattccaaaagagattgatcaaagatttcaaaaactccccctatttcccataatcaatacttctccccacaagaagccaaatattgacaagagagacaacataagaattttgacaaaccaaaaattctattctactattttcaaaatctctcaagtggtagctgatccatttattgctttggcctttattttctccccctttggcatcaagcaccaaaacgggatcaatcttggcctcataaccccattgcctcaccaaaatcttcaattaagagcaaataggcaataagagttaaaagatgaacttgaaaaagttactcttttcatcggagtgcagtggaagtcttgcatggtccaagtccaccttttcccttttaattctccttcgagactaaaacaagcaaactcaagcatatggttagtctcaaagggtcaagttgtaacacatctccccctaaaactgtgcattatttgcatagggacttgtgaggtccagggagtgtttgtacaacttgagcacaaaatataagcaaatattacaataaagcttaatgtaatatgatcaaaggcatagaacacatgtatgttgtagatcaatccaagttacgcgaatctaagacatttagctcactacgcaacctgcaaaaccttttctcatctaaaggcttggtgaagatatcagctagctggttctcggtgctaatatggtaaatgtcgatatctctcctttgttggtggtctctcaggaagtgatgccggatgtctaggtgcttagtgcggctgtgttcaacaggattattcgccaagcggattgcactctcattgtcacataggagtgggactttgcttagattgtagccaaaatcccagagggtttgcctcatccaaagcagttgcgcgcaacattgtctgcggcaacgtactcggccttagcggtggatagggcaacggatgtttgtttcttggagctctaggacactagggaccttcctagaaactggcatgtccctgatgtactcttcctatcaaccttgcatccagcataatcggagtctgaatatccaatcaagtcaaaggtagacccctttggataccagatcctgaagcaaggcgtagcaactaaatatctaagaattcgcttaacggccacaaggtgacactcccttggatcagattgaaatctagcacacatgcatacacgtagcataatatccggtctactagcacataaataaagtaaagaccctatcatagaccggtatgccttttgatcaacggacttacctcctttgttgaggcaacatgtccgtcggttcccattggtgtctttgcgggcttggcgtccttcatcccaaaccgcttgagaaggtcttgcgtgtacttcatttgtgagatgaaggtgccatccttgagttgcttcacttggaacccgaggaagtagttcaactcgcccatcattgacatctcaaatttctgagtcatcaccctgctaaactcctcacaagacccttgattagtacaaccaaatattatgtcatcgacataaatttggcacacaaataggtcaccatcacaagtcttagtgaaaagagttggatcagctttcccaaccttgaaagcattagcaagtaggaaatctctaaggcattcataccatgctcttggggcttgcttaagtccatagagcgccttagagagcttacacacatggtcgggataccgttcatcctcaaatccagggggttgctccacgtacacctcctccttgattggcccgttgaggaaagcgctcttcacatccatttggaacaacctgaaagagtggtgagcggcataggctaataatattctaatggactctagcctagccacatgagcaaaagtctcctcaaagtccaaacctgcgacttgggcataaccttttgccacaagtcgtgccttgttccttgtcaccaccccatgctcgtcttgtttgttgcggaacacccacttggttcccacgacattttgcttgggacgaggcaccagtgtccaaacttcatttcttttgaagttgttgagttcctcttgcatggccaacacccagtccggatctagcaaggcctcttctaccctgaaaggctcattagaagagacaaaccagacttca

SEQ ID NO: 35091 - DNA, 4272 bp, Arabidopsis thaliana landsberg
atatatcatttctcaaatgatatctttaataaaagctgaggatatgtgtccagagctggcaacagatgggacaggatacgttactcaacttatccctctcatcaaatctctagatctggattcgaatccggagtcggagcaagagccgaagatcatatcactcattaggcaaataatctctctcagaaacacgtatgtttctggaccagagtcgcaggtggtatcactcgtgactcggattatatctatcaccagctctacagacttggatcccacggaatcacaatggaggctcacgtcagtcacttataaaacatgccgtatcctcaacgaaatgaaggattcgaattcggagatgggatcactcattaatcaaatacgcgatctcgttgatgcagatgagagacgaaagccagagtcgaggctcatatcacgcatcactcaactaatgtctctacaaactcttggagttatactccagatagggattcgaagatcatatcactcattactcaaataatcttgctggtcaactcaatggatttggattcgcagccaaatcaggagtcggagctcatatcactcattactcaaacaacctctctcttcaactctatggatttggattccctcccaaagccgctgtcggagctcatgtcattcactactcacaaaatctctcgcttcaactatatggattctgctacggatcagaagctcaagttgctcttttttaaaataagggaactcgagccggagccggagctcatatcactcctccaccaaatttactacctcgtcaaatctaaggatccagagtgggagaagcttatttccttatgcccacacgtacaagtaagctttcacgacggaaaatttcacgtgactggaaatgtccagcggggcagcaataaaaagcgggactgccaatttgaacgctacaagttttcaggagaatgacttcactcattttcgatgtcgaggttgcaatggtgagaaccataaaggttatgagaaggctccggttgatgtcaaacactctcttcatccaaaacattctcttcagcttgtttcgtcgcaaccttctagtgttagaacgagggaatgttattgttgtgatgaagatctggcccatatattctattgttgcttggcttgcaattatgctatgaatgtagcttgtgtgaagaaacctagtgtcttatatagagactatacgaggtggcatgagcataaacttgctctgtttccaagactgcaggcttccagcttaacttgcaacctctgtgccttggctgattctagctcgcctatctatatgtgtcccccttgcgactttgtcgtccatcaaaggtgtaccggcttaccacgtgttataaggatatcccgccatctccaccgtatatcatttacctactcctttgaacaaggagatttgtgttgtagtgtttgtcgcagaaagatagacaatgattacgggggctattcttgcatcaaggacggttgttcatatgcggctcattcaagatgtgcaacacaaagaaatgtgtgggatggcatcgaacttgagggagagccagaagaagttgaagaagaagtcgttgaaccgtttgtgacaataagccatggaatcatacaacatttcagtcacccaaaacatcatttgaaacttgacgagaacacgagcagagattacgacgaggataagttgtgtcaagcatgcatcatgccaatctactttggtaacttttactcttgtgtgcaatgtgattatatactccacgacgcatgtgcgaatttccctcgcaaaatgcatcatccgatacatccacatctgctcactttagtgaactctgatggtgttatcaacgttagaaaaaaatgttcagcttgtccttggatgtgcacaactggtttcttctatgagtgcagtaaagaagatttccagctacatgtgcagtgtgccaacgtttctgagccactagtccatgaaagtcatatgcatcctttattcctaacaaccaaaccagaagagtggagagtatgttccgcttgcaaagagtcagattgtactgtgacaaatgaaacattcaactgcatagagtgtgattttgctttgtgctttagatgtgctactttacctcaaaagttgaggtataagcatgacaagcatacgctcactctttcgtatggcgaggagacaagtaccatgccatcttggtgtgaaatttgcgagagaaatataaatccacaggagcgattttatatgtgtgatgagtactgctgtgtcaccctacacattgaatgtatgcttggggtggctttatacatcaagcctggtttatcgtggatcagcttcaacaataaaaagatgtatgctctggccaacaatcatcatatgtctcgacctctttgcttcatttgcaaggagcgttgtccccacaaaatagttttcaagtacgatgaagttatattttgctcccaaaagtgcagggggaaatataggcactagaagagtgaacaagtagcttgatgatcattactaatttgttttgtgtgagtattccgttgccttgattagccacgatactgatatgtttgttgtgagatatttctacatataatttctacgcaaataagtaatttgctttgcatcgatggtatttctttttctttcaaattgatatatcttcaaagtctctggcacaatttgatcataagcaagacacttggttaaccaaactgtggtaccaagaagaccttgtataatctgatggttaactcaaaattttaatatatgtctactatccagtggcgatagtgactcatagaaacatggaaaccaaaacccatcaagatgaaacagaatgaaaaaaaataccagaaaattctttaagcacatgagatcagagggaagatatttgcctaactggaaagagaaggcaagaaagaagaagaacacactctttttcatcacattgctcattgttctgtaaatacactgtctcagaatctgctgcaactaactacccgtagataacaaacatatacacatggaatgtttgtttaatctaaaagcctttgttacagcttttccagacatctataatcattgcaacttttagaaaatcatctctttctctctctctccctctctctcaatagtgaatcaatcagacggttgatctgtattcaaaacttgatcccggttcttcagtggaagggaaagcctccaaaccggtaaccatggctgcaggaggaccacggcggcacctctgatgcatctcatcaacagcttcaggtgatcctgaaaagagtgcttccattgaaccatccctgcggttcctgacccatccctataccccaagctgctcagcgttctcaacagtccagttcctgtaacacacttcctgtaatttttccctttattgccaccctcacctgcacccaactttgaatatttagtagacatctaaagccaatcagcatgttcatcacgcaaaggaacatttcgcttgaatagctgataaatggggataaagaagaacagaacgagcatgaagattccaacgaaacttagttgtagatatatatatcaaatatgcagatgtacttcggttatagaattgcatctaactcaacctttttgatggtctcagactcttcaagtatgaaagtttaaatcgccaacatttaaccaataaaaagagtctaggatctgaacaagcatatcatagtttcatctatagtataactctctgtttcaatttttgacaaccaatgtgaaacaataacccattctatgtcctgagtggtcatggtggacacaggacgagatgagcgaagccaaagcagaggatgagcgacagagaacgtaggaagaggaagagatgatgattctgatgataaaggcgaacggagagactacgaggtttatggattctcaacaggatttgtggaaccttgccgaaactcaggattcttgttcgaattccgacgatggaggccaaactcagaaattttctcatgtttcagagttatttcctttggtttaataattcatcgccgaatcccggttatattatatttaagcaaccggttcgattgcatctcgttcggtctaatcaagattcattcttttttttaggcacccttaaacttgaaagtgtaaaggcccatatgaattaggcaatgatggcccaagcccaaaatactgcaaccgttctgcactgcaacaattcacatcaagacaaagcagaggtatacaaggaa

SEQ ID NO: 35092 - DNA, 1606 bp, Arabidopsis thaliana landsberg
aaaacctagagtcacgggtccgagagagtattggctcatcgttgtaaaattggcatgtccagctagtttccatagctttctggactcggttctaaactctctgacaaagtctccgacaccggagattggagggatatcgacggcggtagaggagaaggagacaagagaagatgctctgcttccgactccaagatactccatcaatgctttttgggtcgccgggtcgagctcctcctcctcagttgacgccagaaacggatccttgaagtcattatctttctccattctccgacgacaagagaaagagaaagagagaaagagagtgcttaaagttaaagaagaagaaggagatcaatgattttgtaatctttaggaatcaatggtttatgaattatatagaagttaatagttttattttctcttttatataatatagagaacgattaaaaaataaataaagaactagatttggtacgacttacgagggtcaggaagagtggtaaaagacagctttcacacttaagtttgtgttaatcagacagcttgactccggttaatcttattgtcttagcgtttcacagtagaatttaatagtttatatgtttgtgtgtgtgtctccattactgtataattgtcattcaaaatcaaaaggatgacgatttgatattccattcgcacgactcggctaaacaatacaataatgtaaaatgcagttataatatataaatcgtttatataagaacatgcgacaactcttttatttcttttgttttgttatatatctttgaccattcaaatctttgtgtcgtggactccatatggcctacttcttgctacgtgcggagcaattattgtgagtgtttgtgacaatgtggtagattgggaaacatacaataaagattttattctaattggccaagatagtaaagacagtagtaggcccactagagacataatgaaataagaataggcccataatggcctttctagcccaatggcatagcgagaagattacaaagtttttcttccctgccaaagatgttgggctaaatatgcccaaaagtaaataaaataaagatgttgggctaaaaagatatgatctattgaagattttaaggtttcatggtatctgtaatatacgaaagtaagttcatctttcaatgaactttgacataaaagacaagccgttttgttttaaaagtatttgtaaagtgggaagaatgtaattgttgttttttttggtcacctaaaaacacttaatgatgtaatactaatagaaagtttaattcaactgctatctaattttgttttcaactcagttaatatctgataatgaaataaagtaccaattagtaactatgtaattgtcatagttatttggataaaacaaataaccgagtgtttgatgtaaaagagcatatgaatatcgaaacgtttttggtttacaaggttaacagactaacagtgtataataaattatgaatctactggtttgtattcttgtggtcaaatcattattatcacgatcaacaaaaagataacttaaaaacataatatgtatactaaatgaaaatacgttggttcattccatgatgaacaaacattt

SEQ ID NO: 35093 - DNA, 824 bp, Arabidopsis thaliana landsberg
aggatcccctaaagtatgtgtttttcttgtatatgtgttttcgttgtgacaggttgttggagaggagcttgaagttttaagtggaatggagtcgatctgtttatattagctcttcaggaactcctaaacgtttctcaactgaaaggattaattcatatacagaatttattgtggtcgtgtatgatgtactttacattttggcatactatgcacaaaaacaagtgtcttctatgaccatcataatttatacattttctaacaaaatttatacttatttacgatgttttggttcacgatttacgcttaaatccgctcgagccagaacctgcgcacgattttcacgttgtaatttggttctcattcgtcgttacgaaacaaaacgacaatttacgctaaaattcatacccatttatactgttttggttcacattttacgctgaaatccacccgagccagaatccgcgaactgcggctataaattaaaatttatttccttctactaatgctcctcaaaccgtaactgtccctttatttacgcgattatgcagcacgtcttttcttatatcaaaccggtcaagatttatataatgcatggtttatgctatcatgttacacatcgttatgcagtcgtaaacggtttatttacgcatcgttatacagtcgttaaccgccgccaatatcacagatacgaacatggccgagcggctgtaaatgagaatttgtttcctcccgtaactgtgcctttatttacgcgaatgtggagcacgtctttccttatctcaaaccggtggatatttaaatgttgcatggtttacgctattatg

SEQ ID NO: 35094 - DNA, 3694 bp, Arabidopsis thaliana landsberg
gaatttgtgcatgtatctcgttgcctacaatctaacatcccatttctagacgagatgaattaagaagtcaattgaacaaaaaaaaattatgattaaaatttgaaggaaaacaaattcaaaagttagagttcatcatgatcaaaatagtcttcgtcgtccaagtcttcgtgatgaactgccttgtaaaagacatcttcgtggtgcaacatctcttcaagagatagtttaccatctttatcctcatccgcctaacaaaataattaaaatttattggacgttgaaagtctaagcattatacatatacatccactattaatgagtttcaaagttgtgaggaagaaaacttaagattaagatttaggttgggagagactaacctcgtggcaaaggaaagtagaatagaatttggcataactcatctcaccaggttgaagatattgcaaaatgggtcgaagctcatcggccacgaggaatctgtctttgtctctgtccatctctgcgaacagaagctgaggtgttggcacattctcatcctcctctttctcgaactttgcgaattctttatacatttcatatgcattttttacaaactctttgtactctagcttcccatcaccgttcgtgtccatgcccctatatattatatatatcaaacaacatgttgtttcctagttaagcttcatttatgatcatatcgaaacacgatatatcacgaaatgcttacgtcattcgctcctttagaacccatctttgtgtatctccgtttctgctgtcttcagggtgcaagaaactgcaaatcccatattttcattcattttttattttcggaaattttaaaagtgatgagatttttcaaggcatattaattacttgttgaactcctcaatgtcgagagagccattatgatcaaaatcagaatttttgaattgctccatccaccaaccggcttcaccgtgacccttctcgtttttctctgtttccatattatcattgttttttcttatttgcataatgaagaagaaaaatctcgaaggatcaaagacaagttaatatattaccaatgtcttgtttagagaattgaggcaagtactcttcgaaagttatgacaccgtccttgtccttatcttgtagctcaagctctttggcggttctgtaaaccatgttgtcttctgtctgttgcatcatccatgtctgaagctctttcaagctcacaaagccatctcttggagacgcgtcaagcagaggaaacaagaacttgatcctcattgtcgtgttaagccttctctcttgtgcaaaatactcctcaaacatatcatctttctcctctttcgcagcctccacggtcttcgtaccagcttctttctcatgagacaacctctcaatccgggtcaccaaagggtcaaacaccggcatttcaagcctccgtccgatgcggcgggttatgagaccctcaatggattgagtctggttttgtttcttatgagcgaggaggatgaggaagatgatggtggcggttagtatcgtgtaaaccaccaccttggccattttccggtagtccaaggtggggtagggagagaagacgaaagggccacgaagattgctaattctgtttttgtatttgctttattgggggctttccttaaatcattaaattatgttctatcaaccgtttttgccgccaaagtcggttatttattcgttgaggatccaatgactcttcctctgtctatatgtgtgtatttatagcaaaccaacaaaaccggttacgacatatcataaagcctaaaggaacaaaagattgttaaaatgtaagaagaaagaaatcaaagaacaagacttggtaacatccaagtgatatagtgttggaacatcccagtgatgtggtagggatggaaagaaagtttaaagtaaagaaaagcttcttactaagtcatttgatcatatacattgcggatttagagaagacgtggttagtatttgtttagtctgcctgctttgcagaatctcggatccagggccagtctgattcacagagatcaaggggagagtttccatcctcatctttagcggctgtgtttgcgttctgtttaaccagaaactcggcgatagcttctctgtcgcatacaacagcataatgcaaaggggtttggccttcgttgtcctgttcaacacaagatccagattcacataactaaagaagttgctaactttgcagataatgactgggtaggaatttctctttcgtcaccttagcattcacattggcgttcttatcgaccagaactctggcgatgttgaggtggccacggtctatagcccagtgcaatggcgtgcgaccttcactgtctgcagtttatgggaaaattagaatgcagatccaacatcacgagaatgaacttccaagaaacggaatatacaagcagagactaaccccttgcatttacaggaatgccgctttcaatgcttttcagtaaattctcgacttctccttctctagcaaatccgtgtatggcatcaatcttcctgagagataaaacaaaagttcaatgagcagaggattagtgtttcattcagatagacaggaagaaacgaacagctcaaagttccatgagacaattgtagccatttcaccatcaaaatttgctacagctagaacgagacagtaatgttacatattcaccgagtttatgagcctctttcacaaatcaggatacttatatctaatctagacatgaacgcaaggatcaggatataaaacacatgagaatacaagaagagaaccttacaactcattttcggactcctcatcataaaccaaagagctaaaaactggtcccatggttcctcttgagttggaggctgcatcatccccaccccgacttccggctttctgttagtgaagctcacatgaacaggccagaggaagaaaccgaagcaatcaaacaaagaaaaggggaaaaagctttataccacgccaccgtctaaccaagttgggtaaagctgagtgacaatctcaatatacttctccatcgcctcttcaggtggcatagctcccagtttctgccatgcttgcctgagatagaacaagatcatggcacatcccaatcaatgaaattgcaatcttacaacaaaccacaattccatatacaatcaactgttacaacagtaaaaaccacatcatcttccagcagttgcataagctaagaagcaaactaggtgattgtctatgaagaacctaaaacctcaaaaatttccacctcaaatcaaatctcaaacagttgaacaaaaacaccagaaaatgatacatagaagttaatggcacagcagattcaacgaaagagagagataccacttggcacgagcagtcattttgagagctgatggctgaggagcagtacacggcccttccgtagcaatcttatacaatccgtaaagctgctgctgcacatcactcggtaccttctgcgaaagccgatctgcggcggcggtagtcacaaaaagagtggcggcgctaaaagcctcatcgagttccgtgctctcgacgccttcccaatcatcatcttcctcactgtcgtcaccggcaacgctatcacttcgggagctaccctgctccgccacaagcgaatccgcctcaccaccgaaaccaccgcaagaggaatcgagacgtcgcgagtcaactcccttcggttaatct

SEQ ID NO: 35095 - DNA, 5518 bp, Arabidopsis thaliana landsberg
  unsure (1)..(5518): unsure at all n locations
atatcgaacaagaacaaacttggtattacgaaacaaatagaagtcttacaatgaaaggaaaagtcttacaaagcatacggatagtcttacaaagcatagagaaagtcttacacgcaaattaacaataggataacacattacttccttagaacaataggagaacggaataccactttgctcacgttcacaatctttgcacggtgggctttcaattctttttgcatttcttctatgagatactcatgacttagaactttcttccgattgtaatcaacactctcctttaagctactcacctcttcttccatagccttatcccaaagtttacggatgtgcatcaaatcatttctatcatcctacaaagtaccaaatatttatcaaatatagatctagatctacaaaaactagaaaaacttgtgcagtattacttgttctaagcagtattaccaaaacgggaaatactttgaaataccaaatagatctggatctagatctacaaaaacttgaaaaactcgtgctctacatcaacataccttaaacttctcgcattggtagttactattgttatcctttctagcgacgacaatgctaccaccacatggacaaaacttaggaatcccttccatcatctcaaccatttccatttgctcaatggctctcttcgccactttcatatcatcgtagtaggggtctctctcacacagtctatccatggtagaaagatgaaagaaaaatgagagatgtgagaaaattcgagtcgaagagagagatgagagatgtgggagaagagagatgagagatgaaagaaagttgtaagaagagatcgaaaaagaaagaggaaaaagaaaaaagtgaaatttttggttttggagggaatctcaaaatttgttaggcgccaaaaattttgggggaaaaccaaaaaaaataattccccacgtgtgtgccgttttttggagatttttgacatgtgcgcaacctttttacagcatatttcctaaggttttggtagtgccaatttctcaaatagtattactttccatgtttttcatatttagcagtatttcttatatttacaatttgtttatttagtagtaaactggatggaactttataaatatagagctttaaatgttttgtgcaattataaattaaatatatgtagcaatatgaatttttcattctaagttgtggataatattaaaagtaagcttaaaagtataagggaaatgttaaaagtgagcttaaaagtattgagtctactaaagaaaagttaaaacgatttaatattaaaatttctaacttaattaaatataaatgattaataatacatttttatctgttaataactcactgtattcattttcattgagttttgaggtaaacaaattcgaactccataacaccaacttagtattaacagtagtactaatatgaccacaaattcgacagaaacagacatgatattacttgttataaccggtattacaaaaaaacactagaaacagacatagtattatagaaggggaaatacaatattacatagtatgtccataccatcaaaacaacaaatcactacagaaacaaagtaaaatattcagataggcgtattcccaaataataaccattgacacgattaccttggacgccttttgttttgggtcctttgtcgttttggccaattttctccggttgatggaaaccttaacattttttccttcccttctttggtttttaagacagcggatctatcttcaacacttttacttcatctgatacttcccattgcgacttatccggaacaaaataaatagtcctataatagaccaatgcccacaactccgcccaataatattttgtaaccaaatcatgtaactccaaacctcttctccaatcttcatcatccagaatgctaatgaaagcgggtaatgcgtgaatacaaggatatttttggatatcgaacaccttgaaactgcaagttttcaaaagcaagctcactgtataatctattcctttgtcgcatgtgactacatattcacgctcgaatgagtttagctccaccactgtcaacttctcggcatcaacccacaaatcatacaaataattctccaccaaggcaccatcttattttctaaggatccagacgcggcttccatccgatgttcattaaaccaaacagagatatttttgatgatggcatcaagcattggtattaacgagtattgccttgcgttgcgaaacacattgttcaaagattcaacacaattgcttgtgtctaagttgtatctttctccggagaaacaacacattacccatttttctttcacggttgtatcctccaaatacttggtcgccttaggatatctcaacttaaacccgtcatacgctcggttgaagtccgccacgacgtagacccgacttaactcctgaaacttccatgcgagtacgtctcagttggtgtgagtagcatgacctttcacattttgggacaaatgccaaatacaatacccgtgatgagctgcggtatacacgttccatatggcctttatgaggcttgcatttctgtccgtcatgaagaccaattctgaagtatcgggtacaaccgtttttagcttctcgaaaaactactcccaactagcatcattctcaccgtcgagtacggcaaacgcaatgatgtaatggtgacggttaggatcttgagctgaggcaaacactagcactccgccatatcctttcttcaaatgtgttgcatccacaattaaaactttcctcatcactctaaaaccttcaatgctagctcccaaagctacgaatacgtactgaaatttatcattctcatccaatttcagataagtaactgtaccatcatttaccttcttcaacatgtataaataacaattgatatccttgtagctttcttccgggctaccttttaaatcataaatcgcatgatattttccccttagcgctgtcgagtatgatactttcacacctaatttcgtctgaactagctccatgataattcttggaaccggagtttccaactgtcccggaaaatgatcatgaaggagagctgcgactaattgtgggttgcctttccatttcctgagcctagtgccacctttacttagccgagtgcaactatgcatcttattgtaccttctaatccataaaatatcagtattactgatattggacgctcgtaaacgccacgaacaactttctttggcacacttaaggacatagcgctccttatccgacttcttaatcacataaccaaaactgttagcaaatgcagctctatccaccacctcgtgcaatgccgccttgtttggaaattcttgacgtaaggtcaacccaattccgtctttccattctttaataaacatacccggttctatagcaggtggcgactcaacatactgttcccccctatcagaattatccatagactcatcatagcgtgtttcatcttcttgagtcccgtgatcctccactattgcctcaagttgatgttgagttccttgttcctcttctaataagacgatgagtgcaccatcatccactctcatttcatcctcctctgaattcaactctgtatagttcttaccaacagaacttttannnnnnnnnnnnnnnnnnnnnnnnnnnnnnnnntgctcgggcggtttagagatctcttccacaaccaaaacacttctccggttattttttgcggatgttacataaacaaagacatcctcatcatcacaaacgttcatttcttcctctactccgaacaaccgtgtattgtacctcatatgcaattttaccttatttgcatctaatccaagcttcgtcattatcctatcttctaacattgagagagtaatcttctcccctaatgtcttcatcatcacattatacatgcgaccttggaatttaaaatatatgatcacgttctctttcattgtaacctgccaaaacaatacacatactcagtcaatattactagtattaccgattctagtacattttcagtaatactagtactaattctgaaatattacatgtgtgagtaatactattacatatatgaaatactacgtgtctaagtaatactggtgctattaaaacatactatctatataaattacggtactactatagctagttcgaccagtattattttcgcgacaagaacaaatattcgatttgagttcaatttagtatgaatcagcatgtgaaatcaattgcttacccattaacagaccaaatgaaacctaaatctatacttaaacttctaatgtaggtgctaaaacacaataacccaaatctaattggattgaatctcaaaatcctcaaaatatgtaattcaaagcttttgaagctctcttcatacctagacttagtagattgatgcagcttgcaggaggagaaaaacgacaatgcggctcgtcggagcttgccggagctcgccggaggaagaatcccgaagaagaagtcgagctcgtgctcgagcttttttttttctttttccgtttttttttttttcaaaatgttttctattaattattctaattattcattcaaaataaattatagggataaattcgtcttaacacaaattattaattcaaaggggatatgaaaactctaaaatggttttgcagattagttgtcccacaaaaaggacacaagagatatgatcattcgtcacgtacgcttatgtgttgacttgtgtgattaaggcgcatgggggcagtgtggatagaccgattcggtttatttatgctgctgattttagaaaccggttagatccaccggttcctttaacatattttgggaattgtgttttaccaattgattttatgattatgaagcgacgacctttttgggagaagatggattcgtcaacggtgttgagattttaagtgattcggtcaaaggtttgggttcacgaagtcttgagtcagtttgggaggtgtacgaggaaggaactaaaaacatgaaggttggtacaaaagtattgactgttaccgggtcgaaccagtttgggctatacgggtcagatttcgggtggggaaaaccatgtaacagtgagattgcgtccattgaccgaaacgaggcgttttcgatgtcggagaggagggatgaacccggaggtgtggagatcggcttgtgtttgaagaaatgtgagatggacatatttatttatctgtttcaaaatggtttagaaatggttctttagggtctttgattctaatgtttgtaagatgtaattttttttttcctttttgtgtggtttatggaaatgttttgtgtatcatccgaacctatctctaatcatgaaccacactggtttaagtatagaagcatttatggattgaggatctcggtttgttcttaggttagtaattaacttttgaattggccaagatgtgtattttagattacaattaaaactagccaattggtttaagtatagaaccagactggtttaagatgtgtacgctacgcggacctcaagactactaaaatt

SEQ ID NO: 35096 - DNA, 5274 bp, Arabidopsis thaliana landsberg
taaatattagtcggttattaagggtttcacgcaaaaaaaaagtaatgactttttgttaatcaatggaaagaaaaaaattggacggttaaagttaagaacgtgtgaaaacaatatgcaaaggcattgtggaatcagaagtccatagtgacaattgacaaatatgaaactgttcaacttttttttttctttctatctatctctttaaatcttgtcagtgcaagtcagatcagttaattatgacatttactcggccattgcaactttttcgagtcagtatttggttatctaaacgttacaagagaaatgacaacaagagaaatataacgtttgattggatacagtgtacaaaatagactaaattaaccgttctattttagaacagtcaataaatcatcacagatgatgattttttatgtaaaaaagtctgtagttagtcagcccaataccgtttttttttcatctacactataataaattataggttacgaatgctaaataaaaagcggttcgaaccgcaaacggattcgtccgctctatcgccataaccatttgaatccataaggtatgggaataaaaattaggtgagatgcatatttttttgtgtgtttaagctttctgtctgagatattgtttttcttcaaatattggtaatggctcaagaattctcaaacaaatttcttattttaacaatgtagtatataataatatctcaataaacacttatttgaatctagggatataaactggatatatttggtgcttttcataattgtgctcttcataccaaaaaaaaaaaaaagatggtgctctttatttatacaaatctaaaatcgaaaaaatttctaacaattttagtcagtctaggttcatatttttatacatatttaaaacaatatctttaaagataaatagattgagaagaatataacacatgtcttaagcttatttgacccaatatactgtatatgcaattattttcctttctacaatatccttttagtggtattactaaaagatcatttttgggggttattttgcttaattaagaatgaataaattttgaacttggaaggaaatccaactacgcaagtacaacccaatgccaaaataagctctcaaaaagaaagtgaagaagaagaactaatattacatgctgggggttcgggcttgaaaggattatgggtttcggctcaaaacctcctggtatttaaaaaaaagaaaaaaaaatgttttaaaaaataacaaagttgtgctgctagtgtttccaagttgtgattgctgaaattagggtttgtaacttataagcgaagcttaatcgctgctttcgactaaagggtattcattaacaataagtttcaggtagaagaaaagcaagattcagcaagtttcaataactttgaacaaagcaagataacttgaagaaaaatatcaaaacctagaagaaaagagttaaacctacaaataggataaaatccacataaatttctgttactaaatgtatcatagttttgtttcttctatgtatggatatacaaaaatttctaaagaactttttgagcacaaagcattgtgacttaagagccacgagtaaaagacaaggcaaaatgtgtatcacgtccacgaaccatataaactgtttcggctggaagaacacggttccactcgaatgactgatcttcgttcaatactctctctttctttctgtccacaaagaaatatccttcgtgaggcattcttatatgacccctccgaccactttcaaccaactcggttctcagtattttcacttgatccgtcgagttcacatccacctcaataaatctcttcagacctttacactcacttgaagctgccaccacatatactttaatcttcttcttcgggtcagtgatctctttgactgagtttgacgctggagattgctccatttgaggcacttgaaccgtcacagacgaatcttggatcttactggtctcttggataacacgtctgggaacaatcacaattgtatccaggggtttaacactgttccactcgtatgactgatcttcgttcaatactctccctttgtgtacgaagaaataatcaccatcttgaggccgatctaaatgatcccttagttcattctgaaccaactcttgtctcagcattttcaccctatacgtcttgtacgtaataaaatgaagattcttcgcagctttaatcttgccggaatatggcatcacccgtaatgttagtattatcttccccacaggcgaatcttgaatgttagtgttctctttaaccgagtctgacggtggagtttgctcgttgtttctcaccggcgaatcttgatgacctttgatgatatcttttgctgcgtctgacggtggagattgatcgttgtttctcaccggagaatcttgaactgggcaaaaaggtcgaatattcaaaacaactttagttgtcaaaggcaaatcctcaccgtaaatgagatctccgattataggaggttgctcctccgtttgaagaacttgatcgttgttgtcattaaggtctggaaggacgaagaagtcgacatgagagttgtcgagaatctgacattgaccgatatcaagatgatcttgaagaacattgccttggaagaaaagggtttgtttcgaaacagggatacgttgatacttctcgatcttctctttgatctctaacactgtatcaaagtaacccacttcaatggagaatggtgagcctctttgagtctcgaagaacacacttatcattgtatcaatgcagactgatgaagagtgaatagagaaagagagagtgtgaatagagaaggtgatgtcaacttgggactttttttgtaacgaaagtttcctcataatgtgttaactaatgacctattttcatggactcttcttgatggttattattttgcttttctttctctcaaattgctatttttgaaagagatttatctatttttccttgtcaacaaacgtgaaagattattttgatggagattgagggacttggttctgagtagggttattgcgaggtgaagttctctaacaattgggaagagcaacgcgttcaagaatcgcaaaaagatgagctttaaagcaaagtttgaggtcaaaaccaagcacaacctttagatagtacgtaaaattatagttgaggttttgtgacactacgtagataaattgaggtagttgaggttttgtgacactacgtaaaatttagttgaggtaaattggcaaagattttacctgaatgttgttaccagaaagtaattaaatgttcaatctctgatgttctcaagtaagtgagttttattgggaataatattaactcatgttcttcttgcatttgatttctttgccgctctcttcttctatcttaaatctgtgtatactatttcactattgggctttttattagtctataatgggactcaaaataaggctttggcccacatcaaaaagataagtcacaaatcaaaactaaattcagagtcttttctcccacatcggtcactgtactcattttgtgtttgtttatatattacacgaaccgatctttggtacgtcgagctaagtaacatgagcttgtaacccatgtggggacattaagatggtggaacactgactcggtccacgggtcagatctgttgtggcattgttcttttctgtccagtccaagctgtgagtgatctgtgtgtgttgagcgaaggcttggctcaggcggttcttacattggtgggcaatgcgtgaggctggtttcatagagcagcgatcacctcccgctctcggcagtggacggataacagctcgacgccactcagattcaccatggcctgctcgctcgttcccagctggaccaccaattttagaaagaaaaaaagaaccaagtgtcgttagctcaattgctaaagactctaggcgaaacttagaggtcgccgtttcgagtgacgcttgggacgaaactaatattacatgttgtggtttcgggcttgggggattacgggtttcggcccaaaacctcctggatttcagaaaaaaaaaagcaaataaaaggaaaaaaaccttcctgatccaggtagctttgttctcaattgtagtatccttaacgagtgttttgcgcaatgcttctgtgatcttggttctagtgtccatttgatgccgcgatccgttgcgttatcccttggtttgacagattgtgagccaacgcaaatcactattgttcttgctgatcgatctgtccatatacctgatggtatcctatgcaatgtccctgtacaagtcggtaatagcatgattcctacagattttgtggttttatcttatgagaaaaaacctaaagatcctctaatcttggtaagatctttcttagccacaagtggtgccattattgacataagaaagggtagaataggcttgaatgtacgtgatctaaaaatgcagtttgacacgaataaggtggttaagaagcctaccatcgatgggcagactttctatgttgacactatctcgtctctagatgaagaattcctgacgggcagacctactgatcgatgggcagacctgctgatcctttagagcatgctctaataccttaaatagacaaagtttcccacgggtatagtaagctgctagatagaaatgagcatgtaatacaattggttgttcaagaggagttaattagcacatctactaaagcagcaacagttggcgactggagcaaaataggcttctaaagttgatctaaagccacttcttgtcattgttaatgcttatttaaacaacgcagagctcaccttattgctaagcaagctgcgcaagtatcgcagagctcttggctattctcttgattatattacaggtatctctccagacttgtgtaggcataggattcaccttaaggatgagtctaagtcctcagttgagcatcagaggagactaaacctgaatctcaaggatgctgttaagaaggagatcatgaaattgttggaagcagggatcatttatcctatttcagatagtgattgggttagtccagtgcatgtggttcctaagaaaggaggtgttacagtggttaagaatgacaagaatgagctgattcctacatggactgttacgggccacaggatgtgtattgactataggaagctgaacgctgcaacaaggaaggatcattttcctctgccattcattgatcaaatgccggaaaggttagctaatcataagtactattgctttcttgatggatactcaggattctttcagatacccg

SEQ ID NO: 35097 - DNA, 3967 bp, Arabidopsis thaliana landsberg
  unsure (1)..(3967): unsure at all n locations
aggcttaaacagaatgtgcatggactaaaaagagaacccaaattttcattgtgatgatcccccttgtgatgctcttacttgagaagagcctccttgtgatgatccagcttgagaatatccctcttgagaagctccaacatgaaatgaatctccctaaaatcaaacaaaccattagaccaattaagcaaaccattacaccaccaaacaattaatcaaatcattagctcaccaaaaaaactacttacataaataccatgttcttttcttggacgacctcttggtcgtgttgcttgaggaggggcagttggattatgacacctagtcttattatgtccttcttttttgcagtttgaacatgttataatacgaccatggcgagataacttgtacttattagatgcagactcatgtggagactttctcctagcatgatcatgtggtcttcctctgttgaatctaggtgggggtggcagaacaggtaaccttcccaactgtggccacatattcatcccttggactggtttaattcctttctcgtacaatgaacgccatcttgaagtcaagtaataatcagagacataatcattaagatttaactttgtggtgttgatgacacacattgcatgcatacaaggtatgccattcaattgccaatagccacaaccacaagttttcttttccatgtcgacacaaaaaatatcatctccacattcaatctcatgcaagtaacctgtggtcatgtaccttttcaagtcctttgctttttgcctatttagttcaatttctctggctgctcttggtgtgaacctcttcttccacctgttagttataattgttctcttggcattcctctccatacatttcctcctcacttctgttagaaaatcaagtaatggcttccttcttgattctctaacattcctattgaaagactctgagagattattcagattatcattgcaacatgatccaagtttgaagaaagcccgagaccatgttgttggtgcagtgcattgtaatgtgtcataagcagcttggttgtacctcttcaatacttctaagttagtcgcaaatgatgccgtagtgtaactccttgctattttccagaacatacgctcaagttcaatatccttatgtgtcttcttccagttttctaaaatgtgtctagcacacaatatgtgttcaacttttggcagctcatcacgaacaacatttagcaaaccctattaccacaagtaaaccttattagaaatttcacaattaacttacctaacatcaaaatgacaaattgagaacaagaaacttacatgatgcttatctgaaatgattgtaatgtcagctccgtcttcaaggcttaaatcttttttcagtaatcgtacaaaccacatccaattatcaatatcctccacctctacgacagcccaagcaattggaaatatcctgttatcaccatctctaccaactgcagctaacatttgccctttgatatcccatttcataaatgctgcatccaatccaataatcggcctacatgactgcctccaagatgatttcgatgcttcaaaacatacatagagacgataaaatctttgtaagccaccgggaattggcccaggaattgtctcaatctccatcgttgaacctttatttgttttaagtatctctgcttgataatcccatattcttgcaaagtgggtttcatgactagcacttcttgctttcataaccttggtcttcgctttagcacactggtttggagttacttccaacttgtactctctctttatctcagccaccatctcgtattttgtcagcttcgggttcaatctcagcctttcctcaaacaaggcagcaatcgaagaccgcttcaacatcttagaataccctaacctcacacatgaatgctcattgacataaactgttatttgcatcttatgttttttcttctcataagaacaataaattctccacggacatttaacaccatcttcatcaatataactacacttagctgcaacgatcatagatgctgacctataaagctttatgtcataccttgtcttcaaagagtacatcaacaatgcacgcttgaagtcatccggagagttgtaggttttctctaatgctagcaaaccctctggctcgttttcatctctacgagctgtctcttcttctcctctaacttcatcttcgtcgtcagatgacaacggatcaggaatcctgtcttcatcccatatatcatcaccgctgtcgtggtcagaaccgtcttcatcaactctaaaagcctctggaaaatcttcttcaatgttaaggtttgcatcttcttcaaaagcatcgttagcatcttctccatcagcaacattagcatcttctccatcagcttcgttcgcatcttctccatcagcatcgttttgttcttctccatcgttagcatcttcctccacagcatcgttatctccatcacctattgcattgtcaacaccattgcagtcatcatcaccatatacagcacaatcatcttcgatatcttgagcaacttccaattcagtctcttcctcatactcttcaacgactcttcttcgttttctacgctgtctagagactcgacctccaagaacattaggctgagctaaacctccatcttctacagacggtggagctactacacttccatctaccgctggtggacctccaacttcacctctcgctagatcttcaacttcagttgccgaattagagactcgcattgtcgtcccaatcctagatacaacgcctttgtttcgaaccaaaggcatccgtgatagatttgtgattaccaattcgatttagggtttctgagaattagggatttcaagtttgagaattcgggattttgtgttcgactaatttcagtataagtgtcgattaagtcaaaaacgacgcagttttggttactaacagagatgttaacgggtctaaacggctgttaatgggtccgttatcagatttaacgacgagtatatttaggcgcggtcaacgaaataatcaagccttacatgaaagtcaacgcaaagttaatgtttaaaacgaccttatacgaagttggtgtataaaatggcgtttttggtaaagttcggcagttaaacgacattttccccaatctaaatctagttacctatgttgcatttgacgatttacaacttggaactcacacccaacatgttgggttgcattgttaggatgtgggaagttatgtcagtaccgccaacaaccgncatgtattctttggaaattcactcctcctgcttgatgagaagtttgtcggaccgcgaaatcttgatttagaaatagaaagaaagaactttataaaaactatttagaaagacgtttttcgaaaacgagtgaagacgagatatgatatttttccgtaatccaaactagctccctcagtgtgacggttttatgagcagcagatcgcaggatacaatcactataagaccggtaccgcaacactcgatagcggaatctgcgaacttgaaataaacgatatactcttgacttactttgaaaagaaagagagagaggaagagagtttcgtttatcttgtagggaaaaacgagtgaagagaatgagaggaagaggtgttccttttataggagagaggtgagatatgcgattcgcaaatcgagggagaggtgagatatgcgatacgcaaatcaaggcggagatcgcgtgattcagagtgatgcgcaagtccaagacgttggcgtgattagcagagccattatcacaaccacttaaattcgaattaattcaaataaggaatattgtggatatgcttttaatattccgaatatatcttaattatgcaaacgatatggattttcgtttatgggccaaaaactatgtgggcattattcccaagagcctcatccaagccggctcggcacggctcgtcgacgccggcggccgtcgtgtgtttgtgcat

SEQ ID NO: 35098 - DNA, 972 bp, Arabidopsis thaliana landsberg
atgccgattagtgagaggaatcatagctggaaacccccggctagtagacttatgatcaaaccagtgttgttattctgcaaaattcacaaaaaatagtcatctcatcagtaagacatgtggtgcactcccatggagttaatattaacgttcatacacagaagcatgaaacgaagttaaactattaagtaggaagcaaaaacaaaaacagtttagttgggagagttggtccgaaaattgatttagtactaaagttagagaaacaatttaatatcaatgtttacaactaacataaaccataaaatagagcaagcatagagaacaataacctattagtttggagagtttttctgatttttgatttactaaagtaagagaaaatttagtgtgtcttctccatccaatagggaaagatttactattagcaacgtttcaatacagagccaaattattagccctataagccaaataagtagccttttcatttcccttgggataggccataagacgcctgcaagcaaaaaacaaagtaaaataatcagctaaacccatattctagggataacattagataacaatttattttcttaccatttgcaatcaccaaccacgaattgatcagagtgaattgatgcggattgcaaagaggagaaatttttaatcacccaagtaatcgtcgtatcaactgttgtctccattgatctcaatgatgactcctacacacaaattttgtacatcgaaaagttaaagaacaatctcgagaaacaaaacaaaaacaaagattaatatttcgctatggaacacagactttatttctttctttacacgttactacgtctgagaaactaaacatagtcaaggaacaaaaaaaatagtagaacgattaaaaattattgcagcatttacttctcagagttttggtcgaaaaacaaacagggacgaagtactgaaacagtgcagccacaacttttggcg

SEQ ID NO: 35099 - DNA, 2317 bp, Arabidopsis thaliana landsberg
gatcattttcaaagtttttttggacccttcgtcttcgtcttcctttttaagtagaccaaactgatagtgagagtttacttcagatttctcttcttcgtctttgttgaatcctctataaagcttagctttctacttgtcaatctattttttcatgcctactaagccaagttacgtatttaggttatttccaaagtaactcaggttagttcttgctgttgctttgcttcgatgaataatctcacagaaagacgaagggtcatcatggagcagaacgagaaaacaagtctggtcgatagagtattttcttggtctatcaaagatattctcaataaagatttctacaaacaaaaggttttgttctcttctaactcttttctttaatatctatcttattattttgatatttagagattagcgtttctatattttgtaacagttgaagacagtaccggacaagtttagatccgttgatgaatattatcaatgttttgttcctcacctactcattgaagcacataccgagttgttctcaagcctcaaatctgtatcgaaatctccttttgttcaaatacgttctatggagacaaagacgaagcaatcaagtggaagcttatcaaacaagttgttctacgatatgtcaataaatgatgcattgagtattagagaaaagtatcagccaaaatgtggagatcttattgctttgacaaaggaaaggcctagaggagtcgatgacttgaatcctttacttcttggttctatttctgttgatacttatccaaatatctctgttattttgtcaagattaatattccatgatgagaaaaagtcacttggtttcggtgttcttcttatgaattcaactacgaacatttgaatatggaatgctttgcaccatgaagctcccaactttgatctcatccagagtgttcttcagccaaatactgcggtatgtatataagaaatggtcttgatgattctcttgatggatccactataaagttttatttgttgcttggagtaattacttgtattgcagggtatggagccaattgtttcttctagaacttggggacaaaatgttttggatataatccgttcatcaaaattgaactcttcacaagaagctgcaatcttgagctgccttgagacaagagatagtaatcacaagaacagtgtgaaactcatatggggacctcttaagacaaagacggtcgctactcttctccttgtccttctcaagctaaggtgcaaaacagttgtgtgtgctcctacaaacacagctattgtagaagtaacatcaaggctattggctttatcgaataaatattcagaacatgccacttatggcttggggaatatttttttagctggaaaccaaaaaagaatgaggatcaaagatactgattatcttcgtaatgtctttcttgatcatcgtataagcaaacttcgtaaactgtttttatctacttgtggatggaagcacaggttagagtcaatcatagattttcttgagaacacagagagtaagtacgagcaacatgtaaatgaattagagcttgaaagaatgtcacaattatgaaaagaagaaggaagaagttgaagagaggacgatgcaagaagttgtaaacattccaacatttgagagtttgtgaaaaagaagttatatgtcttaactgaggaattggggaaggatatggctgatttgagcactcatctgcctaagtctttcatttcatctaaagatgtcaagaatttgatagcagcccgccaagcgcttcaccgtgttagatatttcttgcaggagaattcttctagagatgatttcaagaaaggtggttttagattcaattgcttcaacaaactcatcagtgttgatgcccttcaggctctctgtctacttccaaaatgttttgggatttttggtttagcaaataatgaagatattagaaagttttgtctacaaaatgctgacataatattctgcacagcctcaagtgttgctaatatcaatccggcgaggataggctctgtggaccttcttgtggtagatgaggcagctcagcttaaggaatgtgaatcagttgctgcattgcaacttcctggactttgtcatgctcttctaataggagatgagtatcagttgccagcaatggttcataacgaggaatgcgataaggcgaaattcggaagaagcttgtttgagagattggttttgattggtcatagcaaacatttgcttaatgttcagtatcgaatgcatccttccattaagtcgttccctaataaggagttttatggtgggagaatcactgatgct

SEQ ID NO: 35100 - DNA, 1225 bp, Arabidopsis thaliana landsberg
ctccatcatcctatcgatattttgctgctccatcgctgcacatgttgagtctaggaggctcaaagtggttagtactcaaggtttactacatgaaactgtccccatgagtgtattctggctgctcccacagtacattctactcggttcaatcacaggaatctacgaaaacagctttgcgctttacctagaagaaacggtgcctgaagagttgagccaatacatggttctattaaacgtgggagtgtgcggggtcgggatcatgagcaacattgctcttgttagtttggtgggcagtgtaagcggaggcaaatggtttcaagacacaataaacaagagccgggtggataactattattgggttataacagtgttttgcatgttcaatctcttgttatatttcattgtaccctataggtacacagtgtgtaacaagaaagatggtgcaacacaagaaaatgatcgaaggataatcgcttctgtgtagtacttgtgttgtgtgcccaatgtttcaattatacatgtatgaggttaaatgaggttattgcgtttgtggcttcggaaaaacatagaagagaaattaaaaaggaattctctcaatgtttttgaccaaatcctaaaattatcttcaggcaactaaaccatgtttgcacacccattaataaacccaagaactaatgggactgggacatcagctcactttaaaactgaaccattaaaaccttcaatgacttttagaaacaaataaagtaagttatgacttaaattggaggacaagatttagaaaaacaaatcgaattttatggaaaataaagaatttagtccaaaatagatttacaagaataattgggaatcaacggtcttccttcaaattcaaatttgcaattacatggagatacttctcgtattactcacagtcacaaggcatcaaaatggaacccaccgaacatcaagttaaagaacaaattcactaaaattttgaaagtttcctaaatcttaaaaaaagtaactgcaaactattattctagttaaataaccagaaagtcattttaaagcctgatacctctaaataccatcattatctttgcctatgttcgaacccctttgatgagtgttaaaatgttgctcttatgaaaattacattattattttagtatctatccaaaggttggaataaaaagttattttcttctgaatctaattgtactgtgtatgggttggaagaaga

SEQ ID NO: 35101 - DNA, 1924 bp, Arabidopsis thaliana landsberg
ttttttttcaactatcgcaattgtaattatgtgctgcctataataaactacatagttctgttgttgtatatacataaaatttaccctaattaaaatgggttaatatgtgtatctactacgaacagctactcttctgaacgatcaaaatcttaattctatcaccctctctccctcgctcgaattttttataccaaaatgtaatcaaccctagtttcacgtttcaaagtttcaagtttcaagtaaagaaaaagggggaacaaaaggtaaatagtgaaaaagtttttttttttttttttgtgcacaggtgaaaaagtgattatataaaagatgaaaacatatttttctttatataaaaaagctgctcactttttattggatttcctctcccacacaaccatcaattcctttcacactctcttcctcttttgagtttctctacaaccaaaaaaaaaaaactcatcataacctcctccatctccattcttctctctctctctgaacttctacctcttcctctctgtgtctctgccatggaatccggcaatagtagtagcatgcaatcctcaagcggcggtggcggaggaggagaagaagaatacgattcacgcgccgcagatcaatccatttccgccttcttcgaccaccacaacaaccacgtgtcatctatacccacgccgcaacaaaaccatcgcaacctcctccatttcgaccataacaacaacaactctctaataccaccaaactactttaacaacaacacgttcttacccgtaaaccaacaacccgacccgatttctcaactcgacctccgaacctcctccgccacgtcatcactccctcctactaacaatataggagtaatcaagaaaacaaagaaaagatctcgagcatcaagaagagcaccaacgacggttctaacgacggatacttccaacttccgagcgatggttcaagagtttaccggaatcccagctccaccgctattcaacaacaactccatcgtgaacaccacgcgcctcaacactttcctcggcttgtcttcttcttcgccaaacacttacaacaccaacaatctcttgttacgaccgtttgctcaaaaactcactccagcgactcctctcttatccggatcacaaattcagcaatatcaaaaccctaacaacggtttcgaggatatgaatctgcaagctcttcttcaagctcatatttcaaaccctagaagcaatgagcacgatcagtttggtcttggtatgatgcagactccatctactaatcctcctactacaacggcagcggctaacgggaacataaacaccggtgataatggaagctacggtggctccgatcatgaacataataatgacggtacttggttatcttcgtcttccgaccagagaacataaatatatttatgtatagtccaagtccgaaatcaaagctaatctcttgacatgattactcaacaaattaaacatagcacatatagcatgatgaagttactcgtttatatattctatatttcagtataaaccactttaaaacttttttcgtgtagggtttgttaattatttaatacttaattaatatgcttgttatttgttaatcttagttttttccataactatatgttggtaagtattagttagtagatggatctcaccatttgaatcagattttcttggtatattttcttataattatatagaacttttaaattttaatgacaacgatgacttgcgatatgaaattttaatttttcaacaatcaatatacagtacgtggttttgggatcactacggttaatatttctcctaattaatattggagtgaatggtggcgaaatttgaggaatcttccacggccgccggattgtggaatatgggcttgggaccatacgatataactatcaattaagtatagactc

SEQ ID NO: 35102 - DNA, 2987 bp, Arabidopsis thaliana landsberg
ggcaatgggacccagggcccacccagagatgtttccctttaccaaggaaattaagtatgggaaacgggatgctcttaataatcagccatttgctagagatgaaacagcgttgccagtttcttctagacctacagatccgagattagaaggttctatgaggcacactggctccattactgcactcagggaattggtatgtatctccttagtgcggatactgttgattgatatggttgcttgcttacattcacatattgttttttctcatctttgattcatctgtaaccaaattccagtgtgcatcggagggtcttgagatggcttttcaatctcagcgtcagcttccatctgacatggtccacagagatgaattacatgctcaggttcgcacccctaaaagattagaacacagaagtgttaaatttttataaaaaaaaatctaagatagacaattttcagttaaaagagaaagattcatgattttctcttcagggccatcagtatatttcatatctattcaattggtttgaagtatctagagtgtagacccctcttgatactctttgtaatatatttcaggttgaaatagatgggcgtgttgtaggggaaggagttggatcgacatgggacgaagctagaatgcaggtaactcaactaaattcttgcctcgggtttattctgatcccatcttttcccttctctgacgttcttacctttaggctgctgagagagcactgtccagtgtgagatcaatgcttggtcaacctctgcataaacgacaaggatctccacggtttgttcttgactatatctatatgattatcaaaataaaaatgtcagttgatatattttaaaaaccggtttcttgttgatgtttagatcatttggtgggatgtcaaacaagcgattaaagccggactttcaacggtctctgcaacggatgccatcttcgggaagatactcttaaaaataaaaccatgtgaagaacgaaccacattctacattaattccattctcttggtaaaaacagctaccaagacgaattctttgtcaagttcctttcttcgccaaatgatgatcaagacagcgagagttgcctctcttgtattgatgtaacaacaatttgaggcggttcgcgatttttgtatcatagaaactcttgagttgaagcatcagctcgagtggccacaaagataagacctaaggatgaacgtttagcttgttctcaggctgttaagtttccacaaagctttttctgcagtttccatagttaacagtccttgttttcactacaacattaagagcttgatttaatattgtaaatttttactgttctactagtaagtgtttaggttttgactgattcaaaggttatgagaaaagttacataaactatgtgttggaactgtggaatcaacttatcctttattgagaaacatcaactaaactttgcacaagagtataacccaaaaataaaaacacaataagaccagtttatatcacagaacaagctcagctttaaacaaattactgtaaaaagcttcacagcattaaaataaaacacaaaactctctagctcctgactcagacttcctcctcttcagttacggactcagagaaacttgcttcagacttaatatacttgtaccatttggcacaaatcaagtaaaccacgaaatcagcagcggttagaccagctaaaaggaagtagaatctctccaagtgtcctttgttgagattttcaggaatccagccaggcacatcatctgttgtagagatcttcatgacaatggaaactaacaaactgcttacatagttcccaagagatattgaagccatacatagcgcgcttgcaaagctctttagcccggttggtgcttggctgttgaagaactcgagttgaccaacgtacatgaacacttctgatgcacctatcaacatgtactgaggtacttgccaaaaaatgctcaaagtgctggagcttgagatcgaagtagcactttccggttccttatttttcagtctgtgtatctctacgattcctgcggaaatcatcgccattatcgcaatcacaagcccaatccccatcctctgaagctcagtgagacctttgttgcgttctgttttgttaagtcttgcaaagagtggatcaagaaaccgcctgtatgcgaagatgaagaaggcgacactgagaatgtcgaaactagacatgcttgaagctggaatccggaagtttttgatgtttgtcttcatcgctgctccttgcacaacgaacagtgaagccatttgggtgaaaaccacagagtagaggatggtgcagagccagattggtaagagtcttaatacacatttcacttcttcgacttgagtcaccgagcagagccttcatggatcgtatttcgatccgctctctactttctcagcctcatcatcaggtgtaacaatagcagctttatccaagaatctgtagaaaataatagagagagagttaacactgatcttgacgatggtttctgagattataacagaacttttaattggttatcttacctgaagcctttggtatgaagaatcttcttatctccagtgtattgagtctcagaatcatagagattcaactcttcatggtgcacatcaatcttagcctttcttgttgcagcaaccaacacttggcagaatctagaccaaggactctctctaggcgtaaagtgtcggtactttggcgtgccaatcaagaaaagcactaaccccgcaaaagcagagccagcagacgcccaaaatccaagcggccattccccttgatcctcaaagtaacccaagacagtatttgagaagagcgatccaagattcagagccaagtaaaagtaactgaaaaacgcgattttcgagtgtccttcaacggaatcctccgcatcaaactgatcagctccaaaagtagctatgttcgactgataaccaccataccctaacgcgattagatacaccga

SEQ ID NO: 35103 - DNA, 2180 bp, Arabidopsis thaliana landsberg
  unsure (1)..(2180): unsure at all n locations
gagcgggttctaaacctgctcctccttagacatctctctaaattctgtaaccttattgtttctcacatagggcacaaatgacggaggggaaaaaaatttgaaacaaacaaattggagaaatagaaagaaatgtgatcccgtcatggaaacgatgtctctttagtttagaagcattttctgtggacaatgcctggacctgcttcatcatactctggcttagagatccacatctgattacacacacacacacacacagaaaatgtaaaccattagaggagttgtctacatttaatcaaccacaagaagcaaaaacttagaaatgacagtccaattttacctgctggaaagtgctgagggaagcaaggatagaaccaccaatccagacactgtacttcctctcgggtggtgccacgaccttaatcttcatgctgctcggggcaagagctgtgatctctttgctcatacggtctgcaatacctgagaacatagttgtaccaccactgagcacaatgttaccgtacaagtccttcctgatgtcgacatcacacttcattatggagttataggtggtttcatggnnnnnnnnnnnnnnnnnnnnnnnnnnnnnnnnnnnnnnnngaacctcaggacaacggaatcgctctgatccaatggtgatcacttgcccatcaggtagctcgtagttcttctcaacagatgagctggttttggctgtctcgagttcctgctcgtagtcaagagcaatgtagcaaagcttctcctttatgtctctgacaatttcacgctctgctgtggtggtgaaagagtaaccacgttccatggggatcttcatcagatactcggttaggtcacggcctgctagatctagacgcaagatcgcatgcgggagtgcataaccttcgtagattggaactgtgtggctcacaccatctcctgaatccaacacaatacctaaccacgcagaaatttaacagatttaggaccattgttattacaaaaaaaaaaaatcacatttcaagattttcataaaaatcacatttatataaaaaaatatatatatttaaagattttgcatgtgaacgatattacatacctgtggtacgaccactggaatagagagagagaacggcctgaataccaatatacatactaggaaaagcaaatgactcaaacatgatctgagtcatcttttcacgattgacctttgggttaagaggagcttcagtgagaagaatagggtgttcttcaggttccaaacgcagctcattgtaaaaagtatggtgccaaatcttctccatgtcatcccaattgctaacaacaccgtgttcgattgggtatttaagtgaaagaatacctctcctggcttgagcttcgtctcccacaaaggtatccttctcatccattcctaccatcactcccctgtgtcgtggacgacccacaacgcttggaaacacagctcttggtgcatcgtctccagcgaatcccgccttcaaaatgttttaccaatcattaggatttaggtctacaatatacattgattggttgcttacgtttatatttagtatacatttttctaactcattattgcccaaccggaagtacataaaggaaaaaatcttttggtattcgtaaatgaaaacgggaaatagaaaaagtttttttttttggcgttttcagtactttgcaaaatattttattttcttaactttttgaaaaaatttaaatgtaaacgcaaagcaaatgcgtaaatagtgtttgaaacaaaggaagcattatagatttttcatcaaacaaaaaaaaagcattacagattaataaagagtgtttttagtttctccttaccttgaccattccagttccattgtcacacacgatagccacggattcgtcacctagatccgacattatctagagtatacatatcatgcatgtttcaaaaaattggttttcaaaattattatcgttatataccttcaaaacgtacacaactaaataacaatcagtttcggaaaaaaacagatatcgtatacagagatcatgttaattcttatgtttaaggataaattagctcgaaatatatacctaataactaccaacggatggtgttagaaaagaaccctagttattgcaatggcaaacatcgctgcagtcacagccaaaaacagatcacttaagagaaa

SEQ ID NO: 35104 - DNA, 9371 bp, Arabidopsis thaliana landsberg
tctcacattccgttcataagtttgagcaatcatcttcgccttccgatttttataagtgccatccgacttagtgtgtgtctggatgaacacctcacctagatggactggtcttcccagtttctcttcctgcaaacacagatcaatatcacaagtcgaagacagcttgaactgaacaagacagacaataaaactctaacttatgatttgaacgactctaaaagacatgaaaggatgctgaaacacttaccaattcatcttggatttcttgataagactttggcctagagtagtggatgtgtggaccgagaccgttacggtcagagagccgagctttagaatagttctgactcctttttaggcttcttctgtgtcccagtaagcacacattgttccccacagagtttctccaatccatggaggctgctcccgagttctccttgaggtgctaaccatgtccttcaagcgcctcttgacgatctcattgaagtaatattggacagtccatgtgattaagggatcctagtggtgagttttctacaaaaaaaggaagaagttagtgaactgaacttgagcagacaataaaacaaagactgaacaaagcaaagagtcaggaagcttaccgcgaactctaaaaacagtctctctcttttagccaatggaacacatgaccaattatagtaaggagcattgaacttttgagtaaagatccttgtgatctttcgaaccagtttagaccctctgtcgcgagtaaacctccaagcacatgcaacaatgaaagaagtaaacatgttaaataatcaaaacacaacaacagctatgagaacagactatagaactgaggcagattcacaagtctactatgttacacaggcagaactgagggagattcacaacataacacacactatagaactgaacaagagcacacaacaatatagaacacaattaagaagagaatgagtgtgagttcaaaagtcaaaagcacacaacagaatagaacacaactaagttcaaaagtcaactatgttcaacaatagatcatgagttgcaacagaacacaattaagaatgcaagacatactatagaacataacaagagcatgagtagcaacagaacacaattaacaagagaacaaagtcaacttccacaatagaacatcaagagaacacgattaacaagagactcgattaacaagagaacacgattcacaagtatagaactgaacaaggacacacgagtattcacaagagtacacatgagtattcacaagtattcacaagagcacacacgagtattcataagtattcacaagagcacacacgagtattcaaatcgaagcaaagacaagtattcacaagtattcacaagaacacacacgagtattcacaagagcacacacgagtattcacaaggctactatgttacacaacacataacaaacatccaacaaaacccatcattcacaactatcttccaggattcacaagtctacttacactacaaaggcagataacacgaaaacaaattaaaggaagatagacttaccacacggtttttggcctaggaattggagacaatacacaagtccactgctccctgtttggcactgacataatatcttgcagagccaccgccgagtcttcttgaagctccggcaacgtcgtaggaacttcctcttgaaagttgttcccttgagacgaagggttgctgttagctggctcttccggcgactcaggatcttgctgagcaggctcttccggcggtggattgaagtggacctctttagatcgaggcggagcaccaccaccctgaggttgagtggtggagttctggaagagttgtacaggcggtggatagtcgcgtacgtggggggctgacgttgaacggacagcagcttgagccggttgcgtcgctggaacatgaaccgccggcgccggagtgaagttgtactgcgccggcagatcccgaggtctaggcgtcgttgaaccgccggctctctgagtaacattaggcatcgtcttcctctttcgggagccttcttgaccggcgttcggcatggaagatcgacggagatcgagagattgagagattgagagatagagagatcgagagattgagacaagtgagagagatagagagatagagagatcgagagattgagagatcgagagatcgagagatcaagagattgagagatagagagatcgagacaagtgagagagatagagagatcgagagatggagaagatggaagaagatagaagaagtttaaagaagatcgaagaagaagatgaacagatcgaagatctttagggtttgagaggaagaagacgaagaagagagttcgagatcgaagaaaaatttggctaagtgttaggaatgagaaatgattcgatttagggttttcaacattgtagtagtcgtagtatagtcgtattgttgtcactaaatgaaatgggtttgggcctcgaatttcaaaagcccaacaacttcgcctgtagtcgcaaaagagtagcaaatctgtcgccgattttattaggtttgggcttcgagaataagaagcccaacaacttagttgtagtcgcaaagtagtcgcaaatctgtcacctaaatgatttgggtttgggctttgatatttagaagcccaacaatttaaaacgttgtcatgtaatagtcgcataattgtcacatagtaagctgtagtcgccaattaatcgcattagcgtcactgtgttcatttggtttgggcttcgatattaagaaacccaacacagcaaagattcgttgttgagtagtcatattgtcacatctctattggatttgggcttagttatttggaagcccaccaaattataatttagtctccaagtagtagcataatagtaaccttatacttttaaaatagaaataattttacataggaaatattcatgaacaaattaaatgttcaatgatatattataaaacacaattcattcaaatgttttatcaaataattaaacatatacttcacacatttattactcttcatattctacttcatcttcgtccgaggacgataaattacatcggaattcgtcttcttgttcagcatccccaacatcgtaatcaaggattattgggtttaagccttctaccggattttctagtacaagatcttcaattgtagtgagtaaaacagcatcatcattttctgtttgcaaaaaagttggatcattgttttcatattctccagaaatgtttcccctcggattgacttttagaacattgagcgcaaatgttctttggtttcttcgtatatggatacggaatataacaaacttgatctgcttgagatcctgtatacatatatcaaagatagattattaataattaaaaaagaaacgtattttggacttaagaataattacgtaccaagaataaatggctcgtatttattgtatttcctcgtagatagaatgtctacaacgccactatggcttcgtcgagtgcctctcccgatctttgggtcataccacttacacttaaaaagtgtgatcctcaaattgacgataccctcatactcgagttctataatatcagttaaggtaccttagaaatccgcttcatctgatgaatcagcgtaattttcacctttaacacagaccccatagttacatgtctttcgtccagcgccgtgattttgcgtatgaaacaaatatcctcttgtgaaatacattggccaagttttaaccttgttcaaaggtccttgcacaatctcttgaacccaagtaggaaatggagaagtagtgttccagtatgttacctacataatagataaacaatatcaattagtatatattaaatgatcacctttcgaatgaaccaaaattgatgtagacttacatattctttaacccatagatgatattcttccgctcttctcgcgtagagttctttttcgggcaagcatggatatttggcagaaagataatcttcgaacatactacatttacaaacgaggaaaaatttatcaaagtgatcttagtgaaaatttacaaacaacgagtgattaaaaatacctctcaaacggtttaaaatagtcacaatttcttaaaacatatgcatgtgcgctttggtagtctttctctgaaagccaatctacatgcatttcaccacttggacggccgacgtgcataaatatattagatactccagggacatgatatacaggaacttcaccttcattgaatcttgttaacctgatccaaaagaggtaatacatggttatttttgcgcattgaaaaattgcttggtgataatacgtttttaagtcaattaatcctaaagcattatcatgtcgttgtagtacttagggtgtcaatccaaatgggtgtgatgcaaacagatgagatgtgatcagaagtcaccaagtcaagccaagaaataacagttttggggtttctaacagtcctaagcgaacatgcagaaaacagaaacaataacagaattactaaaatcactcgaccacaacaggctgatgccagaagtaggatgtggtcgagtaacagacaggatatgaaacatatatactcgactgcacagtctattgccagacattgggtgtggtcgagtatactggtcgagtaacagacaggaaatgagaaaactatactcgactgcacagtctgttgccagacactaggtgtggtcgagtaagttgatcgagtaatcgcaaaaactaagaaacagacaataagaacgattaagtgataacgataatacaggagaaatcagatagacgagaaattcctaaggatggggtaatcgcatagagtggtatcctagcttattcgaatggttaacaagcccaatcaagctatccctagataacaggttcaacaacagattaattcactcccgtgatagaaatcctcaagcatagctagacacagacctaattcccattaacgatctctaactaagcaggcaataagaaccgactgttaaagccaataaccgctctaaacggacaatcccttgggatagagacgattatcactggaattagtagatccaacgttccattaaacgccttctgggcgctggaacgtttgggatcggattccagttgatcagaaaggaataagcagtaaacacaactaatccagaagggattcaataaatctacacttaaccaacatattcgaccaggggttccataactagtctatctcatcctcagaaatcctaatcactactcagacaacatgcttaaagacaataacatagaaacaaaagatgaacaagtaaatgaaagcaaaatctgaataacttagaagaaaaatcgaaatacaaagttgtaggaatgaaaagcggctgctgaataagttgtagaaattcgtgtctaaatagtctgtccaagtctgtctcagggcgaaaccgttagagacttatttatactaagataagaaagcgggcttcaagcccacttaacggcccatggacggcgtgatcaagagtgtcggctcaaagtgggcttcctgatgggcttctaatgggcttcgaatgggcttcaatgggccttctcttctcttctctttccgatgctcaggttgtctggttgagtgcggattgatcagagggtcgaggtggtagtcgagttggttggttgacaaaatggtctgggctgcttcttggcctctgtgatcgagtaagtgtgtcagctgtcaagatggactggttcttctcctctacgatcgagtataactggtggactggcaaagtggactgcctggttgcctctgcgatagagtagaattgtagaattgactgcctcctctcctctgcggtcgagtatatctggcagaatggactgcctggtctcctctgtgatcgagtagaagtgtctggatggactgctgacctgactgcttccctctctgctactggtgatcgagtatgtttggtggaagtgtgactttctgttctgttttccctctttctgagcaccaatagctccaaaacacctgaaataactctagaatgcagaatgtatgcaagactagtcctagactcgactaaagatgcaacatgtacgaaaatgatggtgaatgctatgaaagatagatgaaactagactcaaaatggtgataaaaggatgtgtaaaacatgcaaattatagacatatcagcgaccaattctagcaaatgaaggaaaagcttgtcaagatcagcaacgcccttcttaaccaacaagacgatatccaagaccacaacacaagaatcatcagtgtcgaatttgccattgattcggttgaaggtcatctagattggaagattgaagaactagagaagaagctcactaactcaaacgagttttcggagtggagaagtaaccaatcttaccaagaagaagaacattttcccaaggcccaagcccgatactaggtggaaacaaaaaaggaaattggattcctagtgaaaaagggaaagatctatgttgctattccgaaaaaggaaatcttgaccctataaaaactctagggatttcgatccctaatgtttctcaacaagatcaaatcaaagaaggatatcacttagaagaagaagcagcggcacgcctagaagaaaattcaatggccgagacttattcttgaagtgagagctacgaaactcaagaagactattctcacttcgagaatttggagaattggattgaagactgttcaagaggggatgatgaactcagcgaccgttctaaagaagaggaggattatgaagagttcaaagacacctactcttgcatgacaactagactcctcgatgaagatactccctgaaaccctagtttcaaggcaactatgaaactgtgctacctaaggccatctccaatggtgagagcccatggatgggctctcaccattttttaagaataaattatgtgaatttgttagattagaacttatgttcaaaaaaaataaaaaatcatagtccaatggtagtttctcttaatagggttctcatgaaaatataaaattattttaaaaatatttaatttcataaaactcaattaaaaaaaactatgatcaataaggaagttggtaatgtacatatgaataagattgttctaaaaggtttaacgtacccacactacaagaaaaatccacattcttatcacgagagaaacgctatgttacgtcattaatagcgatttcataaacgctattttatacccctgttatcgtaagtaccccatataagatagcgtcagatatgtgtgctatgttaattaattatattatagcatcagggaaacgttgtgtcttgattcgtgttaattagttattatattatataataattcattacccatgctatgttaggggactctacgatagctttgttaaaccagtttagtttatgtttttatatagtaatatttatgctatgatatagtatcttgtagcgtttgtctatttttaaatttttgattaattacttacttattgcgctatagtagatggatctacaatagcatttgtttaatcttacattttgataaccaattgatttcgtaccaggtttttaaatgccataacaagtatattcatgcacctgttttataaaatcccacaacatttcattaatactttctaatccaaaacacaaatcacaaaacacaatcatctcattaacatgtttcacaaacatctcattaagatccaaaagctactaaaagtctgaaaacaattttaactaacaagttccacaaaccaaacctcatgccatgatcactttgtcctcaggccaagcaataactgtcccaatggcatcttccataatctctatttcatctgatttcctccaaacttctacgtcgctaactttaacaatgtctacccacactttaactgcattatcacccaatggaacaaagtgaaccttctgttttggatcatttgttgcccaacgtccttccgccacaacacgcttctttccggtaatatccatcaacttgcacttcatattttccttagaaacgccttgatcgaaacactgccatgttcataacattaataaaccaaagactgattcaatatgacagaaacaatttcaagatactaaggaaacatttacctgagatttctgtagagttttctgacttggagagcttggagcatttgcattctccaaaggagtttcagatcctaaagctgaagacttagaacttgtggatttagaagctgaagattttgcctaattgcggaaaattaactcactcttatgggaaggttaacaaacccctcagcttagagactatggtctctcatactgtggctctcgaaccgctggaaccttaaaggcaaagcaatacgttcagacttgggtaatggctgctttaagttcatatttaattttgaagacgatcttactaaggttctaggtaacagaccttaccactttgaccagtggataatcatctttcaaagatgggaaccaattatctctccaactttcccatctctcatacccttctggattgaacttcgaggactccctaagcacttatggaagcaagaactgctctacaaatagggaggaactgggagaagttctggaccatgagatctccacaatagttgcaaaaataagagtgcaaatcaatggactagaccctctaaccaaagaaacagtggtggagttctcagatggcaggaggctaaagttacactggactataaaaacctgaaaaagcactgcaaacattgccaaagactctctcacgaagtggatagctgccctggtttaggtcgagagaaagctccctcaagtggaccaaaaccaagccctcctccgaaggcacctatatctactaatcctgctgtcagctcccaagcaagatccaaatctcactcaagagacacttactcagcacaagcaagatatcccaactccaggagagaacaagaccataacaaaagaagatcggaggacagagtgcatagcgacagtcgatactcaaaccctaatcaatctgttcataggactccaagttacagactgtctacttctcgatccctagactactctaggagagaacgttctaattatcatcttaccaaagaaatctgaatgaaacagaacactccacatcctctagagcaaaacgccctcctctagagagaacctctttcgcaggagaatcaactcatccacctgacactatcccaaccattgtagaggtgatggacgagttaagagaaatcacagtgcagtacacaagttgcgctgacccaaccgagagctttgctagcaaacagagggtgatacaggaaaaagctcggggcttaatggcagaaactgctgagtagatcatcggcacatcaggca

SEQ ID NO: 35105 - DNA, 3002 bp, Arabidopsis thaliana landsberg
tcatacatgtatcgcactatcttacctcaagaagatacctgtaattgttaacactttgtgtgaatcagcttagtttttttaaggcattgtattagtctatgttcgactaggattctgaatcgttaggtgttgtaatgtctctgctatgagtttgggattgattgcttcaagtttagtctttcagtttcattgttttggatcttgtggacagtgtgtttcatgaagtgagatcaatcttaaagtcttatttcttggttattgatttcagcttgcaacaatttcaacgtttcacatattaaggagaaatggatcctcggagaaacttccaaccaggtggctatgactctcggaataccttcacttcaggatcttttgggcctccagattttggtgaaagtgatgaagcagagttggtttctgtttcttggaatcaggattcaagttgttttgctgctggcactagccatggttttcgtatatataactgtgaacctttcaaggaaacttttaggcgagagctaaaggacggtggttttaaaattgtagagatgcttttccggagtaatatactggcgcttgttggtggtggacctaactcccagtacccttcaaataaagtattgatttgggatgatcatcaggggcgctgcatcagtgagtttacttttcggtcggaaattcgtgcagtgaagttaagaagagatcgaattgttgttgttcttgagcacaagatatatgtctacaattttatggatctaagacttcttcatcagattgaaaatatggcaaatccaaggggactatgttgcctctctcatcacatgaatacatctgtcttggcttgtccaggtattcgtcgaggagaggtccgagttgaacattttgggcttaacatggttcaaatcattaatgctcatgattctaatatcgcgtgcatgaccttgacattggatggcttgctccttgcaactgccagtacaaagggaactctgattagaattttcaacacgatggacggaactcgtctgcaagaggtctgatatgtgataactatgaactaactagctttcattttcttaacaccattattgtaccatatgttatctaagtaaatattttggtaaggattctgtcaaggtaatggttgagcaaacaagctgtcacgatttatttagaaagactttggtagctgttaataacaataatggaatcttatgcagaacatatgtcagttttgtatgcatattattaatgaattagtccaatgctgctttgttacaggtccgaagaggcgtggacagagcagatatctatagcattgctctatcaccaaacgtgcagtggcttgcagtatcaagcgacaaggggactgttcacattttctctctcagagtgagagttataggggaggacgcatactccactgaacatgagacttcttcaaattccctgcagcctcttgtttctccagccagtggtgccaaccctggttcgtcattgtcttttctgagaggtaagacagaaattaggagatatctgaaaaaatgactgttaccgtgaaagtacatatgatatgccttgtttctctttaagaactgcttatggagtgaaaggacagaaggctacattatattgagtgagtacataagtgaaacttccaagaaatagctttcttggttcatgagaaaatcagtgatctttatagaagtgtgtccctaagaaaccttgtgaaattttatgtgtcactaggaaagttattgtttttttttccatttcatagcttttctctaaaccagcaaatcgagaagtatatttcaaatatataattgtgcagttggatcatctcatgcttctgtctggtacctaacatcttcagacattgttgcaggtgttctaccaaaatatttcagctcggaatggtcattttctcagttccatgtacctgaagtcacccaatactttgcagcatttggtgctcagaacacaattgcaattattggcttggacggaaggtagctaatctctctgaatgtatattcacatcatccacaagtattatatgcttccatcacactagtcagaatagcaaaaacataaaataaccaacaaccacacatatgatttatcggccttacagtttctacaggtgcaatttcgatccagtgaacggaggagagatgactcagcttgaacatttccattttctgaagcaagatagcccgagatagtcagaccacgtgcttggtttgagttttatgtacataacaattggctctgtatatagatttggtgaaaccgcatacgattttattcttccaagctttacttgattgaaggaaaatgtattcttgattggaacaatgtatatacaaaaaggatttttttttggttataacactaatttctacagagaatcaaactgcaattcgattacgtttattaaaatttcaaatcagaatgttgattataggccagatataacaaatgcaagatggttcagcttacatggtcatttcaaggttacagaaccggatttctccatttaatttaaagacttatacatttaattattaatatttagtagctttaattttttagagacactatagaaaattatgcaatggagatgctttaaaagtattaggtgccagaaccggattttacgactttttgttaaactcacaagtcgctagcttgtggtttaagtaatcttttttttttgataaaatttgcatatattaaaaattttatgtggttattcactacataatagttaatgatgcattaaatttaagcaaatttaatgatgcattgattttattaattccccttgctcaaaatactttctatggtgtgattaacacaaattatattattattcttttagaaatttttgcttgtaaatgctagttttgatcgcattattattcttttttctttgacgtcatttatgagaactttgaattttgttttatcaaaaattactaattgaatggttgatg

SEQ ID NO: 35106 - DNA, 12176 bp, Arabidopsis thaliana landsberg
gggtacattttttcacccgtaatggaagggcattggtggatcggtatggaggaaaaagagtgttggcttggggtgtggcattgtggtccttagccactctactcactccttgggcagctgcacactcgaccttagccttattgtgtgtccgcgccttttttggcctcgctgaaggcgttgcaatgccctccatgaccaccctactctctcggtaattccttctattctacattttgaaaacgttttacgtttttaaactattgggtttgaaagaaccacaacctaagttagatatatggtttcctcaggtggtttccaatggatgaacgagcgagtgcggttggtatatctatggccgggtttcacatgggaaatgttgtgggacttctgttgacgccactcatgttatcttccataggaatctctggtccatttattctttttgcatccttaggtctattgtgggtatccacttggtcaagcggagttacaaacaaccctcaggacagtcctttcatcactaggtcagaactcaggcttatccaggctggaaaaccagttcaaccgtcaaccaattcgccgaaaccaaacccatctttgcgacttcttttgtcgaaattgcctacttgggcgatcatttttgctaatgtgactaacaactgggtgagtttgagtttaatagtatctttatcagagcaatacctcatcttttgttgccataaactcacacggttttcgttagttgttgttcacagggatactttgttcttctctcatggatgcctgtttacttccagacggtatatagggattattccatgttttcattcagatatatatgaacttcaagaaaatatatgatgttttatatctttgtcttgtttgatcataggtgtttaatgtgaatttgaagcaagcagcttggtttagcgctcttccatgggcgacaatggcgatctcaggttactatgcaggagcagcatcggacttcttgataagaactggtcactctgtaacctcagtacgaaagatcatgcaagtgagtattagaagtgccatacttggttaactaaatagccgacccataacattctaacggaaagtccctgcttttgtttgtcagtctattggatttatgggtcccgggctgtctctgctctgcctcaacttcgcaaagtcgccttcttgtgcagcggttttcatgaccattgcattgagcttgagttcctttagccaagctggatttctcctcaatatgcaagtacgttaactctcacccttatataaccaaccattcattctaaacttgattgatcactaacctaaccattttgggataatcttgaatctcacaacatcttttggtttctctttgcggaaacaggacatcgcaccgcaatatgctggtttcctgcacggtaataatgttatcagatggtggatcttttcttcttcttcttttgcatcgattttgtttcttgctgaaaaagttaggttttgtatatctggtgtgcgagacaggtatttcgaattgtgcgggtacgttggctgcgatcgtaagtacaatagggacgggatattttgtgcagtggctcggctcttttcaggcgttcttgacggttacggcctttctttactttgcaaccaccgtgttttggctcctctttgcaaccggagaacgagtcttctagatccaaaacgctctccttggacactttactgtttagagctttgactagaattaaaattaaaattcattctttcttttatttggaagttagagtagatatttctctggcacgtctgtgataagcactatatatacttccgattaaatcataaaatagaaattagtttttatatacagtattgtcagtatcattcaaaaaaatgatttcagtctagagattgaattagttaataatggtggcgaagtggccaaaacctagcttctttagagatttcacttactatttttcttaaaaatgacccaaaagatgaatgagttagagatatataataagtacacatcatacgaccacgagaaatgaatcgtttacatgtgaaaaacgacaattctagtaatattatcatgtgtgaactattccattatttgtgaatttatttacagtaaacaatcagacccaaaaaataaaaaattccaattaaagttctccaactggagttgattctgcccttattagagagatctgatctttccccaattccataacccgaaaaatggaagaaatcgccgataaaaccttcttccgatactgtctcctcactcttattttcgccggcccaccaaccgccgtccttctgaaattcctccaagctccttacggtaaacacaaccgtaccggatggggtcccaccgtatctccaccgattgcttggttcgtcatggagagcccaaccttgtggctcactctccttctctttccctttggtcgtcacgctctcaaccctaaatctctacttctattctcgccttatctcattcattacttgcaccgcaccatcatttaccctcttcgcctcttccgcagctcctttcccgccggtaaaaacggatttccgatcaccatcgccgccttggctttcacctttaatctcctcaatggttatatccaggtacggttttagctaatttcggtttggttcgtttcgattttccggttttcatctattttgctaatttcggtttgtctgaacaggcgaggtgggtttcgcattacaaggatgactacgaagacggaaactggttctggtggcggtttgttatcggtatggtggttttcataaccggcatgtatataaatatcacgtcggaccggactttggtacgattgaagaaagagaaccggggaggttatgtgataccgagaggaggctggttcgagttggtaagctgtccgaattattttggagaggcgattgagtggttgggctgggctgttatgacttggtcttgggccggtattggattttttctgtacacgtgttccaatttgtttccgcgtgcacgtgcgagtcacaagtggtacattgccaagttcaaggaagagtatcccaagactcgtaaagctgttattccttttgtgtactgagaattgagaaagttgaaaactagtttatcatatgttatgtgtcaatttgtttccaaactacctttgtcaaaatttccagtaaccggtttaattccaacacggtttagatcttatgttggtatcttcaacaatgcacaacaaactgtgtattctttagacaaattttataaataccaaaggttttgaccagaagaggagcgaaaaatgttcacgtatgtcaaagacaaaactagtgttctaacaaaataagacataacaatacagaaatgaatccaaagacaaaagtcaacttcaaacgcttgttccaatccagaaatcatgttccagaagctaactagacaaaagcaaggttttttaagttgctgttcctccactatagtttatctctctgcttcagatcatggaggatagcctctttaccggggatatcgaaagagcttcaagatcctgcgagtctttgtgttagttagcatttggttgtgtgtctctgaatgattcaaagatggtgttttgataagatttttgacttacaaacaatgtcttgttttgtgcttcaggcgaagctggggttaaccatctccgatttcccggattctgaactatcttcgtcatcgtcatcatcttccttcacactcccgtctgattcctctgcagctagttcacgtgcagctgcaagctccttctcgagctcgtcttgcttttcctgcagtccggacgtgttcagagcctctgcaatcttctgcttgatctgctgctcaagtgcctcgattttctgatatgcttcggtgacaccaggcgttttgctcgcctttgcggtttccactttcagcaactccaccatgctcttgatctctggtgtcctcaccacctcctcaatcttgctggtgatttcttggttcagcttttcaagtttttcttgaaggttttcgtttgcggcatagatctgctcagccgtatccttctgattctgtttaacagcgtcaagctccagacccattgactttaacacacccgccatctctgcttcgacctcccctttagtcttcagaactttttctttcagtgcatcaggtaactcgtcaaaagaagaagctcctgagctcgcgacctcagctttgattgcctcgaccttttctctaatttctgggcggtctacagcttcctggaaccgcttattgatctcctttttcaatgaagtagcttctgatgctgctttggctctggaaaagtccctaagcatgttaagcttagattttaggctctcgtagttaggtgcgtcagtcaaacgggtattgaattcttccttgagcttctcaattttctcgatcagaaccgggtgcataaggtgctcttctgaactcgctttcgagaactcttcgcgcattgccgttagtctctcctccaaacctactgctattgcagcttcagtgtactcgtcatctatctcggatttgagtttctcaatcatctcattaagaacttcactcgaaggctcggcttccgtagacgtctccttggctttcagaatctgctccttcagcttgtcaacctcaccctgcagcttccggctatctgagaacacggcttcccttttcttcatgttgattttcctacttggctctattggttcgccctctatgaacactccaatctttcggtacttagccatcctgtgtttcaggagctcctccccactcatttttccgaattcctacaagttcccaaaaaaaagttagaactcttttagatccacatccagcgttgagaagaacaactatgcctacattcatgttttcattgatagcaatctttatttgctgcgacgtccatgaaggatcggcatgggcccctccaagcggttcctgtacaacatgtgagagttactcagtgatccaaagtgacaaaaaaagtgtaagaggaaacagatagattagaggtaggatcagttacaggaatggttccttcagctgcagtaagcgtgaccagctccttggaggtaattctaagcttttcagcagcctgcgtacacgagtttcattcaagtgtaatattagagtctacatgatcacttttaatcgagtggtagagcagtgcacatacctcaggagcagccttagaagtcttccacaagatcgctgcacatgcctctggactgtgaaaggcaaaacaacagacgtgataaatcaatctgtaaaaacatcatctcatcatacctactacattgggaaaaagtttacctggcaacatagaaaactgcgttttcgagcatcagcattttattcgcacagccaatggctagggcaccaccagaaccaccttccccaatgacaatagaaagaattggcactttcaggccgaacatcgtcctcagattgttggcaatcgcttcaccctgttatacagataagaaaaaaaatgttatgatgcagataaaccagtagtacatttcaaacataaaagacatttcttctacctgtccaagttcctcggatttaagatctgcataggctccaggagtgtcgataaatgtcacgattggaaaaccgtgatggtctgcataatacatcatccgaagtgctttcctatatctgttgtagacattacagaaatttgataagagagttgctgattctgaatgtttctatttaactgcaaaccaggaagctcctcatgaaaacatacccgtgaggagtaggcataccaaagttccgcattatattttctttggtgtttctacctttctggtgacctatgaacatgtaacgttcatcaatggttccaatacccgtcacaattgcagggtcatcataccccgctcggtctccatgaagctccataaactgaaacaagagcagagagtcccaagaatgtaaaaaaaaaacaagaatttatcgtcaatgcatgacaaaaaagccttactactgagagaccaaaccttgtcagtgatgttatgtatatgatcaaggaaagtaggtcggttgggatgacgcccaatgttcacacgttgtatcagagtgagatgctgtaaagattttttccggtgcctgacattagaatggcgggggtcaataagaagtctttcccaaacaaattgtagctatacattaacatcaaatttgaacggtgggtctcctttaaccatttaaatcgagaaccaacttatacttgtatctttacctgtctatacttgttctccaaagtaataatctgctcagtgaagtccaaccccgtttcattcgccatcttccttacctgcatcacaagaaccaatgtcatgagaaactacacacaggatatcaaacaaagatacaaaacaaaatgtcatcaaagacgaaaaattctgggacataaaccaagtcagactaaaacatggactttcaaaaacttacttaagctacgggagaatgcagctaagcggtttacaatcgtgccagggaatagtcggacttgtagatagtgcatgagggtacgggcaggagtgcataagttacatttgaaattgaagatagtgcataagaaaaactacccattttgctaaatacaaactaaaacactacccacctagttaaaaatttcctaaatactaatactaactagaatagaattgccctacagataggacaagtcttgttccattgacttaaacagtgaaagtggaacgcgtgtccgcacactgtattagccaatggaacattactttcaaaagtgtctagacaaatactacaatccctttcgggatacctaaatacgaaattctctactggaacgggtatgagcccttcttgatgatgttcgtgatcggagtcaacaacaacttgtacatatgtgttgtcatcaactcgatgaacatcatcaagtgatggaaatattatcctaagacatataacaaccaacactaagatagttataccaaaatcatggcaaataacaaaataactggactctgtaacataaaccagataaacgagcgcatgattagaagagttagaagagagaaggcggaggaaaaagaacagggagttgaatggagttgaatgaatggtttgtacaagatgaatgaatcgtttggtaagtagaagaaataatattgggacaattttcctgaaaagggcgattagaaaaaactgaaaaacatcgtataatcttgctgtaaaagtgttttttagcgaagattaaaacataaaccaaatcagggtctgacctctaaaatcagcttccagacctcgacaaacaggtatctccattgacgaatctgatgatagaatctctgtttttcgatatccgaatctctgttgacgcatcttctctcctttgtaaccaatttgataaaacaaaaaatcgcgatcacacctcttcttcgcatgcaggactgccttttttcttctgtgatgttgagtaatcaatcctctttcgcctcgtccgccgtaattgaagacctcacccgcttctctggaaattcgaaacttcgtcatcgaacaatcggcttcaccggagttcttatagctagccggatttgataccccaggataatcagatcaacaatcaaacaataggataggatctctgcttttcgatctcagaagctgcttttcgatgacattattgtcattcccgattgtttctcttacgatttgggcttagtactacctaaaagggctttttgtttttttgtcggccaaatttcattatatgaaagcccatatgggaatattacaacatgatacaagcctttttaagcccagattaaatgaacccaataacattaatgacacgaatccctataacgtgtattgttaagcacatatgtgggcccactcttctcttatcatctcgattcttcttgccgactaagatttggatctgacttgattcttctcgccagcgattagtagatagagacttggaatcatgcttcggagaccttctttccacaattttagccatagcaactgttgaattagtcttagaagacttcgaactcaatcccacctccaagaagaagctccacctaaaacctaacgaagaggtctttaatccttcactttgaggatatagcggcgaagatattactctatcattggagaaacatcaagtcgatgactaattctgataaaagcaaacgggattcaagagtaaaagctgtagaaaaagggaagaacaaaaaggaaaaaagcgtatcttagccgacaaattaagatagataaacagaaataaagatcgactaagaaaaatagaatccaaacaaagtcggaaaactatataaaacaaaaagatggaatattccggttaaccggaattcaccactctctctctcaaagatgaacagtgtgttaagagagagagtctcttttaccatatctttttaccttttagagctttaattatgcttacttgtatgggctgtaaaaaattattaggcatcggccatttttatttttaatgcaacaaaatccactaacttctgcctaaatttcagtttgttgtttctggttgatacaagtaattattattgttaacaaaaacatagttaagttcaaaacttagatatttcaaaaatttcgatgaacaaacttatgctatggtttatgatggccaaaccgattcgatcaagttttttttttttttgtattggcactagtactaccactcatcttctttctcttcttagcttgttgccctttttgacattcgtctctttttctcttcattgattccttatcatgcgatttcccaactaaagacggttgttctctctgagcaaaactcttggcgacatgacccaagtcaagtgaagcttcttcaccacgaaaatgctcttgagctctcccttgtgagacacgaatgcactcttcgctaggttcttcatcttttttggtgtaaatgttaaattgttcttcatctttggctgtgaataagacggatacaaacaaagagagatttttaccatcagagtatcaatcaatcacagcgagagggaacacattgaagagaatcgtacctaaaagtaaaatctactaacttctataaaatttcattttcatcgattacatttatttctattgttggtgcatgaattagcacctccgacaataccggcttaaaccagaggaactacgaattagactgagattgcaatcaaaccggggtatcccggtttagtctgttaatgagccaaaataaggaggtcatttgccgactttagccccaagtagggagaccgcctagccgacttcctaattcgaagaaaaagaagttttctcctttgaaaatagcaagtcttcgaagataaaggaaattagaagattcaagcctcgaagaattgaaagtttaacatatcttttaatcgtcttaatagtgtataaataggagggggggggggttgtcctctattctaaagatccgaaacttaataataaaaccctagttttcttcattgttcttgagcaaaaccctaactttgtctctaagcaaccttgttcttcttttcattgagcctttgctcactaaatagcgagagagagttaagtaaatttgtttatcccctttaaacaaatttattgtgtgattttcagaatcaacacctatcaacttattttacagtctgacttatatttttttattgttttgtttttatgtaatctaatttttgagaccgttgacttattgttttatttgttcatttaatttttttcagtttccaaaaaaaaaataaaaagaaaatacaacccataaactaacatcgtcatcatcatacttttcaattttcatgaacgtttgttgctcatataagttgtaacaaatgaataccatagaatatttgtgttatttttgagatattcatcctacaaatgagaatttagtacttaaaatgaatattttgtgctagttcacccaaaaattatgtcaaagaagaacaataattctctaataaacgtgctacaagaataagaatgctactaaattaatcaattaaatcatttaacgtaacaatagtttcttaactccatttccgatgatgttttgtttcaacatatatatatttaaagggacaattagtgtaaaaaaaaataaaaaaaaatcattggttaaatgaccacaaaataggtgaatttagtggatggttatgcgttttaaacctactaatagatttgtatagaatctgtaaccttttataaatgcggaaaacagaaaacgaatctgtaactatggaagagaatccaagcatgttttctctataatgaatgtttggagttacaactagaaatagagaagaaaatcggatgaaactagttcaagatattggcaagttcaccattttcatacattgaggtcaaaatatcacatcctcctacaagttctcctttcacaaatatctgtggaaacgttggccaattgctgtagttcttaagcgtctcccttagcccatgattatactcatcgtcaagaacatcaacagtttcataatcaactccttggctttcaagaatcccaacaactctctgtgagaatccacattgaggagcactccttgatccttttatgaaagctaccactttgctctctttcactaaacggtcaatcagttcctccaaaggaaccgtgagctcaacatggcgacctggagtgagacggatatcggatttcttcctcggagtttgtttgacaaatgtgttgttccctgacttattccccggcggaacttttccagttacttttatatgttcttctatccataatttccatgcttgtgttaaaactgctttatccggttcttctactattccaacctagcaaaacaatgatgaaatcagttatggaagatatatcaacaataccaaaacttgtcaatatccatcacatattgagtcaatggagcaaataaacactaaaataatcataacataagtaaatcataagcaaaatataagcaataagtgacaaataaatgatagaaagaggaaaaatgtaaattcttaagataataatacaacccataaaaatgtaaatttctcaagagcaatctttagatttgactgttgtaagctgatacagttaaggatcatggacaccaagaaaaaaacaaaagctcttgttattaattaaaagaacctgacacagaatggtaatcaaaatgccaaagagaatcagttctctccactggtacaaaaccgatatacctctcaaacctcgacaaatctcgccaatgcgcactgtcctgaatctatagagtagaatttccctaaaaaactaatcaaaagaaaatgctaaaaaaacaagtcctaactcctaagtaacatatacaaaatgaactattgatgcatctcctaatcataatgtgtggtaagtgttgttaaaagaactcttaccaacaacagaaccaagaacttcattagctctagttttgcaaacaatagtgatcctaatgatatgaaatactatctctggaactaaagtgttgaacttttgtagtattcatttaccaaaacacttcccaaatctatgaacagtaataaacaaaagtcaaccacaacaaaacaaagaatccttcgttatagtaacagacatgctactcctctatatgaaatcatggataagtaccttaacggagccacaaagctccggcacagatttgagatgagcagagacactcgcagcgatgttccgagatattccgacgaactgaagctcgtcgctcttatcgtatacagcgtatacaccggaagcggacgggattgaatcagcctctgtgattggaagcagctccgtctccgttagagatttgacggcggaggcgataaagaaggaacgacgacgagacggagctgtgtcacggagtgtgaaggagagagatgggaaggagaaggatggtgtgaagcgtgaatagagggtgatcacaggggtatttcgagaaacatgtggacgaacaacacgcggagaggctgaggcgtgcaaggaggaagaaatggtgattgcagccatttttgtcggagctgagaaaagttatcggtggaaaatgatgagctcttttatttgacataggattttatccattgggcctgaatt

SEQ ID NO: 35107 - DNA, 17906 bp, Arabidopsis thaliana landsberg
  unsure (1)..(17906): unsure at all n locations
gaagaacaagagctgaagacacaacatacaacaagtaaatttacaaacttaacaatttaaagaagtacaacattgtctatgactaaagggaaaggagtaaaatagtagcttgttaatagcagactcataataaatcacaataagatcaaacatgaaacttaaaagtttacactgatcttatggcttccattatatgcttgcattataagtattttttctcactatcttaacactgaaccttgattagcagaagaaagagttgaaacacctaactaaaaccaaaaagataaagaacgacttattctgtaacactccaaacccaacatcaatagctcaccctattcgttttgtcaaaaagcaaagcccatggaacccatggagcccatttaaacccaagtgaagcaactccctaatgttaaagggttttgttacgtgtgttgttggttgcacatatatataggtgaatctatctcccttttctctgagccactaaaggaaaccaaataagaatcttgagaaagcaaatccaaagcatcaacacatgagttctatagtggggtcgttaccatatcccagaccccagagagtccacaagtgaaggaaaccaaagcgattcatgcaaccgttcctaaaccgagcgtcaccgcgtcgtcttaatcttaaccctaattaaagatcagccactaccgttgttgttgagtatgttagtcattgtggaacgcttgaagaggagaagagaaagggaagagatgaaggataaccatgaggaagatgagaggaagcggagacgaaggacaatacgtggcaaaggaaaagagatcatcaccactgcaaaggaaaggcattaagagatggagatttcgttgtgacagtaaggagaagtgagatgaagcagatcctagtaaattagagaagggggctaggcaaaactagaagcatataaggaagaagatgaagagaaaatagtagtttcaagttgaggttatacaaggatgtttcctgtcataccagagagaatcagtttctaaataagacatatctgcagagatcatgttgccatgataccctcgacatttttccaacctttgtaattgatcgttccaaataatgtataataatgaggtcataggaaacattcctacccctatacactatttaaaagtcttctcaatctctcattatatatttattattattatttttttattaggggagaggaacactttctttttaacgcattagtcgacttatcaggtatgaacaaggagtcaagtcctatgagcactaaccgttttgatgaggtaaaaggaagagcagtgagattagctcaagcctttgtggattatgttgggaatggatgtccttaagtttgttgattggccttctggattttccattagtcggattgatttgaatctgcagtacttaagcaatccaggcaataaactcgagagatagatcataatttcagacaaaagttttgactcaataatatgactatctaagttaaaatgacacaactgactcataagaaaagaaaagatgaagttagtaactgactcccccaaacttagataacactgtccccagagttattaagatagaggaatcgaaagagaaataatcaaaagttaaaaagttagaaaatgtgagttgccacctgagagtggtgtcgatcgataccatgttggtgtcgatcgacactctggtcattttgcttagctttgcaaattctgctcattgttgtagagccttggttagtgttttcacatggatcctccagttagactgttaaatcactaaaacacacatccatagttccaacaaagcataggaaaataagtgcaacaagtttcaaaacaaataaccaatagtctgaaataaagcaaaaacaaagtcagaaaacaaagcaagataaggaggatggctagtcctcatgctctgagccagaggtgggtgcgggagagcgacgacgacgacgagtgggagaaacacaaccgcagcgagaaagtgtagctatggcgttccagacgctcttgaaactatcaacgacgtactgctgaaagacctgtggctccatcgggatgggtggaggagaaggcaattgatatggaagatgacaagttttaccatatagaagatgaaaaagtgtggtccgaagcggagttttgaaagttgtcatgtaagcccacagtgcatcatctaactagtaggaccattctttttccgctttacccattgttttctcaagaatctctttgatttgcctgttgaaaacttcaacttggccgctcgtttgtgtgtggtagggagtagcaacccgatgctgaactccatattgtaaaagcaattttgcaagaatcttgttaatgaaatggttacctccgtcactaatgacaatgcgtggcactccaaaatgagggaagatgatagacttgaagagtttcatgacaactactgaatcgttcttcggactagttatagcttctacccatttagagacataatccacaacgactaggatgtagagattcttgttggaaggtgggaagggtcccgtgaaatctataccccaacaatcgaagacttccacttcgaggataaatttctaaggcatctcagtacgcttgctgatctttccccttttctgaaaaggatcacactgcgatatgaacttctgagcatcccaaaacattataggccatcaaaagcctgcttgaagaactttggatactgtattgaaggttgcaaaatgtcgtccatagctagagctgtgacaatgcgatagtatatcaggaacctctgttgcagcaatgcatctcctataaactccatcagaacaatgcttataaagataaggttcatcccaataatatcgccaaatctctcttaggaatctcttcttgttgtaatctttaaaattatccagttccacatctgcagctaggtaattaacaatgtcaccataccatggatagtccttctcgaccgttgtggtggtgcaattctcagctggtgacctatttcttgtctgatcgggagggtgtcgatcgacagtctcaatggtgtcgatcgacacgatcccgcaactgcgaatatcaacttcctctgaaaattgagtgtcgatcgacataaaatgagtgtcgatcgacgctaaagctcgattctgcaacttatcacatttgcagtcaccttcttcagttgtatcaatcatgtatatgttctcctcagacaagaaatcattaataaggacatcatcatcaatcctaatgcgtgacaaataatctgttacaccattctcaactcctttcttttctcttacctcgatgtcaaattcctgaagaagcaaaatccatctcaaaagtcttggcttagcatctttcttttgcatcaaatacatcaaggcagcatgatatgtgtgatcaataaccttggatccaacaagataagataggaacttctcgaaagcaaacaccacagctaagaactccttctccgtagtagcataattcctttgagcatcatcaagtgtcctacttgcatagtagatggcatgaagtttcttatccttcctctgtcctagaacagccccaactgcaaaatcactcgcatcacacattacctcaaaaggtagatcccagtctggtggttgaacaattggtgcgctaatcaaggcttgttttatctgctgaaaggcatcatgatattcttgtgtaaactcgaatttgacttctttgcagagtaaagcggtcaatggccttgcaattttgttaaaatctttgatgaatctcctatagaaaccagcatgtccaaggaaactcctcactgctttaacgttatcaggtgcttgaagacttgtcataacttcgatcttagctctatcgacttctatcccatgctctgaaattctgtgaccgagaactatctcatcctgcaccataaagtgacatttctcccaattcaaaaccagatgtttctcctcatatcttgctaacactttgcagagattctctaaacagtcctcaaatgatggtccatagactgaaaaatcatcaataaagacctccatgatatcctcaatcatatccgtgaagatagccatcatacctctctgaaaggtttgcggaagcgttacaaagaccgaaaggcattcttcgataagcaaatgtaccatattggcaagtgaaagtatttttctcctggtcatcgagatgaatcgggatttgaaagaaacctgaatatccatcaagaaaacagtagtacttctgatttgctaacctctccaacatttgatcgataaatggaaaggggaagtggtcttttctagttgcagcattcagcttcctataatcaatgcacattcaatggcccgtaattgtctgagtaggaatcagctcatcctttttgttcttgactattttaactcctcctttgttaggacctacatgaactggacttacccaactactgtctgaaatcagatagatgatcccttcttccaacaatttcataatctctttcttaacaacatctttcagattcggattcagccttctttgatgttcaactgaagacttagactcatcctcaaggtagatcctatgcatgcatacatctggagatatacttgcaatgtcatcatgagaatagccaagagctttgcgatgattgcgcagcttgcttagcaataaggtgagctatgcgggattaagagaagcaatcacaataacaggataagtagaattttcaccaagaaaagtgtacttgagccctgctagaagtggtttcaattcgattttaggagccttttgctggatcccaatctgaattagtagtcgacgttgaagtcacagatggaaaagcttcttcaactgaagttgcatcacatgttcggtctcatctagcagcttagtatatgtagaagtttcaatgtccaaatctgcactatcttctatggaagagaccaaaactcgctctagtgggtcttctcattcaatctctgaaatactatctgaagctgatgaagtgaaagaatctatcaagaaggttttcccttctatgattggtttcttgaccaaagtgttcatatcgaactgcatagtaagatcgccaacattcagccgtatcctcccttgtcgaacatctatcattgctccagctgtgtccaagaaggatctcccaaagattaatggatccttaggttccttctcataaggcaagactacaaagtctgtaggaatcatgctctttccaatcatcacgggaacatcaataagaattgcatatggaattcgagtagaacgatctaccaacacaagagtgataaaagtaggctcaagactggaatacccaagacgcatagcaactgaacgaggcatcagattcacattagaaccactacaagaaaacaggcaatcaacgacttacaaagtagtcacttagtagtcgttaattctgaatctacgactagtccgcgactaatgacagtagtcgttataccatagtcgttaagtccagctgtcgtcaattagtcgttgatttacgacttatttatgacaacagaccatacaatatacattagtcgttgagtagtcgtattataatggcgactatttggcgacaatttcacgattaataacactgtacagagcgtgtgaaacatatcgtcgtccaatagtcgttaaattcttccgacaatgttacgactatgttccgattaaatttaatgaaccctgggtgtctttcaagtaatcgcaaaatagtcgtaacatattttacgacaatttgccgactattaaacgagtaaatgtaaaataccaatgatatgatatacttagtcatataatagtcgtataaatttatacgactaatggacgtctgtttgatgattaggttatgattattttggtttgtcttaaaatagtcggtaatttgggtgactattttacgactactatacgtttaatttgcgacgtttttacgactattttgcgacttctgcttttatccgaataagaatttggtcaccgattgttgggtttcttgtttgttgattagtgttatggtttgctgtggtttgttactcgaaatgctataaatcatgaaaagataaacatatattgaaaattaagttcaaatacacatacaagtatcttattcttaaacaaactactttattcaaataaacataagttcaagtatagtgtttggttcttaaatctatggagcagtaggtggagtatttgggagacgctcagtggatgtggaagagtgagtggccatgaagtccaagaattgcggatcgatttggcggagatacttctcgactaaggacaagtgtttgagcttgtccttttgctcagctgtgactcgggctgactcagcttctcgggctgcaatcttagcatcctgcttctcattatacgcagcctgctcttcaattttccgttgagcttcttgcagccgttcttctaaatcttgaaaggatgctgagtcttcggggagttggcggttggcactgcctagagtgtctttaagatatccaagtccataaggattgcctcttgaatccctatctgtggactgcaagaaatagagaggaagacaattagtgaatgaatgcatcaatggactctaagactctgaattagactacaacatcttacctcgagaaagatggctttatactcatctactgtgagatcccaaggtcgtgaagtgccattagagacagtagaagctgcagcctccagttcagacagctttgatctcacattctgcccataagtttgagcaatcttctccgccttccgatcaacataagtgccatccgacttagtgtgtgtctggatgaacacctcaccaagatggaacggtcttcccaatttctcttcctgcaaactgatagtaggttttttttggtcaattatcctataacaccaatcatgtcgttgtagtattttaggttgtcaatccaaatgggtgtgatgctaacaatcaagatgtgatcagaagtcactaagtcaagccaagcataacaggttttggtgtgttctagcagtcctaaatgaacatgcagaaaacagaaaatcaaacagaaacagtgaaacactcgaccaacacagctctttgcagagcactgggtgaggtcgagtgacaggtcgagtaacagacagaaaatgaaacaaggatactcgactgcatagtctgttgccagacaactaggtggtcgagtatgaggtcgagtaacaagaaagaactgcagaaattaagcgacagataacaagatgcagtaaaaacagtagagtaaacaaagaattcaatcagacaaagaattcccaaggatggggtaattgagtagtttcgttttctcagtttacaggtgattgacatgctcaataaattaaccctagacaacaagttcattaaccaaatctaagtgccaccgcaatagagaccctcaagttaacctagtcccagactcaatcaccattgacgagagctaacctaacaggcattacgaatcaacaagttaaagccaaaacgctccctgcaaccaataccttggtacagggccacgaatctgtggaattagtggttcagacatttcatcaaacaccttttgggtgcggaaatgtctaggctcaaattccagttgatcagaaagcaataggcatcaagaacaactaatccagaagggatctataaatcaaactcaaacacctagcatactgagaattcttaactactctaacccatccttagaaacctattcactactcagacatcattgtagagaacataaacgttgaatagaatgaaaacattataacaacagtgtaatagcaagatgataactagatgaacaacagtaaacgaaatcaaaggcaaaagctgaatactgaatagattaagagaaatccggattacaaaaaaagtcaagaagaaagtgtctacggaattaaaacttagattacgaaaatgtaaagtacatgcaacttatagcgaaatattaccgaaaccctaatactcaaaacgacacaatattgggacggattaagaacagtactcgacccaggtggtcgagtgagaggtcgagtgattagctggagtattctttttttccttgtgctcgaatgtctggttgagtgcggaatggagaaggctgtgaagcttgtcatcgagtatgcagtcgagtggtggtgatggtgatactcgacttccacgtagagtgatgaggtcgagtagtgttctggcaatgaaggcgaagacactcggcctcggggtagagtgatgtgatcgagtgatggtaaagtgatgggatgaagtagtgatgtcctctactcgaccagtgggtcgagtgatctgttgagttcttgaagctcctactcgacctcggggtcgagtggtttgacatgatcaggcccacttctttagatagctcgtcaacagctccaaatcatctgaaatcaacgcaaatatgcatcatgcatgcaaatctatcctaaacatgtaaagtgatgacaaatgatgagaaatggtataaaacagtgataatatgatgctaaagtgatgacaaatggatgctcaaaacatgcaaaatacacacttatcactcatcttggtcatagtcttggcggattccttctccacttggtaacccgaaaatggtatcaagggggctaatatcaagagtatactcgacacccctaaccttgaaagttatgtaaccaagacctcccctttcttctttctcagaatcatcaacacaaaagtgaactttgagggttgcaaggagttggcagctctcctctttaaatcccccacattggcagctcatgaacgttgcaagattgaccaattccatcaagtattgcacatcaccacaaataccaagctcttgcatcgtttccttatgagggtatctagttccctcaaactttaactccttcaagtattcatagtactcacttggggttggctctctcttcctccttggttggtttcttctcctaacaggggctggtgtatcatccctgatgatctcaacctcttcctcagaaaccgcttcttcaaagactgcctcttcatggcgttcttccccagcctcaacaaccctctttccccaagctacctcttctctttgcatgtttgaacggcttgaacctcccccttgaatgaggcttgatctttgagcatggcgagcttggcgaatttggcgttcattcatgccactcaagtcaaacgactcaacttcttctttattaatacaggatcttctagcccgagatgaactctttcttcttgaatccatggattttggtggtgagcttctacaggaaaatcaagaacaactctccaagaggtatcaaagtggaaaggattttgttatttggtgatggagttttgagcttaaaaaccggttgaatatttgaggatggatttgggaatgatcgagtaactttggtgaggtatggtgaagatgagaacgaattctttaggagtgaaagggagagtttgcaatgaagtttggtgcgagatagaaaggaatgtcgaaatgagaggatgaaagagagagacggttttaaggatggttttgcgatttcaatgggtggaggaggatggtcttttgtttctttttgaagggatagaaaagcgagttgtaaatagtgtggggcatgggtaaatggtttgtccatcgagtagtgaaatgatgggggaacaagtggggtcacgcgacttatgccttggtctctaaataatttaagctcgagtaaatggtcgagcatccttttgaaatgcgcaatactcgatcaaacgatggagaatgctttgcttttgatcactcgatcaaacggtggggatgatttctctcatttggtcattcaatccaatggctgagaacactcctcttcattttactcgatcattggttgagatggttcttgacttggtttgaatttactcgaccgttgacttcctcagagtcaatgaaataaacctgacacacttaaacgaaaacatcaaaaataacaaggaaatagaaagttatatacataggtagacatgtgacttcctcccaagtgagcttggtttaagtcactaagcttgactcttacaaagcttagtcaaaaaaaggttgaaaggaggaactgagaagtcctcatctttagtggtcgaattttcagtgcttgaatcatactctgcatcctctcttgagatatggtaggatgagtacttatttgatttttcttcaaaataagcttctttctgatcagcagagtagtcttcttcttctgaaccaggctgttttgaccaatcctaaaattcgaaactggggtagcctttaaccatttcttgaagttccaagattgcatggttcagtccttccatcttgtaagttagctccccaatggtatcctcttgagctttgtatccaacttagagtttcagaagttcttcagcaacagaatcatgaatcaagtattcttcttcagcagaggggttggtgggctgtttaggcactcctggagaataaatcggaataggagtttcctcctcactcaacaacttgctctctaggcttctttcctctaagtgaactactttttgatcttctggtgcaaaccattctgttgtgaaattttcgtcctccttgatagctagtgcagtttccatcttctctagatcaataccatttgaaaaatttttaactcttttttcaaacatccaaagttgatctttcagcttcatcacccttgaagacaatccttctatgactctactttgccatttatttatttttctcatctcataccagtcatcttctgtaggatcttcagtctgagctagcctttctgttgttctcttcatgtggtcaaaagttctcttcagcttgctaacttgagaagtatagttaactcttggtggggttccagcttctgtttcttcatcaacatccacgttctgaaccccaaaattctgaactcctgttgttgatttccgtgaagattctctgatgtcaaacttcatcttgatacatttttcaaggtttagatcaatttttccattcctgacatctatgactgctccagctgaagctaagaatggtctgcctaggatcaggggatccttgccttcttcataaacgtccaataccacaaaatctgtaggtatctcaacatttccaatcttgacaggcagatttactattagaccattaggatgtgcaacagaaccatcagctaagagtaaagctaggttgaagaacttgtattccatgatccctagccttttagctgtagagagaggcataaggctaacagatgctcccaaatcatagaggcacctattgaatgtcaatggtcctagagagcatggcagagtgaatgaaccaggatcatcaagcttttcttggatgactttcttcttgtatgtttcttgggtgttgactctactaatcatctcttgattctgatccttcttgagtttttcaattttgaaattttttccaaaatggtgagtattcagcaaaggtgtgtgctctatagtccagatgaattgttgggtggcaggtgcaacaatttgagttgaatccccccccccccttcttgaatcatactgtccgcagtattgggagtctgatgacttggtggagactcatcttcttggtggatggtgatagcaatagcagtagcatagtccttaggattttggactgcttttcctggaagttacggaggatgcttcagagtagaggttgatgcaaattgactctccacatacttgattttggaattgagaacttcgaacttgacatttagatcgttgtaagaacaatcgatcttgttgtgtaattcagctatcttcttgtcaaaaggcatagcgccagtagcttgtccttgaatgatttgttgaatgagttgcttaatttcaggatcttgagctggttggggcttgttgtggttgttgagtgaaccctggtggtggattctgctgttggtagcctccattaaactgttgtttagggacataaccttggttgtactgaacaaaaggcttggattgattttgttgaggtggatacacttgatgttgggggttagctacattagtgcttctgtaggagaggtttgggttgggcttgtagttgttgtatcccttgttgaaccctccttggttctggatgtagcacagctcttcagtttgatcattccccccctcttgcatttggaagtgctcttcatcagtgatgtagtgtatttgcttttgctgagccagcaacagcttgtctaacttttcattcagagccttgatatctttgctctgtttatcctcactgcctccagttcctctcactgagcgatcatattcttcattgtatcacccatcagattgtgctagattttcgactaactcctagccttctgatctttggtaaagctccttggtacagtgtgctcaataatgaagccttcttgaaaacctctcccaagcttcacagaaagtttcattatttttctgtgtgaagcctgagatctccttcctcaatctagctgtgcaagcattagagaagaacttggcaagaaaagctttcttacaatcatcccatgagttgatggagtctggggacagagtcttctcccagtggtgtgccttgtctcccaaagagaagggaaatagtctaagcttaaacatatctttagtgacaccattgatcttggtaaggccacatagcctatcaaagctgtcaagatggtccgggggattttccatgggcaaaccatgaaatttgtttccttggatcatggagatgagaccactcttgatttcaaagttgtttttctaaactggtggtggcactatcccttgtctttggtgatgattccttggggcatcaccaacaccaatgtatcttggttgatcaacattaggtgggtcttgaacgtcaaccggtctatactgttgatccatagcagctggtctgttatgatcacaagctgcctttgtcttggtttcttgtaactcaagagttattttgtcaattctgtctttgaatggtaataggtgtgcagaacctttggattgagtttgcatgcacaaagattagtacctgtaccacaaaaacaactagatcttaaaagtttctgatatgagttagtaatttgagaaatgtaaaagaactagatcttaaaagtttctgatatcttgaatgtaacaatgcaaaaaaaattggcaacggcgccaaattgataagcaggtttttcaggtctacttatggtgaatgtgtgtgagattcagttcaattcccctaaaacacaaacatgtcgatgcagttatagagggtgtcaatccagtccactggattgctagcaatcaagatgtgtacaaaaacaactaagtcaagccagattataaagatggtgggtttctagtaacaatcctaggtcaggattcaaacaagtaaaaataagaacttaaaagccctactcgatcattgggtcgagtagaactaacaggtgacaaaattaagaaacctaaatgcaatcaacaggggatacaaataacaggtaaataaaagtgcaatcatggggtgaatacaaataaatctaagaagaatagaagtcctaagaatggattcattgataagggcaactctagggttcatcaggtggctaagaggtgaaaggtagataccctagacgatagattcaagaaccgggtcaatccactctcgtgatagagacccccataactctaccacttcctaatctcaactctcattgatgaaacttagaagagcagggtttaagcaacaatctaccaaagccaataaacaaactagccaatctcttggtctataccttacaaatttctggaattcgtagatcaaacatccatttgaacgtcttttggacgctggacgtctatgatcgaatctccacattagccagcgaaaaccgcataggggccaagcgaatccagaagggatctaatctaatcttaaccacctgagtaacctagagattaccctaatctaattcatcctcaagaaccctaatcactcttcaagcaacataactaagaacacaaacccaaaaattactgaaattataccaaaatgtagatctaaacaagctaaacaactttacttaaacaactaaatgaaaaaacaaaatagattaagagtaattaagttttgaagattcaagaacacaaagaaaaactaagagataaaagctagatcctttggacaaaccccaaagtgatctatttatactaaaatgttgaaaaccctagattcactagaagacaagagacttgaggcggttcagacgattcctcgatcttggggatcgagtaaaaagggtgatgcaaagtctgcgcctttgcctccatgctccgagtgatcaattggtcgagtagatgcttcttcctctcctatccgtatgctcagatgtctggttgagtggggaatgaggaggatctgaagacgctttgatagatcaacaaatcttgtagagttggtcgcccttgatcgagttaaggggttgagtagaggatcgagtaagaggggcgagtagaccgatctgctgcttcctctgtggctgcgtggatctagtaaagggatcaagtgaattgttgcctcctctgtagctgtctagatcgagtaaactggtcgagtagattgctctgctgcttccctcttagttggatagagtagagggtcgagtagaatccttttaagcttattctgcacctgaaaacacaccaaaacatgcaatatgtatgcaagatgatcctaaatgcctaagtatgcaaaataagctaaatgtgatgcaaaatgatatgatacagtgagcaaatgcaaagctaaatgatgataaacatacacctaaaatgagtaaaatacagtgttatcagtatcactactcttcacttttcttcatcatttgcgatctctctacttcaccaccaaaaacgctctgaactctttcattgttgcaagttgttatccactaaaacagaacctcagaaaccactcaaccgcaaccctgtctctcctctgtcaatttcacttgatcgcaacctgagctctcaccgtcaattgccactcgatcgaaatagcctgataacaggaagtcacatctgtcatttcttttgtttgattctcactaatctactaagctttagttgtgtgtttcgaattaatttcatgttcaaggtgagtccaaacagttatgattcatcaatggatgccgacttcaatgctgatgaagctggatatggtcaactacactagagagccaagtagaagagtatcaacgcttcgtagaggaaacacagcgagctattgccaatgacaggtgataagtgtgtattttgcatgttttgagcatccatttgtcatcactttagcatcatatcatcactgttttataccatttctcatcatttgtcatcactttgcatgtttaggatagttttgcatgcatgttgcatatttgtgttgttttcaggtgattcggagctgttgacgagctaattggaagaagcggacctgatcatgccaaaccactcgaccccgaggtcgagtagacgcttcacgacctcaacacaccactcgaccacctggtcgagtagaggacttcaccacttcacctcatcactcgaccccctggccgagtaccaccacaagagtcactcgatcaattcactctaccgccaggtcgagtgtgttcacctccaccacctgaccatcactcgatcacaccactctacctggaagtcgagtatcaccatcaccaccactcgactacatactcgactgccagcttcagagtcttctccattccgcactcaaccagacactcgagcacaaggaagaaaagaagactccagcttatcactcgaccactcactcgaccacctgggtcgagtacagttcttaatccgtcccaatactgcgtcgttttgtgtattagggtttcagaatattttgctataagtagcatgtactttacattttcgagaagaagtttttatctagttttattccgcagacactgtgttctagatctttttgtaatccggatttctctttatctattcagtatttagtatgcagtatttgttcttgatttcgtttactgttgttcatcctgttatcatcttgctattacactgttgttatcatgttttcatcatgttcaacgtttatgttctctacaatgatgtctgagtagtgaataggtttctgaggatgggttagagtagtgtagaattctcagtatgctaggtggttgagtattgattgatagatcccttctggattagttgttctcaatgcctattgctttctgatcaactggaatttgagccctgacatttccgcgcccaaaaggtgttcgatgaaatgtctgaaccattaattccagagattcgtggccctgtaccaaggtattggttgaagggagcgttttggctttaacttgttgattcgtaatgcctgttaggttagctctcgtcagtggtgattgagtctgggactaggttaacttgagggtctctgttgcggtggcacttaaatttggttaatgaacttgttgttatttattgagcatgtcaatcacctgtaaaactgaggaaacgaaactactcaaataccccatcctcgggaattctttatctgattgattttattgtttactctactgttgtttattgcatcttgtcatctgttgcttagtttctacaattctttcctgttagtcgacctatcactcgaccccccagttgtctggcaacagactgtgtagtcgggtgtctttgtttcgtttactgcctgttactcgacctgtcagtcgaccacacccagtgctctcaacgagctgtgttggtcgagtgttttactgtttctacttgattttctgttttctgcatgttcacttaggactgctagaacacaccaaaacctgttattgcttggcttgacttagtgacttctgatcacatcttgattgttagcatcacacccatttggattgacaacctaaaatactacaacgacatgattggtgttttaggataattgactgaaaaacctattatcaatttggcgccgttgccaattgggtgtttgtttgttacatttgagatttcagacttgcttagatcaagttctttttccattttcttttcgattactaactgtgtgtttttcttgttgttttctttatccaggtacacctttgctgtatgcaaactcgatcaacaggcaattagaacctccttttcaacgacaacatcgaccgcatagctagcgaaatcaaagaaaggagaaacacagtcaaccttttacctcagcaaccactctaaatggctgacgaacagaatcaacaaaatggccctgccaacattagtattagagatgcaccacggaaccatcgtcaaaggaaaggaattgcacctcctcaatccagaacaacaacttcgagattaagagtggtctcatctcgatgattcaggggaccaaattccatggtctgcaaatggaggatccactcgaccaccttcatgaatttgataggctctgcaacctaacaaaaatcaatggtgtcagtgaagatgttttcaagctccgtttgtttccattctccttgggcgacaaagcacacatctgggagaagattctgccccatgactcaatcaccacctgggatgattgcaagaaggcttttctatcaaagttcttctccaacgccagaactgcaagactgagaaantgagatctccggctttttacaaaaggctggtgaaaggcttatgtgaaacatgnnagcgtttaaggggttataccaaccaatgccctcataatggctttactaaagcctatatgctcgacactc

SEQ ID NO: 35108 - DNA, 5006 bp, Arabidopsis thaliana landsberg
caaccaaaatattactgttcaaatggattgaaattaaataagatttgaacaaaaattagtgattttttttagttcacgatatttaccataattgataagagcatatagtcaatagtttgtgattgtatcacaatccaaattcaaactcatgtattgcatgttcttgaaaccaaaatagtttagtaactggggaaaaaatggtatgtcaaaagataaattttgtactaaatgaataattgatgggccggaaaaaatagggctgcgattaggcttaaagtatgatcacaaaatatagccaataacagctgaaaccgtatgatatcatattcacactatatagtacactacaatgttcaatcatatatacatgaattgcagaagattaatcgtttacgaaataaatggatataaacccaatagcgtgatctgctttaaaaagaaatgatcaaataatttgacgggaaactatatgcaaatagccaaataggttagggacaatattgatatgtgagagttgagacttatgagtagagctgacaaggatcttgacgtgcacgtgcctgtcgtgtgctacacagatttatgtgaaacggtaaaaaaaaaaaaaaaaagctttcttcgtttccttattcactgctcgctagccaacatttacctttttaattgaatgataaatttgtaaactcattgatgttcaaagtttttgccttacaaatattctttagtatagtatagttgattttattaatgaaatggttaggaatgttttgttgagaaataaaggaaatgtaaactacaagtgtctttctcaatgcataaaatctaaactacaagtatctttctcaaaacataaaacctaatcttttttttttgttttaagttgaaaaattaggaacagaaagaatgttcgtacgagtgataataattatagaaatggcagaggaggaggagggtaggaaggaaaagtcacattccaatatgtcctatccaacgtggcagtgaaataaacacgaaatatgttatttataacacacacaacaaaaaaaatcgttttgaaaaaagaaaaaaaaaacgaaagtgagaaaggcaaaagtgtgtcagcctttcgtccaatcttttgggttaaacttcctgcctctcccttccttcatttatttcattgcgtgcttcttttgattcttcctttctttcttttattctttttttttcttacattttaccttttaatgattgtttgataaatcaatttgatgtttactcataaaaaaatcagtgttcgtataatattgatgctaaattatagcagtaaatttgaattctttgtttttcttacttaaaagttgaaacatatgtatttttactttatctactagtagtagtagtagtcatattcatcgaaaacacgtattaaatttcataaaactttattttggtgactacaattttgtttaacagctgaaaatcttaaaaaaaatattactaaactagatttggagcaaaatcccaaaaagaaaaatttataaagcatctatggactatggtacatgttatttttgttagagttaaagttctatatgtggtacttgttacgttaaaggttaaacaacaactatattgattcacgtggatgattgatgctaatgttaagtcaaattataaatatcataatcgaaaggacttgtcaaagtaaagtgcttaatttttaatgcaaacgaatacgtatgggatcgctatgtgttatccaggctaaaaggcacatccatctcctttgtccttattgacgactactcttctaccggctcctaattataattcatttaatgtagactctcttttctttttattacttatatatgtgtagtctttttattaagttgatttgatttgaatccaacttcagacgatttctcatctcttttaaaataatctctctgccaattcaatccacacaaacaaattaagaatggatcttgtgttataaatcgagttttaaaatgatactattttgccggttgtaaacgacaaaaaagaaaattataaatcctttatagcaagggcactgcaaatttcactaaatatctagctttcgatcgcactagcgttaaacaaaaattgttttggtatttggattcgaatttgagtatagctataaacaaaatttatcaatggataattcaggaacacttttactacttattgaacaactcaccaaacggttacattaaccaaaaacaaagatccaccaaacggtttaagtcttgaaatttgaaagcatctttctcgttgatggaagtatgtatgaaagattttatattaaaaaggtatgtaaatgcatttatcatgcgataagatgcttcgtatttatagtccaagaagagacgagaaactgagcaataaaggctccaatccaattatagatgctctctaattgtaggcactcccatacatacatacatatagtgatagagagaatcctttcacttgaagggtcaaggagagatctttttgcagcattaccattttggtaaattcaataagtgaaaaagtgtaataattagcaatttggggcttagcttttcgattttgcaagcaaagctacttctcttttctttttgtacatcccgagattttgatcagattccttcatctattatactacttgtctattttttttacttagtaagcaaaaactcattctttaagtttctctttaatctcgtaaattggcatcctcggcatcagaatctcaacgagaattcccattttacgcatctaatattggaacctataagcataattcctgcaaatgccataatcaattagcaaagtgggccatctccacgatccaccgcacaaatatatttatatataatatcctgtcgacgaagacgtgtgaatgcagaaatatagattatacgactgatgtagaactgttttaatgtatatttttgtagtgaatttttatttaattagtatcatttgcacgtcgatgggtaaatgaaagattccttggctgctaagatatcaattcacgaggatttaccgactttaaaccaaaatagcattagtttttagagtgtaacgttacaacataaatacataataatgataaattattaaactacataattaagccttaatttgttagaatataatgtaatgattcacttttctaaaatcatttcaaatatttagaaaaattagatagattatgaaaaaaaaagaatttgacagtaaaagttattaagctacgtgggattatagtaaacttttcttttaaaaataattaaccctaaaccagcttgaggattctcatggacccttcaattgcttggtcggtccaacttcatctctatccataaaactatgttatatatatatgtgtgtacacatgctatagctagtgtggattatctataatattataataatacaagcaatataccttcaggtaaaggaaaataatatttattattgccattgaaaaagactcatttgatcgagagagaaaaagaatcatttgaaccaaaagcatctttttctatcttttcaaatgcttacttccttcaaatcctctagctcctcctccgaagatgccaccgctaccaccaccgagaatcctcctcctttgtgcatcgcctcctcctcggccgcaacctgcgcctcacatcacctccgtcgtcttcttttcaccgctgcgaatttcgtctcccagtcaaacttcaccgccgctcaaaacttactctcaatcctctcccttaactcttctcctcacggcgactccaccgagcgacttgtacacctcttcactaaagccttgtccgtacgaatcaaccgtcagcaacaagatcagacggctgaaacggttgccacgtggacgacgaacgaaatgacgatgagtaactccacggtgttcacgagcagtgtatgcaaagaacagttcttgtttcgaaccaagaacaacaattctgacttcgagtcttgttactatctttggctaaaccaactaacgccgtttattcggttcggtcatttaacggcgaaccaagctatcctcgacgcgacggagacaaacgataacggagctctacatatacttgatttagatatatcacaaggacttcaatggcctccattgatgcaagccctagcagagaggtcatcaaaccctagcagtccacctccatctctccgcataaccggatgcggtcgagatgtaaccggattaaaccgaactggagaccggttaacccggttcgctgactctttaggtctccaattccagtttcacacgctagtgatcgtagaagaagatctcgccggacttttgctacagatccgattgttagctctctcagccgtacaaggagagaccattgccgtcaattgtgttcacttcctccacaaaatatttaacgacgatggagatatgatcggtcacttcttgtcagcgatcaagagcttaaactctagaatcgttacaatggcagagagagaagctaatcatggagatcactcgttcttgaatagattctctgaggcagtggatcattacatggcgatctttgattcgttggaagcgacgttgccgccaaatagccgagagagactaaccctagagcaacggtggttcggtaaggagattttggatgttgtggcggcggaagagacggagagaaagcaaagacatcggaggtttgagatttgggaagagatgatgaagaggtttggtttcgttaacgttcctattggaagctttgctttgtctcaagctaagcttcttcttagacttcattatccttcagaaggttataatcttcagttccttaacaattctttgtttcttggctggcaaaatcgtcccctcttctccgtttcgtcgtggaaatgatccaaagagaaggacaaaaaaacctatatatctaggtatatagtagacaaaaaaaaagatcgataatttttggtgttagggcaaaaaatgattaagcagatgatggaagaagacg

SEQ ID NO: 35109 - DNA, 1223 bp, Arabidopsis thaliana landsberg
  unsure (1)..(1223): unsure at all n locations
gctccagatataccaaaccgaaatagtttttccttccagttaggctaattcgattctgattcagtttgttaggtatcaagcggcaagaggaagtatgaaattcagtaactggtttggttcagcattgccaaaccgaaattaccaaaattttattctaaatataaccgaattcacagaaatataccgcgaaacataaacattaacagtaacaccatcaacaaactccataaccaaacttagaactaggcttataaaatcaaaccgaaatagctgaaccaaaccagttaggctaattcggttcggattcggttttaggtgaagccaagcggcaagaggaagcatgaaaactggttcgggactgctaaacccaaatttatcctaaatttaaccagaatcaccgaaacgtaccaaatcttaaccaaaatgttgaaaaatgtcaatttttcaataacgaaccaaaccaaattaggttttcggttccatttcagcaccaatttccaaaccggaccggaccaattaacctaaacgctcataactatccaaaactcaggtccgaaacttaaccaaattcagtgattataccttcatacagaggaacacttggttctgtctctgaaattcagcacgaacagaaaccagatcggatttaaggagacgagagacatgagaaccaatgaatcgatcaagtcggactaattgggtttggagacgcttgagctctttggctgcgattaaaccttctttgctcatttctttcttccgtctccatatcgataagctagggcttgaagcaggtcctgattggtacgtacgagtcgaatcaacactaatttctttgttttttgaaccaaattggcgaagaatattaagaacgaagctttgttgagtcaaattgtagtgtcttcgaaggtacacatatttctttaatgtttgcacttataataaagtgggttaaattctgtttataagttgtagaaggaagcaacggaaaatctataaatataaaatattgatattggagatgattaagtgggctacatgtgaacaacattcaggtgattggagctgaagatatcaggattgttaaatcgaaattaatattgagaatgttctatatctntatgtttctttntggctataaatttatgtttcattctntgtgaaatatttatatatatatatatatgttgcacgttgtcaaagagaatagtgatgtttttttt

SEQ ID NO: 35110 - DNA, 3946 bp, Arabidopsis thaliana landsberg
gtttgactgtgtgggtttgaacctgttaggattcagtatgatatcaagtatgtgtcttttggaatacaaggatttaccctaatggctatctttgttatctgtgtgaccttttctactttctcgctttgtaagatcgtctgagaatcattggagggcatttgaatgttgcagctgaagcaaaagctcccaagagaagtaggccaccgatcacgactcatgtcttagacgtctcacgtggtgctccagctgcaggtgttgaagtgcacttagaagtgtggagtggtactaccggtccttcctttgttcatggaggtggtggggtctggtccagtgtgggcacatcagctactgatagagatgggcgcagtgggccactgatggatttggttgacgctttgaatccagggacatataggattagcttcgacactgcaaagtattccccaggctgcttctttccctatgtttccattgtatttcaggttacagaatcacagaaatgggagcatttccatgtcccactgttgcttgcacctttttctttctccacataccgtgggagctagagctatgctactgctgtctgcggcaccaactttccaatacattttgttttggttgtaccactacgggaacatgtatcaaaattgctatgaaatgaagtctttattcgacatgtataaaaattgctatgaaataatgtctattcgagtatttatttggatttgtagttctgtagaacaaacaatgaattagcgaaaatacgagctttgatctagactcattgtgagtaggacaacgatagtatagattaccatgttaaacatcttgggagattctatacctttgtacaaaatggtcgatcacaaaacaagcctctaaaactgttgtgtgttttaatctagactcatagccagcaggacaataatagtctagattaagacatcttggtcgattccaaacctttgcgcaaaatgtcaaaacaaaacagcttctactggtatactttacacacctctacctacccttcctgagcgtgtctaaagctccctggctatatctaccctcatctccaaaagttcgcaaattctttcgcaaatgacattatgttgctccacgaacttgacctttctttcacctcaccagtttccgtctctttcacctcaccggctcctgtctctgaaatttgtctgtaaaaacaaaagatataagaattcaaactgaagtggtgccaatatgatcaacttgaatgactttttctattactcaaaaacaagagatccatcaatgaagtaaattatcctaatataaggatcggaccagtaaagaagagacctagttgtatgcatttgatacctggtctcagtaggcacaacatctgctgaaacatcagctccttcaagatggtctgcttttgactcttgattgcctaagtgcgtcaagttcctctcttcatcagtctccgagttttctattccctgagttgcctctgtttctcttttgtcatctgttgcagtaatgacaaggttgttgccctggaaattactttcatcatcagaattagagtgagaagtatctattatatccggcctctgctcacttcctatctcaatatccacactgccagcctgtgaaacagaaacaaggataactaagccaattgataactgaagcctaaggaaattaaactgatcacaccaaagcaagattttttctttacttgaaactcaggttcaacaaccacaggagagaagtgtgaggaagcatcatctggtacagagggagagacttctgagagggttttagcttctacgattggcacaggtgctggagagaagtgtgaggaagtatcagctggtacagaaggagagactactgagagggcttctgcttctacgattggcacaggtgctggagagaagtgcgaggaagtatcagctggtacggaaggagagacttcggagagggctttagcttctgcgattggcacaggtgctggagaggagtgtgaggaagcatcacctgttacacaagaagagacttctgagagggctttagctacgattggcacatgtgcttttggtttgagtttcagctcttgaaagatgtccctgacaatgtaataagagcctcccacttgcttgtgagtagcatccaatgaagggaatctaccagcattagttgctctgtatctgcaaacaaacagtacctatgttcaggaccttgagattcatacagctgcacatattgctatctagttgacatgtgaacctctacagaatatgggaaaactaatcgatggagaaagaattactcgttgacaaaggactccaccaaagctcgccgatcatcttttgagagtcttttgggaattttagatgttgttaaagattcgcaaacagcaggagagccatagaaccttgcaagccgtttaacatcagttttgaaaacagcatttctgcgagtagcagacactgcaaaatgacatcaaggttggaaaaaaaaacattcagcaaacaagtttcagacattgaaaggaaacatgagtaaaaagggtttagctttgttacaggtaaattgtttcagctgcttcagaatcatcactgcactcgagagtatgctacttctacgtcactgcgaacaactccacccaacaattccataactagctaaacatcacaataaacatcgatttggattccaagtaaaaccttagaaaacccccagagaaaaagcgataaatatcagaaatttacagaaaataaccagtcgctactctctgttggtcggaaaatagagaattggagtttgagagagacgcgaaaaacacggcgccgaccggagagcgattaagaaggaagaacaacaagtagggttctaaaacacggcgccgaccggagtttgttctcccaaattcttttaccaaataatttcgtaaataattttccctactattaatttaatagctatgctttctaaaagggacttgttcgccaagacaaatgtataattagttattacagtcttgtcccgaattaattgtttaaatttcaaatcaggttacatcttcaaacaaagtattttcctccacaatcttagccatacttccatttacatgtacccaaatttctgctattttcttgattttcccatctaaaatctccaccaatgtgaaagctcttgttgtgccaccactctcagactctgctgctcctcttttctttgcctctttaacccttggaactattgcaccgttcacatacacagtctggttgtcactatcttgcactaccattttccgatttcctttcccccgttgcagctccttatgcatgtgcccaaacacaactaaaggaatcgacaacttagtcgtctccttcaactgtcgtatcgcctgctctagatctgaaacattacaatgagatttcaccaaactaactacaatcagcattttggagtctaaaacatgggaaatgctactgatgccgaattgaaaagatggtaaattatttcacctggatcaccatggtcaccgccttcagccccccagtcttttccacatatatcctctgcttgccaaccaagacctgcaaagaaaaccgctacttaatatttatatgttaaacctgattggcgtaagactagaccaataagaaaggtttaaaggttgatgcacctgttggcccattgtgagcgagaattatagccacgtgatcttccggtgttccatgtgcagctcgacaaatactcccagcactggcttccatatcatgaactccatacctagaaaaatataaaagtgtcaatgactggtagttttctctgacttgaaaccagaatgtttaaaattgctacccgtaatcacttgacttgtacgttcacagagatcaccccacaaacacaaaataagtatagaaagggatgcagattcactaaactgtcaatt

SEQ ID NO: 35111 - DNA, 3951 bp, Arabidopsis thaliana landsberg
agcttaacctaatctagagactatataagagagtctaatgtaatcacaacattaagagagaaataagatggaaaatatttcagtctccttcacatactatctctaaagcttactactttcatggtatcagagccatggattcatcaatccaactctattctcattcggttctacatatctcaaactgtgttacagtccaactaaatgaaagaaattaccttctttggaagatacagtttgaatcctttctctctggccaaagtctcctggggtttgtcaatggtgctattaaacctcctccagtcgccaacactctgactcacattgatggtctcaccacagaggttccgaatccagactatcaagcatggctgaggtcggatcaagtggtgcgagcttggcttctaggctctctgtctgaagatattctgcgagaggttgtccacaccaccacggctcaagatgtttggactactctagctctgcactttaacaaggtatcttcgtctcgtctctttgagctgcaaagaaaactgcaagttatagagaagttagataaatcgatggatgattatcttaagcagattaaaagaatctgtgaacaacttactgctattggtagtcctgttagtgagaaaatgaagatttttgctgcattacatggtcttggcagagactatgagccaataaaaacttcaatcgaagggtctatggatcttgaacctcagcctacctttgaatctattatccctcggttaactggttttgcggataggcttgctagctacaacacaggcatggaagtttcaccacatatggccttttatgcaaactattcaggcaaaggaagaggaagcttcaatgggaaacctggtggtaatcaaggcaaaggagggcaatactcaaccaaaggcagaggcttcctccagcaaatcacttcacgctcaagttctccgggttcctacaacacagaaaacagaatcatgtgtcaaatttgtggaaaaccaggtcatccaactttgaagtgttggcatcgttttaataacagctatcagtatgaggaactccctgctgccttgactgcaatgagaattactgatgtgactgaccacaatggaaatgaatgggtaggagacagcggtgcaacagctcacattacaagctctcatcaaaacctgtaacagtcacaaccatatggaggatcagatgcagtcatggtgggaaatagagattttctgcctatcactcacactggatcaactaccctaccaggaagctcaggtatattacctcttaaagatgttttggtttgtcctaacattggaaaatctctattgtctgtttcgaaacttaccagggattatccatgctccattaattttgactgtgattatgtctgtgtgactgataaggcaacaaagaggcttctggctcagggaaacaacagtaatggcttgtatgttctgaaggattcaccagttcatgccttttattcctctcgtcaacaaactgcgtctgaagatatctggcatatgagactaggacatccaaatcaagaagtccttcagtatctgcaaaagaacaaagctgttaatatcaacaaaagctccaaaggcatctgtgaagcatgtcagtttggtaaaagctcaaggttacctttctcaagctcttgttctactacttcaaggcctatccagaagatacactgtgatctatggggacctgcaccagtgaagtcagtacaaggcttcagtttttatgttatctttgtagacaactactctagattctgttggttttaccctctaaagaataaattagattttctaccaatattccataagttccaagctatggttgaaaatcaatatcaaaccaagattggatctttccagtgtgatggagggggagagttcacaagcagaaagctaactgatcacctacaacaatgcgggatcagacagcttatctcttgtccctacacttcacaacagaatgggttagctgaaagaaaacatagacacattattgaacttggtctctccatgatgtttcagagtacctgtcctcagaagttttcggtagaagccttctacactgcgagtttcttaatcaatctccttcctacaacaactctagatgagaagtacagtccttatgagaagctgcatggtaagcctccagaatactcagcactcagagtctttggttgtgcctgctatcccaccttgagagattatgcgtctaacaagtttgatcctagatcactcaagtgtgtgtttctaggttataatgataaatacaaggggtacaggtgcttcttaccttcaactggaagggtttacatcagtcgccatgtcatctttgatgaaactgtcttcccttttgctcagtctcattcaagaccaaattcaggaagtcttactcctttgatgctagcctggacaaagggaatcaacacagtaagtaaacctcaacctaaatcagatgacagtttattcacaagtgaagattttcctccactacctacaagagaaacacctatactaccaataccaataccaagaccgactgtagtacctgctgtggaagaggaaagaagttctgggtgtacgacgagcttagatcatgttcctataggcaacaacttctcttcttcttctcacagtcctggtattgcagaagaaacgtcatatcagtctacagaaagaatatcagatcagttatcaacaacaacaactcagaatgaaagtcaagaagaaatgttacctagtcaagaacctgtgcaagagcctgttgtaactcagtctactcaccctatgaccacaagacaaaagagtgggatcagaaagccaaacccaagatatgctttactgactcacaaagtgtcttaccctgaacctaagacagttgctgcagctctaaaagacccaggatggacaggtgccatgggagaagaaatgggaaattgcaaagaagctgaaacttggtctctggttccttatacaccagacatgcatgatttaggcagcaaatggattttcaggaccaaactaaatgcagatggatccctgcaaaagctgaaagcaaggttagtaacacaaggttataatcaagctgaagggatagattacttagaaacttacagtccagtcgtcagaacagctactgtgagaggagttctacatcttgcaatgattatggagtgggatatcaagcagatggacgcgcaaaatgcatttctccatggcgacttaacagaaacagtctatatggctcaacctgcaagttttgtcgctccagacaaaccaaaccatgtctgccatcaccataaatcctagaccgggttgaaacagccacctagagcatggtttgacaagtgcagtacacacctcttggaacttgggctccactgcagcatttcagatccatcactattcgtctacagcagaggaaaagacatcattcttcttctcctgtatgtcgatgatatgctgattactggaaacagctcagaaacacttgcctctctccttgccgaactcaacaaaagattcaagatgaaagatctgggtcagatgcattatttcttgggaattcaagctcaatttcattctgaaggtctattcctatctcagcaaaagtatgcagaggacttacccattgcagcatcgatgagtgactgtgccccaatgccgactcctctgcctctttagctaaacaaacaaaggaaacagaatcaggataccttttaaaacccaacatatttccgcagccttgctggtaagctccaatatttgactcttaccagacctgatattcagtttgcagtgaactatgtttgccaaaagatgcatgctcctactactctggatttcttgttgctgaaaaggattttaagatatgttaagggtacagttactatgggaataaacttcaggaagaagtcag

SEQ ID NO: 35112 - DNA, 2479 bp, Arabidopsis thaliana landsberg
gttgcgaactttcgccttaatatttcaaaatcttgaaaattctcgtgattcttaattcacgggtaaatgtgttttgcctgttgcgttttttttgccgtcacggaatcaaatttagtgactttagcttttgtgtgtatgtgtgtgtgtggttgtaggaaggaagaagagttcacgttatagaaagagacttaacggagcctgatcgaattgtcggtgaattacttcagcctggtggttacttgaagttaatcgaactcgggcttgaaggttagaccaaatcaactaataaagataataacttttgttggattagtaaatctgacttgtgtgtattgatttggttactacttggttattgtagattgtgtgaaggatatagatgcgcagagagttcttggttatgctctctttaaagatgggaaacacactaaactctcttacccgttggatcagtttgattccgatgttgcgggtcgtagctttcacaatgggagatttgtgcagaggatgcgagagagagcttctttacttcccaagtaaacatttcgttttccttatgagttttgaaagcatacatcttttagtttcttattgatatagaatgtgatttgagttttcgatattcagtgttcgaatggagcaaggaacagtgacatcgttggtggaagaaaacggaataatcaaaggtgttcaatacaaaaccaaagatggccaagagcttaagtcatttgctcctctcactattgtatgtgatggttgtttctccaacttgcgtcgatctctctgcaaacctaaggtgtgtaacatggttattaggattagattttgtcatttgctctgtttctttgggacttaaattgatcaataacactctccgatcaggtgcaggcgccatccaatttcgttggtctggtattggagaattgcgaactcccgtttccgaaccacgggcacgttgttcttggcgatccgtcacccattttattctatcctatcagcagctcggaagtccgttgcttggtagatgtaccaggttcaaaacttccttcagttgcaagtggtgaaatggctcaccatctcaaaacaatggttgcaccgcaggtaccacctcagatccgtgatgctttcatttctgcagtcgaaaaaggtaacataagtacaatgccgaacagaagcatgccagctgatccaattcatacacctggagctttgcttttaggtgatgcgttcaacatgcgccatcctcttactggaggtggtatgaccgttgcattgtctgatatagtcatcctccgtgatctattgaacccgctcgtcgacttaaccaacaaagagtccttatccaaatacatagaatcattaaacacattgcggaaaccggttgcttcgactatcaatacactcgcaggcgctctttacaaagtctttttagcatctccagacgatgcaagaagcgaaatgcgtcgagcttgcttcgattatcttagcctcgaaggggtttgctcatcaggacctgtggctttgctatctggtttgaacccacgacctatgagccttgttcttcatttcttcgcagttgcgattttcggggttggtcgtttgcttgtacctctcccgtccgttaaacggttatggcttggagctagactaatctcggtacgtcgtcatcttttgttagaactaataaaatactttaaaatttgagaaaatattgaatcgttgtttgctacttgtgttgatgaaacagagtgcttcaagcatcatctttccaataatcaaactatagggagatcgacaaatgttcttccctcctacaatccatgccatataccgtgctcctccttaatgatgcatcaagagttacatacattaaatgatctatgcaggcaaatgttgtaacttttaatctaatatcttagttgcttgatgctaatcatgtgggtgtttaggctagatagcttaggaaccagtgtaaacatagctccttaagtatatatgattgtgagcaaagagtcttgtaagtgcatcaatgggaagctgtatattttgtatatcctaacatctttttggaccttgtagaattagttccggtgttgttaactgtctttcagcatggtgatcagtctcatcatatatatgtcctgcgatattagtcacataactgtggaaaaacccgataaaattttcattctacttctacaatatattaatctctcactttcgaacaccatcgtaacctctcttacatatccgtatgttccacaaatttctccttaaacattttcacagtcatatacacaagatttttaatattataaaggtaaatttagattcatgtcggcaagactttgatttgatatattatttttaaaattttaagaacttgacaggtaatgaaaacgattatttaacggattacttttaactttgcagaattgacctgctttttttaaaataaatgtaaagttacgatttcctg

SEQ ID NO: 35113 - DNA, 1482 bp, Arabidopsis thaliana landsberg
aacaacaaagacaggcaacaaacccagaaacgaacacgactatgaatacagaggggggcggaaatagagctagggacggcgactaaaaccttctatatattgcgtcgtctagaattcttagatcgaatctgatctagacaaaatttaggctatgatagggagatatataagtctcaaaccttcagaaaaaaaaaagttgtgcattcatgaaagtacatatacaaaagttggtcgacggagtacgcctgtacggatcaaaggttgcccagctgcaactcatgcttgtattcattctttcactatatacatatgcgtactagttagccttagcttttttacttaagtttccccaacttcgtacgaaatagaagcacacatgtgcaataagatttgccaaatcaaccttctaggcttctagccaatagttgactgccacatcactaattctgcagattcgtggatattataaaatttgtagatctcaatattccggcaaatagtccaacaccgtaccgtaccatcccgattcatgattttcatcttcttaaataattgtagtttcatacactggatatttcttgctctggtttaattaagacgaactttggtttgacagttacaatgttgaagaaaaagtgcttctatattttccatctaattatttgaatgaatgcagatccactaatcggtttgactttaatagttacataaaacaccaaaaaatatttatgtatatcacatttcttttttttgttctcttgcaaaacttgtcgttgctgttttgctcaacaaaaaaagacttcttgttgttgtaatttattctttcctctaatggacaacctgcatatacgactaaataaaccgctatactaacgtcgttgtactagtttttctctgttttaccaaaatttacaatgtaagtaaatatgaaataggtaagacaaattccttttaatttgtttgacaatgatttcttattatatacaattagaatttgtcctagtactagtggattctccactcaaatgtagtgacatctacgttataaaattagaattttcggtgtcaaagagctttaaggttaggttatttaagggcaaaaaaactcaaaccaatttgtgagtttatagtttgacctaagaccgaaatatatacatacatacgtgatatatccctgttattaattagatgcaactaataaacatctaatcaatacaacccaacgaaaatgtcggcagctttacaatattaacaagaagttaaaagagtacataaccaattcgcaactttgataaaaataattaaaaaaattaaacaaattatataaaacgtaaacaccaaaaagtgtacgccaaaaacaaggtgcatgtcgactgtacctgtgcaaaattcaaattaaaattaaaaaaatcaaaattttcttaatggatctttctgtatctaattgtttaaaaacttaaatttcaagtgatcttgcaacta

SEQ ID NO: 35114 - DNA, 1044 bp, Arabidopsis thaliana landsberg
acgtggaacgatgctgcaacggaattcaaaccctcacccggagaagaagcttgttgttgtgttctgattcttggaagattcggtgtttcaggggtaccaggagattcttgatccacttgaccaaatgttgttatggctacggattcacctgcgtttctaatcatcaaagattctaaaggacctctctgtttattcatactcgagctaagtcttcccggtgatcctccgtaaaatgatcttgaaggcgatgattgaacgcttgaatcatccttgcttttgccccatttcttaagtttctgaatcaatcctggcttcttgctaaaactactaaacctacttgtggaactatccattgaagcattatcgaaatcatcgcttcccggagatgaaggttgagaatagttgctttctaagtcggtatctccttggccacgctctgaaccagcatactctaacattaaccgttttgcttttgcttgggacttggggcttaggttcttgcttaagtcacgagctgagattttaccagctggtgtctggtagtttcttaactcataccgtaaacatgcattgacctttcgtacataaaccaattcctcaacttcactaaacctattcatttgaagcccttccacttgctttaacaaatcctcattgttatgcttcaaattgttaacctcttctctaactttcgccactttatcgctctacgaaaaaagacagaacattacaatccaagaaaggaagaataaactgattatgaaggaatcattacacttacctcagtcatgtttgaaagagttgcaattcttgcttccgctgaatcgagtttaatggataactctctcttctcatgttgaagctctctattttttctcttgagttccataacttgcacttccaaatcctgtacagctttaagcttcctctcaacttcagtatctttattcatagcttcttcttctttcatttgaagacttgatacatgctgcttaagcaacagtaactgtcctttcgtctggttagcatcgagttggatttgtc

SEQ ID NO: 35115 - DNA, 1653 bp, Arabidopsis thaliana landsberg
cttttactatcaaacaacaaggtaacatttggtttctatgcagatcataaatgtgtacaatcaaaagtatgagagtgcgggtgcattctggccagacgttcatggacgtataatatcggcattgatcatctcacaaatccttttgttgggattaatgagcacgaaaggaaaagttcagtccacacctttcctcctcgttctagcgattctcaccttcggttttcatcggttttgcaaaggccggtacgaatcggcattcgtcattaacccgttgcaggttagctcaaaccaagatcgagcattttcggttaatggatggtagttttagctacatttgttttggttcagtttgtgttatttaatcttgtgagtaccggtttacaggaagctatgattaaggatacattggaacgagcaagagaaccaaacttgaatcttaaagggtttcttcagaatgcatatgttcatcctgtttttaaagacaacgactatgaagatagccggtttgatgaaatatccggttattgcatcgaagattcggatgaagagtgtgttactgtaccgaccaaacgtcagtcccggataaatacgcctgctgttagccatgcaagccacggttcttcgcgttcaccaccctcaaagtaagacacattgattcacttaaaccgggtgtggatatatacggtatagaaagaaacgatatcaattgggaattttagttatttagtcagattttgtatattatgagaatatttttggttctgacttttgagttgttttcagtatattaaaaaattctttactgaagtcccatcgaaatttatgtaacaattgtcgaggaaaaacaagccaatgctaaagaatctatctccttattgctcacaccatagaaaaagaaaaaccaaacatctgtcgataaacagcattggaattggtttccttctatttttagtagattaacttccatttaaaaaaaaaccaagacacttcagtctcttttgattagtcaacactttattgtagatattttcttcataaaaaaactttctccttaaatgctaacaatttaaaaaaaatctgaccaccataatagtaaatgcaaaaaaagaagattaaatactcataaatgtagaatggtaagtcgtatttgctttttatatcaaaattaagatacattgcacacagtttgaatgtttatatctctacatacatattaagaaaaaaatattttctttgtgatgggaaagaaaaagaaaataataacatttcttctatagccaatcaaaataacatatttgttgaccaaaaatttgaaatagaaaatacatatctttatttccaactgtactaacatatctgtacattatttacagaatcagaaattcatagattttaacgtccaagtctgtgatatatatcaaactaaaaatcttaagtaggaataaaatctgcatatatatcgtgtattccgatgattaattgaattgaattgctttctccgataagaaatgaaaaagcttcggtggatgtgactgagagcgaatcggtgcttcggttctaaaatcgtcacgcgcgactgaagagtgcgtggttcccctcatatccaaaacgtacggtactacgaaacagtcgctagcagcttactttagaagc

SEQ ID NO: 35116 - DNA, 2303 bp, Arabidopsis thaliana landsberg
atatgacacatgcaatcgactggggctcgctcttaacttctctgcttactactatgaaatcactcaacaaattagatctgagcgggctagtcactgccagataaaggaagggcagcttacttgattcattaagagctatgacggtctaagcacaaagatacttatgagtatattggcaattgaatcggatagcaaggaatcactactttacagttcgggatctcgtatgaggtcgctacattatagatatacaaacatacacatgacatatattgatacacaactacgaagcgctaaccaccatatgtcctacttctgtaaggatcatactatatttgatcctgaactataagcctaaactctaaaccctaaatcccacaacctaggatcacacccctaaaccctaacccctaaaccctaaaccctaaaccatagacccgaaactttaaaacctaaatcctactttaggcttctggaatcgcggttgcggttttagttcttatgctgaatgatacacaaagcatctagtcatatttgactactaattttggattaaaattttgattcaaagacacatcatatgcatcgattccagtagaccataactcttttagctcctcaataagaggttggaggaagacatcgagactacctcgcgggtgatttggcccagaattcagaaatgtaagaaacaagtactatgtattcatgcacatacccggtggtaaattatatggagtcaggatgacatgccacaaagaatgatttcgcgacatgccaaatggattaaatccatcagtacataatccgagataaacgttatggggttcttcggcaaacatgggatgtagctcttggaaatatctccactccgtcgcatatgaaggatgattcatttcttcttcttttgtttggtgctcggcatgctaacgcattgcagctgctgtcttgtggctctgatacattctcttcaatcggtcaccaataggtagataccacatacgactatatggcactttggttcttcgacggtagtcatccataggcttccatctttgagcactacaaaaccgacattgatcttccttttcgtcttctttctagaaaagcatacaattgttaatacaaacatcgattgtataataaggaaggcctaaattgcgcatcaatttttttgtcttgtaatgcgaatcagtagcttggtttacttctggtaaaaaatctgtcaacatttgacataccgaatccacacacttttcactcatattatgatccgtcttgttctgcatgactcaagctgctaacgataactgtgattggccttcacgacaaccatcgtacaatggattttgagaaccttctaacaagtcgtagagtttcttagaatggttacgtacctgatcctccacattctgataagtaccgtcttgatgatagttatcatcaaaccccacgttataacgagatgcatcgttcatcatatccacatatggatcttctacaacattacccacacttttataattctctcttagatacgtactatcaacataattactcgtttctacattcatgttgaaatcttctccatgcttatgccaaacataataatcagacctcaatcctccactaaacaaatgactactaactttaaaacctataacgatatgttttttattcttgcacacagcacaaggacagtggaatttacctcgacaactttgtactataggctggctattagcaaatatcaagaactcctccactcctgcgacgtattctactgacaaattccccgtcatttcatcgaacctcttgtacattcaatctcgattaaaaacaccgctactcggataattatagtttcccaccattataagaccaataataaaactaaatatattttttaacgttttttttcttaaaaacgtttattttttttaaaggtattatttgtattgtgtttgtgttgtgaataaatattgtgtacgagaaattttcattatataggcaattttagagtgactaaaacacgactaaatagtgtagtcgtttaaaacaggtacaacaacttacaaaacgaattacatgtatttttttaatcaaaaattacgtctattttgtgactatatttaatgacaccccggtgtagtcattcaatagtcgctatttaaacgactattacgaggtgtcgtatattagtcggcaaattacgtctattttgcgactatatttaatgacacgtcgtagttgtcatagaatagtcgctgtttaacgactattatcacgtgtcgtatattaat

SEQ ID NO: 35117 - DNA, 2984 bp, Arabidopsis thaliana landsberg
  unsure (1)..(2984): unsure at all n locations
gattggtttctgcttagtgaaagctgaagctaaggtgtgcatcttggtatcatcaatcacttgaacataaagatgcttgtttgatcggaaaacacatagccttggcctctccgttgtaccattaacctatgtgtgcatcgagtaacggtaatgagacagaactcaaggtaacaaatagagacacatcaaacatgccacaatagcaccaacatcaagaaaaactgatgaatcacatttctaatttcattgtcaaattacaatcaactttgaataaatgcaaaacccaaacataagcttaaaattgaatagaagtggttacgaattacgatttcaattatcgttacaatgtgttcttcgaactctaatgaaacacccaaatttcatcgcaattctacattaaacactatcttcaagagaatattagagacattggagatgaaattaaaagcgagaagaaagagaacaccttcttacggatacgagagtggcgggcgattctgtcttcgctgctggttttggttttggcttcaacaaccatggaccgagactgaagcgaagaagacgaccatggtttcagaaaaacggcacggtgttgaagtccgtttcccaagaacgcactgcggttagttatcagactcactgaaccacacccactcacgctcgtcattctctcttactcactctctctggctcgctctctgtcgtaaaagcaaatccttttgccttatcctttttcttcttgcagcttcctctgaatatatttgctttatttctcttttggaccctaaactttcctaacttcttttaattcactganctattgttctgtaaataaactcttaatccttatgttagtgtgtatatctattattaactaagtagccaatctcttcttcttttttttttagagatttcacttttatctttcatagcaatatagcatacaaactcatctacaaaacaaatactagaaaaaaaaactaatttgtccaaccaaaaatttgggattgttttatgttatggccgtaatttatccttaaaacctcatgttcagaaaaatctttaaaaaagaaaaaaaaaaaagaaaaaaaaaatgatgttaaattggtaaaaattgaagttattttttttttgaatatgatgttaaattatactcaaaagaaaaagttactgggtattacaagtgaatgtaaaaacttttcaaaattatctacaaaaaatttggaatttctagacttgatttcttcttgttgcaaaccaaaggactatgccttcttcatactttgaattgcctcccttttgaagtgtgctgagccggtttcggatgttcttatcgatcatcttgactagtgttgcagttggtaatggttgctcccatgcctcctgttgtttctttcccgccacaatgagtgaatggtgttttgaaacacgtaccgaatgatgaatgtctatgtttggtctctgtttcgttccatgattagctttagaatctctttccaagctgccgtgaacttgtctagaagcagccctcttgtgagctcatcccatatctgaaacgtgtatgggcataaaaagaaaaagtggtctctcgtctcctccggatctgacaaaagacacaagtagtatcttaactctcgtccttggcattacattattaataacatcttaacatgtagtctttttctcttcttttaatctcttgtttgtatactcaaaaattcttatacaaatgaaatctatcttgaagccttattgaaaaaagaataaccacacttcatatctcttggttggagtctatatgtttttacagctacctctatctctcattctttgcacttcattgatttacatggggataatgacgatccttttaacttgtactttgtttgccatttggtaagataaagatttggccttgtatgtttaatataggtcgtttgtcatctcacactctttacactactagtcttacatcaaaacaaaaaacagtagtcttacatcaagtgcctttgcaattcgaaaaaaattaacgaaatttaaatttgaaatctagttatgtactccttgatgtaaaatttgaaatggctcatgttgtattttgagaattgtaaaaaaatatcaaactttatgagaagagagactcgattcgaattccaacatgagccattgtatgaattgtatatgaagtttaattacttgtttacattgtgtgtatatttcaaaaccatatgtttcttcttctttttgtcatatccattcgttagttctctcatcaccacgaatcaaatcaacatcattcccaaagttttttaatctaataagatgtgggactacttccttcccaagatctggtctatctctttttcttagctccgcacatttcaacgctagagtagcaaaagattgagcctcttgtacaggccaatcagggacaacggggtcaagcatttccttgaaagttcctttactaattgccctcgaaacttggtgagccagccccatgggaggccttccggttataatctgaagtagcaatatccccaatgagtatacgtctgattttgtggttaacattcctgtttgttggtattcagggtctatgtaacaaaacgttcctgccgcggatgtcatgtggaattgcgtgacgctatcagctatcgatgcggggactaaccgcgctaaaccaacgtcgctgatcttgctcacgtagtttttgtctaagagtatattggctggtttgaggtcgcggtgaactaaaggctctggcttagcttgatgaaggaatgagagtgcggtagcaatctccgccgctatttcaaaacgtttcctccacgaaagcggtggagagtttccagtacgaaagagtctatcctctaagctcccattttccatgaactcgtaaaccaaacatccatattcaggacatgcaccaaggagaagaaccatgtgaggatgccttatggaacatagaacctcaacctata

SEQ ID NO: 35118 - DNA, 789 bp, Arabidopsis thaliana landsberg
gggggaggtgtacggggactaccagtgcagcgagtacctgatagaaggtagtttcggggcaaggaactgcacggtggtggaggcggagacgaggcggaaggtggcggagataaggcgcaaagtggatgcgtcaacgaacgtgatgcttgggaaagacgttttctcgttgaacgtgaagcccggttttgatggagcctttgcaatgggattggttcttgtgcttgatcaaatctacggcgacgatctccttgaggttggtgaggaacaggtgcacccttccgcagaagatctctgatttgatttttcaccctttttttgtttttgttttcttcttttttggtgggacgcaaacaaaaccgagtggaaaaataataattattgtgagtttgtgtcggtttgaaaggaaacgatttggacaaattatttctcgtcattcccatgggctgttgtaatctggtttgaatttcttactcagttacagctgtttgatttgaaagaaaaaaagggtttacgaaaggagtttagttgtagataaacattacttttgtgtctaattcattttgcttttgttggtgagttaggcgaaaagttacaacttgtatattagcttgaacgagttgcaaatttaaatatcaaagcgaccaaacccttaaaagtgttccatctatttttctctctccattgacatagcctttataggacggttcaactataatactccaaatcaatgggagatagtgatagcttagaaaaattgtgtcaaataagagtatatgttatgggtacaaa

SEQ ID NO: 35119 - DNA, 4380 bp, Arabidopsis thaliana landsberg
aggtaaccgagccaaccatgatcactgcctcggagatcatgtcgaagaaccatcccgaaccgggcctcaaaacacctcggagatcacatcgaggaaccatcctgaggcgacatcgagaattcctcggagcatcaccacaaaagggttccccgacccggtctcgaagtgcctcggatggcaacctggaaaatcatcccgaggcgggtttcaagatgcctcgggagtgcatcattcgactagcgcggtccaagccgctcagccacgacccgagggtcagctcaacccggctcggaagaacttcggatcgggtcagaaaaccttcaaaaaaagatattagagaatctccgaggatgtcaccgaatatagaagttcctaaaatcttcggaagataaagaaaatctccttcgccaactctaagataaagaaaaatcttccgagaatatcgcgagaagcgatctgccaaagccatatataaagcacctctaaggacaaacaaaggggacacgcacaaaaacgctctcaacctcaggctatcaaaatcgctctgattttgaaggcaaaacacttattttccatatttctaaacacttgtaggatcaaatcctcattatttcaataatataaccaagaacaccgtccgcggtaatcagcaattctaatgttctttgagaatctcacaaagatccgttctttgaaggaacccttagtacaatttctattgtgcgagttttgactctcacaatttggcgctagaaggaggggaaatattgagatttctcttactcccagaacacagaaccaaccaaccaatccacaatggtcaacaatcacatccccgataacactgttgacgcagagggaaacccgatccctccaaacgagacagacgttcctgaagccaccgctcccgctgtcctagcagaattaagaagtatgatggctcaacttcagaagaaggtaaacgatcaagaacaggcgaatcggtctttggcgcaacaactcgaagcagctacctcccaaggacagatcaggactactcgtttcggcgcaaggcatctttaggatcgatgaacagcagcagatctcaacccaacacggctcgtgttccacacacctggcaacacgacgaggcccatccgcagaaccgcgccggaaattggaagagaccgagcagtgccgacaactttgggaaatcgaatcacgacgaaccgaacagaatccgcagctccctcttccccgagcagatttgccgaggccgatcagatcgaggtctcagacgatgaagattcagaagagaacgttcgatgggctgaggaatgcgccaaagaacaagataagcactatcaagctctccctagccaaagcagaaaacgagatgaagcttgtaagatcccaaatgcataatgcagtctcctcggcccaaacatcgacctcattctggaggagtcccacaacactcctttcacacgcaggatctccaacgcaataatctcagatccagggaagcaaaggttcgaatacttcaatggatcctccaacccgaaaggacattggaagtcattcataatctctgtggcccgagccaaatttagatccaacgaaagagacgccggtctctgtcatctgttcgtcgaacacttggaagggccatccctggactggttctcgagactcgaaggaaattctgtggatagttttcaggagctatcgactcttttcctaaagcactattcggtgctaatcgatcccggcacgtcagacgctgatctatggtcactatctcaacagcctaatgagccacttcgagatttcctcgcaaaattccgatccaccctagccaaagtagaaggaatcaacgatgtggcggctctttcggctctaaagaaagcactgtggtataaatccgaatttcgaaaggaactaaacttgtccaaaccaccgacaatccgagacgccctgcaccgagcctcggattacgtatcccatgaagaagagatggagctactagctagcagacacgaaccgaccaagcaaacgcctcgcagcgataaacctcagaccggcgctccgaaccacaagaaaggcgcccaaggtggtacgttcgttcaccatgaaggacgaaatttctctggagcccataattaccaggtcgatacaccccgaggcaagccacccgaggccgagggcgaggccgcggacgaggacgcggtcgagaatcttacacatggacaaaggatcaacccgcagggaaagagcaagaatattgcgagttgcacaagagttacggccatcacacgtccagatgtcgtagcctcggagcgagattggcagcaaaattcctggccggagaaattggtggaggcttgaccatcgaggacttagaggcagaaaagggttaaaccgagcaggtcaacgctgtggccaatcccgagcagaccgcccccgcggcgaaccccgaaggacctaaaagaggccggggtaatcgcgaaacagacgaccatgaaccagaagctgctcggggaaggatcttcacaattttaggggattcagctttctgtcaagatacggcagcatcaatcaaggcatatcaaaggaaagccgacgcgaatcataattggacgcggccatttaatggaccaaatgacgaagtaacctttcacgaaagcgataccaacggtttagaccgtcgacacaacgatcccttagtcattacattaaccatcggtgatttcaacgtcgaacgagtcctagtcgacacgggaagcacactggacatcattttccttacaactctgcgagaaatgaagatcgatatgacgcaaatcgtgctgactccacgacctgtgctcgggttctcaggtgaaaccacaatgactctcggaaccatcaaactaccagtccgagccaaaggagtaacaaaaattgtcgatttttctattaccgaccaaccaaccgtgtacaacgcgattatcggcaccccatggctaaatcagttccgagctgtcgcctcaacgtatcacctatgcctaaaatttcccacaaacgacggcgtgaaaaccatctggggaaaccagaaaaatgctcgcatctgcttcatggcagcgcacaagcttaggaaccccgtcactgaatcgacggccgacgcaaatcataaaaaggccaaacttggccgagccgaagaaaagtcgatctctgagcagttatagcaattaaagatcgaagaagctcgggaatctacgataccaactcccgatccggtcatctcaatttgccttgacgacgcaaagcccgagcgatgcgtagaaatcgacggagatctagaagaagaactaacagctgaactcaccactttcctcaaagaaaacgtcaatactttcgcctggtccctagaggatttgcccggagtaagtgttaacatcgtatcacacgagctcaacatcgatccaacttttaaacccatcaagcagaagaggagaaaattaggtcgggaacgagcagaagccgtaaaagccgaggtagaaaaattattgaagatcggatccatcaccgaggtgaaataccccgactggatcgcaaacccagtcgtagtaaaaaagaaaaacggaaaatggagagtttgcgtagatttcacagacttaaacaaagtttgcccaaaggacagcttcccattaccacacatcgatcgcctcgtggaatcaacttctggaaacaagctactgtcgtttatggatgctttcgctggttacaactagatcatgatgaaccccgaagatcaagaaaaaaccgctttttacacagagcaaggaattttttgctaccgagtgatgcccttcggactcaagaacgccggggcgacctatcaacgcttcgtcaacaaaattttcgccttacagatcggaaagacaatggaagtctacatcgacgacatgttggtgaaatccattgtagagaaagatcacataacccatttgcgcaaatgtttcaagcagcttaacctctacaatgtcaaactcaatcctgcaaagtgtcgctttggagtaagatccggcgagttcctcgggtacttggtcacacaccgcggcatcgaggcgaatccaaagcaaatcgaggcattgttgggaatggcgtcgcctcagaacaagcgagaagtgcagcgcctaaccggaagagttgcggcacttaaccgcttcatctctcgatcaacagacaaatgcttagccttttacgatgtgcttcggggaaacaaaaagttcgaatggacaacccgatgcgaagaagcttttcaggaactcaagaagtaccgagcaactccacccatcctcgccaaacccgtaatcggagagccactatatttgtatattgccgtatcagatactgcag

SEQ ID NO: 35120 - DNA, 5867 bp, Arabidopsis thaliana landsberg
tgattgaatttgcaactggatccgaatttgcagctccctgttctcatataaaaagaacaatcctctgctcctggcctcactggatacacattctcactctcgttctcgctccaaccatcaccataaccataaccatctctgtcttcttcttcttcttcttcttcctgattgatggtgactactgcattcgaatctaaacctccattactctcagagacactcatcatcttctcactctgctctttcgtaacttcattcaaacccacattcttaagcttatcactcaagtcctccgctgcgtgattgagatcggaaagagaacgatcatgagatgaatcaccagaataagatcgagaaacaggttttggctcaaacccatctgcaatttcttcggaattgaccatttttttttttttggtttcttacgaaatcacattacaaaaaccctaattttcagggaggtaattgaagaagaagatcaaagggtggaagaagaagaataaagttgtttcctttatggatactttattacatttgtcgtttatagcgtcacgaatgagaatctcaaagaaaccgttgctttaatttgttgacaagttccaatagttcacattttatgcacacttttttaacttaaaattatgcgtgtcagatatttctttgagaattgcaactaagtccttatcgtattctgatatttcataattatgcaacatagcttttaattgtacaagcagctcctttatttatcaaatcaaagtctctctctacaccaggattgttgttatagactaactgaagaagacgagagagaacacaacaaagagatgaatctttatgcaacaaacaatggcaattccaaatgttaagtcatttggtctttcgtttgtgccgtgtgctgaagtcagagagttttacatcctagttgacacaggtaatgtcattcattagcaatttggtaggtttgagtctttatcaaagtcaaatgaagtccacggcgatgaactctgactgtcaaccaaccaggataagccacgtatacaaccatatatgtcaaatacttgagtaacacaatgcttttcctacaccaggatttgttgttgttacagattcattcaactgcaaaaatagagaatacaacaaagagagaatctgtctgaaagtgaaaacgtctgcaacaaacaatggctattccaaatgttaagactttgactttataatcccgaattgacagaggaccagagagacatacacacttagaaaacccctaatattcgtacaatccaattttcttctaatagatcaatggagtaatcttcttcatgatagattccatgttagagcctaaatcaccttttgttggtcttcttaaccgaatgaccggtcttccttttatgccggctgaagtcagagacaaacctgaatgtttgaccacaatccggttcagcgcaaacataaggcctagcgcctgtgtgaacccttatgtgctcggttctagaccaagcccacttgaacgtcatcttacatcccttccatggacatttcagaggacggtcgtctgagtgaacacgctggtgttgaaccaaatacttgtgtgagaagaagtttttaccacagcctttaattgggcatatgtttcttttgtgtaacatcaactgtttttccgaactgaaactcatcgtgcaaccctccatgttacattggtatgctgcacattcctcttcctcattctcttcttcttcttcttcttctttttcctccacatctttttcagttgcaactctggagaaggaagcattaccacttctcttcttaccaatcttctttggttttgtttctaaagaccctctcgacggcttctgatgtctcaccctaagccgtgtgctaggtccctccatgtatgaatccaattcttcattcttctttccagatgcaaattcttgcaaaaagcgaccttttgtgtctctcgaactctgaactgtcttggtttttgctattcgtttggctgttgacctggtttgccttttccctgtactgcaaaagcctcgttcctccaaagaattctctgctgaatcatattcaccaaccattcgattagcttgcctattacttatggatattcttccgctttgctgataaacgccattatcttctgactcatatgaaactggattcctaaaaactcttgtctgttggctccttggaatccccctaggctgcctgtcgatatcatcatcatcatcatcatggtcatacattgaatgctgagagccattctccattgagctctctgaagctgcacatgcccgtacagtatactcttccccaagtgaacggtctgaaacctcatcatctgactcaaattctttataacctttatgtctgataattcccttgtgcggatcagacatttgatttgatgaatcaccagaagctgtgttccctgtctcaaaataagactcttcctcattcccggaagccctccattgctgcttataagaatgatcttctgatgtgtcatcagaaactccatcttccctcttaaaagaagtaagcttcttgcgtggcaccgcctttgctcttatctttctcttcctacaatactttcttccaaacattgttgtcgaatccctggaaacattattaggaaacgatctctttccagtggcatcctcatccatagcaactcgaagatgacaacttctttcagattcttccccctctaagtcctgctccagcaaaaagggatgcacctgaagaaagaaaagcaaattgaaccaaacagaagtgtactaatgtctgaattagtatggattcaggttagacaatagtacctgatgtgacatccaaaccttaccacaccattttccaacaacatatttcctctgtctggacgatcttttaccagagactttgggtttcgagggtgagctcgctactggagagctgcgaccgaacgccttgtatatgatggagttatacggcatctgcttactgtacagaggagagcgactgagaatagcgctgtaagaaaggttaacacccaattttacggtccaatcactgttcccacccttagcttcaacattatccaacgctgcctgaatcgtttcctcatcctctcgggtcacattcctgaattcagtatcattccattcgtgattgatgacgagctcttcggcaactatctttgcttcagcctctatcctggggtactctgcaaatgttgtgcgtcaaaatgatgaaaaagactaaagaattgcataactgatacagaaatactaataaaatgaatcttgtagttttgatgttacctggatggcacagtaacattaagttaatccccccaaaaggacgaagttgctgttccacttccgcagcatgctcaagacaaaacacgtgcaaccgacatgaatcgtcatcagatcttggaataaatggtaaagctatttccagaagtgatgattttccgcctttgcttaacccattctgttcgctggttagtctctggcagttaaaatcagaagttctaccatctctagcctcctcatggccatctgaaccttcttgatcatacgtttttgtttcccctttggaactaggggtaactaagcctttttgatcttcttcctcggaatcagaagagtctccatatgctgaagctaacatcccaagaacatcattatctttatgcgctattgtcggggaagttgttgaagttttttgatcgccagtcttcactgaatgatccatagtttgaacaggaacattgtagaagtaatttacatcatgcttctctttggttcctgcatgatgaaaaaaagttagtaaatgctaaataacagccaataaccgaaagtgcgacctgtaacttacgaggatgaagtgatcttgcagcctgaccaagatttgcagatccagaagcagctgtccaatcattgaagaagctacaatctgcagacatgagatatctagcagctgcttctttaggttgaacgatagctacacaatcaaagcttaagactccacatgtaacacaagagaaaagcctttgatccgaaagcgcaacagctgcatcattcttcctcctttcagcatcagacagagtttcttgagtgtccttctccgtgcttgctaggtgatttctgctcctttcacataaagatgtaaatttttctttcactgaaactgtatcctttaaaccgttactgagatcaaccacaacactatcagaacttaagtcctcacactttaactggattgggttttcctggttggttatcaaatgggatccaattcgcaggtcagaacaaactgatatatctgaggaactctgtgggagaagggccactggggatccttttccgagagaagaaagcaattcgttgttgtggataatgttttgcacaaatagctttttggtcaatctttctccttcgcttcttgccttatcttttaatctagaactccgtggtttgggattgatgcttgttggcactctgcaatgagtgaaacataccttatatgagcccttcaagcagcttaaaaagtttgagtgtgtctatagaaaagaaagagtacctagaacctagagccaatacaaagtcataaagtagctggagatgagaaaccattggagggtaatttatagcagctcgccggatagcagcatctttagccattctcaaccattcgggagtggcaatgttagatgcttctccaaaattaaatcctgtacaacccccacgattgtttttatggataatataagttatttcaacatactaggcctttgaatggttgacttaaagatactaaatataggtcgcttactcaccatgactaaatcccgaatgataagctcccggaaaggtgacgacaaactctccaggattttgcactaacctgatacaaaaaaaccacttgcgtgaaaaaccagaagaagaaaaagtgtgccaattataagagaccaaagaagagacatgcaaacaacaagatgatgagataaacagagcacaaacataaaaaaccattacctgcaacacggtattccggctttaacaaatacttcaggagacatcacagttgtcttctcaccaagagtagaaaatgtcactaataagacaacaatgtaagaggcataaccaattagtttgcttgcatacagcttctacccctgacaacttttggagggaaagaaaagcatttaaaagcaacaaaaagaacagagacacaacaaagccaacaatcagaacaatgaattgatacattgagtaactatgagtcactaacacataacacttatcatactcaccaagaggattgagctcttcaccgtaaccatgaaccctaacaacctcctcaaaagccagagcagcatcctttggcacaccgtaccaagtcttaccagcacccatatgcaagtaattgagactatgaaggtcatggtcctccacatgccaagcaaaccaactaaacatcatagcaacatacaccattggtgatgtaactccagggatctcttccttcatgaacttaagcaatgatccttcggctctagacattgccctcatgttccaagcggtctcaccaactgttcctccttcaccaccagactctctcctcctcgcagcagccagactcagagggataaaagccgagccaggcatgtcattggcatactcaacagagaagggtttatccacagtggctctccagtaaagtgtttcaatttcaagggcagagagttgactctttttaccacatttcttgagataattcttctcaaagttcttcgctttatactcgaactcaccataagagtactcctctccactctgccacacaggtctctgcactggacgctg

SEQ ID NO: 35121 - DNA, 676 bp, Arabidopsis thaliana landsberg
ccctgtgggtgctgttggaccatctgtgtgatcttagcactgcatccagcagtatgtccttggttttgctgttgtgcaatctcaggtgggggcgatgattcttcattcatggacgttgataagatctctccatttagcagcaccttaggatggcatacccttcttgatttgggcgaaaaataaactataaatggcttccccataacacacaccacccatgtgacaatgaaggactggctctccaacacattgattctgtgctaaaatggatgaaactaatggccgggaggaaaaatcagagaaggaactgaatgatgatggtgaatatttgattagaccttatcttgagcatcttgaaaagattcggttcagatacaactgtgagagagttgttgatctcgacaagcatgatggaatcttcttaataggggaattctgtctgtatgtgatagaaaacttttacattgacgaagatgggtgtatttgtgagaaggaatgcgaagatgagttatccgttattgatcaagcgttgggtgtgaaaaaagatgtctctggaagctcggattggcattccaagtataccacatcatggactacaacagtgaaaacaggagcagtagggggaagagcatgggcatatggtggtggtgctttgggaaaaaaaaaaatgtgcatg

SEQ ID NO: 35122 - DNA, 1646 bp, Arabidopsis thaliana landsberg
agtaagtattgtaaaattaccaaatggcaaatagacatgtgtacgaatagctaaagtgtgcaaaaaacacgggattgaatcagtgaagtttctaaatttgaaccaacaagaattgcctgcccccttgtaaaagataaccactaaagaaggttcgtattatattaccattcaataagtttatcttatttttatgatcatgtgtttggctagtttgggaagagaaggaaaggaaggcttacgctatagtttggtttataacaagcaaaccaattagttgatcctgattccctaacttgtgactattaactcaaagtcaaataaaaaatcaaattgcatttagatgggtttatgaaggaactagtacaacaaaagtcacaaaatacaaacatttatatcaacaatggagcaatgaaatatggcaacatacaaccaacacacaactaacatgcttacaagctcaaaagagtgagagactatttaccagaagcctggaaaacaacctaaacactgtcaccacatgaaaaaggactgcattcaaagaatgagataaatggttaattctaatgtgggcaacccgaaaaggaaagttttagggggttttcaatcttcttctgtcactgagaccgtctcaaatgtggggctgtggtatatccttcgaagaaatccaacactgcggtttcaagattttcagcagagtatttcaagtagttttcgggatgtcttccgctctctatatgtcccctgaatcttccaagaaaggatctataagccgggataagatgctccgatagagatatcctgagttcttctctaagctgagtatccggaaccgaccatgtcgattgaatcctgtgatcctcttcaaccattgtattgatagctttaaccctctctcttaaagcgctcttcgatacaccggaagagaagcttccgctctcatgtcatcattaatctcaaaagctattcctcaccctggcccatgtagctctctgatacttggtagctgcttgtctaaatatcccggtaagcttccttaaatacatgtctcctatcaactccattagctccggagagcttttgaccttctgaactatgtaatggacattgttcatgacgaagatgtgagataaaggttcgtccctgtaatgcaaagacttctcttctagattgaattgtagcatcaccattgtccatatcatatgcaaagctaacggagatattccttcaagctcagagatatccatatccggatcgtttcgatcattggtacatttcaaaccccgacatggtttcgtcatgatgagatcaatcaacgtttccctatagtcagagatcaagttgaggtaattcatcacataccttgtcaatggatgtatagttcctccagggacaggaacaaccgaaggttcgcgaaacaccgcattctcaaactcggtaagtatccctcttgctgcttcagctaatcttgattgaatctctgtagcttgaacaagaatcgactccgatgaactcgaatcgaaaatctcttccatatcaggtaacaaatctgttatagcatcatgtaaatcaagaatcttgaatagtttctcaggtgatcttctactaatgcttatagctttcaggaaattaaaaagctgcaaagcaga

SEQ ID NO: 35123 - DNA, 6628 bp, Arabidopsis thaliana landsberg
gcgttggtacgtatttgtgtctcacgtaaaaggaaacgtgatttggtcttggtcggtttgacgttgctccaactctcttgtatcttatgtatttatcgtcattatttcttcaaactttgttgttcctttcgttttaggcttttagcctacactatttaaacatttcttatgtaacaagtagtatcaacttctatctatatgactatattgacgtagccatacaaaggaggtagatcatctaaacttacacaaaactagagagaccaatgtttttaggaaggataaataaaggaaaagctcctttcatactggtttatatactgattacttaaaatcaggaatcctttagatcggaatgctttaggctaaagcaaaagctttttgattcaaaagaaaggaacccacaagctgtattagccccacttcgctacttttgcatattctcgttcgtatattttattggattaacacttttttttggggtttaaacagtacacatacatacacaagattggtacttttgatatacactcacttatattcgcacatctaaacaattcaaaatttgaaaccgtataaaaatttaaacaaacataagaatatataagattagatcattgtcatgtactaaaattccaaaagttgtggatttcatgtcgagaaaaaatcatgtcatcttcctcggacaatttcaaatttcatatctattaccatagatggtccaaaacaacatccttaaataccataaagtagctaaaatctgaaaatgcacataactgatcaacccaccaaggttatattattagttatactacatatataataaaccaatcaatgtttatgcaatctgctcaaaaaggtatgagattcataccgtatgattcaagatgagaacatctattctatttttatgtcaccatgttggtatatgtccttgtgtcacgatctcagcaaaaaaataatatttcaacactatcttttagaatatataagaccgttcaaagaagattgtttcaaatgttttggactagactgtacaatcttaaaaagtaggacaaatcggtgaatatttctgaagttaaagggtgatctaactgtcactttaaaaaaaaacttttaaacacctcaaactttttaatttattgtgtaagtgtcttatactttgtcaaatcgtcttcaacgcccctctctttctcatctctctgcgcctaacgtcgcttacggaagaagacgaaaattttgaacagaagctctctctctcgctatctctctatctctctatctccaacgctattcgatgtgcgtaaattagggttcttcactcgtcggatctgattgtatattgtgaaaatctcagatctcagatctcttatctaacaccgtcgcgtgtcttcgtttccttctggaaatcattactttggataacatcgatcttcttctccgattattggatgcaatttattgattgaatttcagattttgaaggaggtgaagcaaagtcgggagctgtacatttccgctttcatgttctgtgttgaatccgaattctctccacattgtgagtttctcttcgatttgaatctaacattctattgttgaaattgggaattttttgatttgtaacaaatgggtgattctggattttgtatggatgaagagttgtttttacagatctccgaagttggctcctcaaagaagatcacagcgcctcatgggcggccaaatgcagcaaaacaatgctgcggctgcgacggcgctttacgatggggctttacccactaatgacgcaggagatgcagtcatggcacggtggcttcaatccgctggtttgcagcatttggcgtctcctgttgcttctacaggcaatgatcagcgtcacctcccaaaccttctcatgcaggtaattgctttccctgattctttgtttctgtactcttccaatattttgcatgccctttagttttcttgatggagtttgccctagcttggtaaagtatgcaaattttgtattagacgcagatagccaagttttgttagagttttcggtcgctaattcctgcgcacatttggtgttagactactaaaaacgctgcagtaggaaattaggaatgtaggattgtttctccctgttatggatattagtcataacgtatctcaaggagagcttggaatttgtttggccatttatgtaatgtgattaagttagatgtttgctgcagggttgttagtgatttcttcttcgattggtaaatttctatagaaacttttgccttggctcttgtataattcgcatgaacgggttctgatatttgaagcatcctttgtggtgtttgcggtatctgctagggttatggagctcagactgctgaagagaaacaaagactgttccaactaatgagaaatctcaattttaatggggagtcgacttctgaatcatatacaccaactgctcacacatcagcagctatgccctcttcggaaggatttttttcacctgagttcagaggtgattttggagcaggattattggatcttcatgcaatggatgatacagagcttctatctgaggtatgcttggaagaagaactagtgcaaagacttattcatagttactcattagtgcccatggataacagaaagatcataaattttcatcatcagattgtctgttcttgtgttacatcccagtattcaaactgttcttgctaatcttacattgccatattgagtcccacctaatccattggctttgtgcacatgtaatctatctgcgagacttctgtaggcaacttctgatcttgacactcgaaaggatttagcgagatgtgacagttttggtcttgttgtcattagaaaagcatctgagctaaataactgcttgttgcatttgctagttcataaagaaagcgattatccatgtgaaagttaccaacttttatgatacgtgactttcctttcattttgcagcatgtgattaccgaaccctttgagccgtcacctttcatgcctagtgtaaataaagaatttgaagaagactataatttggcagctaatcgtcaacagcggcaacagacagaagctgaacctttgggtttattgcctaaaagtgataaagaaaataacagtgtagccaagattaaagtagtggtaggtcattcacttgagaactgacatgtttccttactacttgattgttttataagcaacgttcattatgactagggatgattgggaaaccacttttttttttgtctataggtaaggaaaagacccctaaacaagaaagaaacagctaaaaaggaggaggatgtcgtgacggtatctgataattctttgactgtccatgagcccagagtgaaggtttgtgtgcattcttcatcatagataacaatggcaaacatgattcagttgaacaactgaacgatggcatcctgctattaaaggtcatatattcttttcatttaatattgtcttttcgaatattgaatgaaccgtaatcttgttggtgcaggttgatttgactgcttatgtggaaaagcatgagttctgctttgatgctgttctagatgaggatgtttcaaatgacgaggtaagttaagaattgagcttattggaaaccatagaaaatcctattaggtgtccgtgatgcaaccttgagctttggtagatttatgatttatgtcaaggtcgacatacctgattgacctattaactagatcatagcatgtggtttcccccaatccagattggattgatgtatggatacattaagctttttatatatacagaagctttatgctgctttgaacatgtttgtttgtttccttgaataggtgtatcgggccacaattgagccaataattcccattattttccagagaactaaagctacatgctttgcatatggccaaacaggtatgcaatgacattaatgttcattgggaaatacactgatagttatactcttgctaacagattccagtttttagaggataatagattaatagtttcttcatgctttcatggccctaatgatgttttgcttattcaggtagtggtaagacatttacaatgaaaccattacctatacgagcagttgaagatcttatgaggttgttgcgtcaaccagtatacagcaatcagaggtttaaattgtggctcagctattttgagatatatggtggaaagctgttcgatcttctcagtgagagaaagttagtgttctttctttttctcatttcttataaatgtcgtctttgttgaggggttttatgttttccttttcttttggcatatactttgttcaggcatatactagcttataattgttatttcgatgtcagtatatcgtaaacattggcacttattcatcctatcagtgtcaatactttccattgttgtctgctactatcgcaaatgcatgtttaccattgtctaaatcattcagttattgccgagtaggaaactttgcatgcgagaagatggtagacagcaagtttgcattgttggcctgcaagaatatgaagtttcagatgtacaaattgtaaaggattttatcgagaaaggaaatgccgaaaggagcacaggttcaactggagcaaatgaggaatcttctagatcgcatgccatcctacagcttgttgtaaaaaagcatgttgaggtaaaagacactagacggaggaataatgatagtaatgaattgcctgggaaagttgtgggaaagatttctttcattgaccttgctggcagtgaaagaggtgcagacaccacagacaatgatcgccagacaaggtaaagattctctttgcccctgtgattgagtagtttgagaattgacctaccactaatgtgtagattaaaatttatgcctctgttggacttgtgggcattgataaagtggcactttgctgctacctttttactttaggaccaccacacttcagatctaaatgcttcattgttttcattgtggatttttcttaggattgaaggcgcagaaatcaacaagagtctcttggctcttaaggaatgtatacgtgcactggacaatgaccagctacatataccatttcgtggaagcaaactaacggaagtgctccgtgactcatttgttggaaactcaagaacggtgatgatttcctgcatctctccaaatgcaggatcgtgtgaacataccctcaatactctaagatatgctgatcggtatgttttgtacaaactatagcctcttgtgaaacaaattctcaatttcatcgtctattaacctctgttggttatgtatggaataaacagagtcaaaagtctatctaaaagtggaaatagcaagaaagatcaaactgcgaattcaatgcctccggttaataaggatcctttgttgggcccaaatgatgtagaagatgtctttgagcctccgcaggaagtgaatgtaccagaaaccaggaggagggtggtcgagaaggacagcaacagcagtacgtcgggtattgacttcagacagcctacaaattatcgagaggaaagtggaatcccatcattctcaatggacaagggaagatcagagccgaacagttcttttgctggctccactagtcagagaaacaacatttcttcatatccccaagaaacttcagaccgtgaagagaaagtaaagaaagtgtcaccacctcgtgggaaagggttgcgggaagaaaaaccagacagaccacaaaattggtctaaaagagatgtcagttcgtcggatatccctaccttgacaaattttagacagaacgcaagtgaaactgcttcaaggcaatatgaaaccgcttcaaggcaatatgaaaccgacccttcgcttgatgaaaacctcgatgcactgcttgaggtaaagtactcacctatccctttaaaacatgagatgaagctgtgaatttgatttgcaagtaacggtagttctgtttatgtcttatcgtaaccatcacatgacttttttcaggaagaagaagctctgattgcagcgcacagaaaagaaattgaggatacaatggagattgttcgcgaggtatgtaaatcacatcattgcagcgcacaaaaaacgattgtagaatgttatcacatcattcaattttcttttctgttatatcattatcaggaaatgaaacttctagcggaggtggaccaaccgggaagcatgatagaaaactatgtgacgcaactgagctttgtgttgtcccggaaagcagcagggctagtcagtcttcaagccaggcttgctcggttccaacaccgtctcaaggaacaagaaatactgagccgtaagagagttcctcggtagttggtagaagaaggaaaaccaaaagtgtggtgttgtttaagtgtgaaaggttggttgggtgatctcttcttatatatgacaaagaatgacagaaatgtccttcatgtttgtgaatttgggcatttctttccttttatttttgaatctttattataaagttataccttttgtgtttcttatatttctcttctcctctatcctcccagaaagctggatactgtcaatgtgaatcaaactcttttatctatcaactgaaaaagtataaaaccttttatcatctgaaaaatgtttctaaatttggtgagccatatataa

SEQ ID NO: 35124 - DNA, 878 bp, Arabidopsis thaliana landsberg
tagagaagattcgcaacttgaatgtcggctattatgaaaaagtagttctgaggccggttcttgttcaagtctttgtctcctaaccaagatttcccttccttgcgcgtcacggcatcaatcacatttataagaagtgtgcatatgtaactcgcaatcgacgagctcaagaagaagatcgctccagcaaccgctctcatatgctcaggcatcctaaccgtcagaaactccatcagagccaccgcggaaaacgcttcggttaaaccggcaagagcgaactgaggaaggagcattacaatagaaaccggcgacacgaatgagccattctttagagcggatgccttcgcttcttctcttggaaacccgcgacaatcatacaaatgattcccattactatacctaatacaaagaatgttagaaaactaaatataaagcaaagaaactaaactatgatcttgtaaatcttttaacctaaaaaaaaagcaatacctatctcgattctatgttttaacgttaaccgttttttccgacccgtgatttgtttcactattggtatgataacacactcgtaaagtgagatccaaatcgctagagtgatcatggagacgagattcatccatcctgccgggacttggaagttatgtggtccaaacgttttatccatctgcattgcttgaaggatcccgtaaatgttttgttggtcagtcagtatgaaacacgcgattcctgtgacccaaactggtaaaattgctgtcacacacttgaggtttttcacctgctgcacactacataatctccatttgtacttcgcgttacccgcttcgtttaactcgttcggatccttacgatagatgctttgtaaagaaccttaatctgcacac

SEQ ID NO: 35125 - DNA, 999 bp, Arabidopsis thaliana landsberg
tatttattaaaaaataatggacattgtgatgtctaaacttgattgtgttagtcaaatataaaaataaaaaataatgccgaatgaaataaataatgaataatccttcagttactatttttgtttcaattggataaatatttcgattttgaaatttgttatcaactaatattaatgatatacatttttccgtttctaataaaattattgaggatagtatttgttgggtaagcaccggctcataattattgcattcctataaatgactatgacgttgacgaagtaatgagaggtatctacatttaacggtgataattaatctatgaaagctaatgagcatgagtgtgtatacgaatgcccgactaatctttttggattttttttggtgtacatgttagaaatgtcccatgaagacctttcgctttgacgaaagattcataattttctaaaaattgtttacagagatttaacagactgccaacttacggaatatagaaaattagttataagacctaaaatttatacaatcattctcatataaatataggattaagaattgtattaatttttgtatatgtgttgttttttttgttttttttgttgttttttatttatttcatatattttaatttattgaatattattatttgtttgtatatatatatgcgctgttagtattataccaaactgttgtcatacctcaacggtagagagtctcttatatgtgcattaggtcagcagtttgattccctgttgatgcagtcttccatcattgttttctaataaaacgacgtcattttgatttaacatataattataacgaaaagttaatctcgtttacgaaaacttaacaacatgtccgaaatgaccaagtcaacgaaactaagttattttatcaaaaactcaaactaaactttaccaatgcaccctcagatttttgaaaattgtttaaatgtctaagttttcgttgatttcagaaggaaaaaagattgctagttatcg

SEQ ID NO: 35126 - DNA, 6111 bp, Arabidopsis thaliana landsberg
gatattttcgggttatccaaatatttgggtataaaaccgattagactttggttctttcaattatagaatttagtattcattcagttattttaaatttttcagttcaatttagttcgattattttactttggtttgggtttgatatattcagtttggtttatttggccaggcctaacaagcgagaagagaattggtagctgaaaagagcaaagaacctaggaaagagatttagctatgggctatggcccaaccaaacccaacccaaccactgccggttcagtatttgtgatttaactaataaccgaaaaaacatcaaaccagaccagaaaaagccggtacaatgtctctcgacatcagctgactcaaaattagcaaatgtttgatgaatcgttcaaaatccccaacccttaatttcctcctaaactttctcctcctcctctgaagaagaagaagaagaagaagaagaaatgacgcactccttcaccgattcttcctaccaacaattccacgatggcgaaactcctcgagacctttccttgtgttccctccaccgaacgaggccgcggcattttgatctccggcgattccaaatccgacaccattctctactgcaacggccgctctgtcttcatccggagcctccgccaactccaagacgtccaagtttacggcgaacatggctatgctgttaccgttgctcgctactctcccaacggcgaatggatcgcttccgctgatgtctctggtactgttcgcgtttggggaacgcacaacggcttcgtgctgaagaacgagttcagagtccttgctggtcgtgtcgatgatctccaatggtctttcgatggacttcgaattgttgcttccggcgatggaaaaggcaaatctcttgttcgatccttcgcgtgagtttctcctccacttcttcttcttcttctttcctgattttgagattcaatttcgagtccttggtaattaggcaaacaatttaggttttaatgatgactttgtagaatggaatgatctctagggcttgatcaatttgtgtttgttttatatatgtagatgggactctggcaatacaatgggggattttgatggccattctcgtagggttttgagttgtgccttcaagccaacgagacctttccgaattgccacatgcggtgaagacttcttggttaacttttatgatggaccaccttttaagtttcactcttctcacaggcatctttcttcttctcaattcatatatgtctcttagatattaacagtttgttttcttgactaatagtaccatctgctacacagggagcattccaacttcgtcaactgcatcagatattcacctgatggtactaaattcattaccgtaagctctgacaaaaagggtatgatttacgatggcaagactggagataaagttggagaattggcctcagaagatggtcacaaaggcagtatctacgctgttagctggagtcctgacagcaaacgggtaattgttgttaggatatcaatgtgtggccaagctatgcaatgtttagtactgatatttgatgagtttttaggtgcttactgtgtctgctgataagtctgccaaagtatgggaggtagctgaagatggaactattggctctgtaattaagacattgtcgtttatggaatctggtggagcagaagacatgcttgtgggatgtctttggcagaatgatcatctcattaccgtgtctcttggcggtactatgtccttgttctctgcagatgatatggataagcctcccttgctgttatctggacatattaagaacgtcacttctttggctgttcttggggaaaaccagaagacgattctgtcttgtagctatgatggtctcattgtcaaatggctaaaaggggttgggtacagttgcaagttacaaatgaaagacaccaaaatcaagcgattagcggctactgaatctagcattttcatatctggatatgataatatggtacaagttctgctaacaaaacaattgttcaatgagatatgggtttggactgtgttaaagtcaatgttacatcgcatatgacatcttcacttcttgacaggtttggagaattcctttaaccgacaacggatatggagctgcagaacatgtcgatataggccatcagcctctggacataagcatagccgttgattctcccgaagccacagcactagtctcgtttgattccggagttgtattgctcaatggtctgaacattttgagcaagatcgatttgggttttgctgtggcagcctctgtgatctcacctgacgggaaagaagcgattgtaggagggcaagacgggaagttacacatatactcagtctcaggggacaacaacctcaaagaggaagcagtcctggagaaacacagaggtgctttgacagtgatacgttactctcctgacttaacaatgtttgcttctggtgatgccaaccgcgaagctgtagtctgggatcgcgagaccaaacaggtgacgtgattagagttgttcttgtatgtcttatatgttcaatcatgcttaaacgctaacctggaagtgcggtttttgttttgcaggtgaagctaaacaacatgttgttccacacggctcgtataaacagcttggcatggtcaccaaacaacaagatggtagccacagggtccatagacacttgcgtcattgtatatgaagtggacaagccagcttcaagtcgcataaccgcaagaaacgctcatctcggtggagtgaacgcagtcgccttcattgatgattgcaccgtagcaagttccggagaagacgcttccgttcgtttgtggcatatcgaacctcagtgacttgtcgttataagctttttttttaaccgtccttgaaagttgtagtctctatatattaatttgacaatggcttgtttgtattaaagcttgagtatctcttatcatgaaatgcacacgtgtctaaatctatatggtcaaatttactctgttgtgctgattagtgccgagtcaaagattaattaagtattgagggaaaatttaaacaaaggttaaataattagaagaagagataatgtttggagccttggttggttcttacttgttactttgcttcgtacggatttgaaggctttacctcaccggagcttccaagtagaagacgacactgagtcactgacacagggatacaaattatggcgccttttggcgggaaatctttagcggacgttgtttctggcatcggagggaatggtgttggcggggctctggctgcggtggccgccgctctgttggtccgcctcttcgctggacctggcatcgctctcttacctgaagacgaagctgaagatgattacgctgagacggaagacggtggtggtgattcaattcgtccggtgacaatccgttggaggaacatcacctgctcgctctccgataagtcctccaaatcggtgagcacatttcttctccttttgcatgtttcgattgcgcgtatattagtctttccaatttcacgttaatagccgaatcagaattggttgattatgtgattctcaggtgaggtttttgttgaaaaatgtatccggagaagcaaaacctgggaggttgctagcgattatgggtccttctggttctgggaaaacaacattgctcaatgttttagcaggacagcttagtttatctccacgtttgcatttgtcaggtctcttggaggttaatggcaaaccgagctctagcaaagcttataagtatgtcctatgagttatacaaagtctatatttgtgtgaaaatctgatcattgtttgagagagtttcttgcaatggcaggcttgcgtttgtgagacaggaggatctcttcttttcgcagttaactgtcagggaaacactttcttttgcagccgagcttcagcttccggagatctcttctgctgaggagagggatgagtatgtcaacaacctcttgctcaaacttggtctggtgaggtttcattgatctctgcattttggatgatattgtggtagattgaaatcctggaattatgtttcttgatcgtcttttgtggctctccaaaaggtcagctgtgcagattcatgtgttggcgatgctaaagttcgtgggatcagcggtggagagaagaagcggctgtcacttgcgtgtgaattgatcgctagtccctctgtcatatttgctgatgaacctaccactggtaaatgcctagtctgtctgattctgaacattgatggattgttttaaaaaagaattagaggatgataaaatattcttgtggtcttcagggcttgatgccttccaggctgagaaagtgatggagacattgcaaaagcttgcacaggatggacatactgtgatctgctccatacaccagcctagaggttcggtgtacgctaaatttgacgacattgtgttacttacagaaggaactctagtctatgccggccctgcaggaaaagaacctctgacatatttcgggaacttcgggttgggtttatgaacatttccccttatatgtcacatgtctccattaagcaagtgctttaggattatccactgacaactgttcttctgatcgttgagcaggttcctttgccctgagcatgtgaaccctgctgagtttcttgctgatcttatatctgttgactatagctcttcggaaacggtctactcttcgcagaagagagtacatgctcttgttgatgcattctcccagcgttcatcatcggttctttatgccactcccctcagcatgaaagaagaaacaaagaacggcatgagacctcgcagaaaagccattgttgagagaacagatggttggtggaggcagtttttcttgctgcttaaacgtgcatggatgcaggtattctcctatgcatgatgtgaagaattctttctataacatgttgggcttgaacaccttttctgacgtcctggaatatctgataatggttttaaatagttgcatgatttttactaatgattgcttaagaaagatatgaaaatctttgaattgtctctttctgtcatgtgacaattttttagcattttgtgtttctaaatgtttcacccgactccgtaggcatcatagaagggtccttgaattgtacacacgatcttattcaaggttaacttgaacagtttttctgattgatttcttcacttgacttcataggcttctcgggatgggccaacaaacaaagtccgtgcaagaatgtctgttgcatctgctgtgatatttgggtctgttttctggagaatggggaagtctcagacgtcaattcaggacagaatgggtttgcttcaggtcttacacattttgcttttgctatatacatctctctttttctgtcttgttgaatatcttttatatatatactaatcaatgatacctgtatacttcaggttgctgcaataaacacggcaatggcagctcttacaaagacagttggtgtctttcctaaagagcgtgccatagtggatagagaacgatccaaagggtcttattctttaggcccttacctgctctccaaaacaatagctgaaattcctattggagctgcatttcctttgatgtttggtgctgtactataccccatggctcgccttaatcccactttgtcaaggtaattcgtaagctttctatcattttgttattcctgtggccatgaggtaaatgtcaatggtactgataagccattcttgagcattcttcgtatatttgaccaacccattaaccccagtgagaaatgcacatgtcaactatgtccttaacaaagaaattgttttgccagatttggaaaattttgtgggatagtgactgtggagtcatttgctgcgtctgcaatgggtctaactgttggagctatggtcccaagcacagaagctgcaatggccgtgggaccatctctcatgacagttttcatcgtgtttggaggttactatgtcaatgcagacaacaccccaatcatcttccgttggattcctcgtgcttcattgatcagatggtgaaccaccttatcccaaattactatacagcgatgatgaccttatttatatatgaactcacttaagtcttagcatccactcgtc

SEQ ID NO: 35127 - DNA, 8687 bp, Arabidopsis thaliana landsberg
tgatgagcctggtttataggtgtgtaataaaaatcggcttatctactaaggtgaacaatcaaacttgataagaatgcatatttaggttaataatctcttggcttctccggttattcttagctatagatatagggagtttcgcggaacaccatcggttattccataattagagtttgagtttaagaatggttcgataacaacctagctttcattagatctactaaccaatagtttcctgagaataccctgtttctagctctttatttaatcgtttaccacacaatcaatctgctgtctttttactttgctctcattttatttcaatcatcacctactagctaaatctcgacattcaactatttgtttgaacaaaagaactttgtgaattcgatccttaaatactgcaactgatctcttatttgagagagtagttcttagggtaatttgaacgttatcagcaaccaacagagaattaacaacttaatgaaaaacgctctcaaaacagatggtcattcacaaacacaaccgggtactaatctcaatcaccaactcaaaatgatatctatacaaacacaaccggttactaaggtcaatcactaactcaaaatgataactatacaaacacaaccggttactaagctcaatcaccaactcaaaatgatatctataaaaacacaaccggttactaagctcaatcaccaactcaaaatgatatctaaaaaaggtgaaaagatagagattaccagagagtctcgaccccagggataggcttttcagacagaagtggaagatgttgtcgacctggaagggctagtaaagaatccaacagatcttgatagtcgacattagggtcttcttcttcgggggaattagggtcttcttcttcttccttgtcttcttccccatcttcttcccaatcttctaccccatcttcctcttcatgattattagggttttgttgctccgtttgacgaggatgttgttgaagacccgaagattgatgttgccgagcaggagccttttgttgacgagtaggaggttgttggtcgctcgtaggagcctgacgttgacgagtaggatgcagattgcgatgaacgggaggcggttgttgagaaccagagatcaagggttaacaagaattagtcggggttagtgtcatttggggtggcgtcgtctttggtacaatagccggcagatactatgaagatcggctcctatggtattgtgtagcagaatgtgtcgccaaattatgggtcgacgagttagaagaggctccgtgacaactcgaacctaacactggatttttaccctgaagacttggactccggttgacgattcgcgaactcgacctctacctctacctctacctctacttgattttcccttaccaccagcagccataacgaatgaagaacccctagatctagaaatggtgaaattagaaagcgaaggggttggattgaaacagagaagagaatctaaatctagaaaccctagatctacacaataaaaaacaagaaatcgagtagaagaagaggagaggtgagagcgtttaaccgcagaattctaaagagattgaaagcgaagaagaagaagaaacgataaaaacaagaaatagagactttataaattattgattaaaaaaaaagtctatatttagtcgcaaaaacgttgcaaagtaaactgtttggggggggggggaattgagcgccaaaagacttaggcgaaaaattggtgaaaatgattgaaattaaaaacagtcgcaatttcgttgcacaattagtcggactttaatcacaaacaggtcagcaattagtcacacaataagtcaaatataggttaaacgtagcttattggtcgcaaacggcgaatgtgttgtgactctacataataaaatgcttggattccattgagtttgatccataaatcattgacaagcaatgatttagtagtatagagtacatacataagtgttaggtctgtaaatgttttgctttcttagcttattttataattgtttgaaaaagatcattcttgtatattaaagaacatgtaacacttgatatagattagggatttttgaatatttagtttgtaaacattggaattgaagagattgattatatttttataactaatatcgatcaaatcaaactataaacgtataagaaaacatgcaaacacacttcactatacaaattttgaaatgcaaaacgcgagcgtcggttaaacgtagcttaaaggtcgcaaaagtgcgacttatttgtgaaactgtgtaataaaatgtttgagatccattgagtttgatctataaatcattgagaagcaatgatttagtagtatagagtacatacataagtgttaggtttgtaaatgttttgcttcttagcttattttatattgtttgaaaaagatcattcttgtaattaaagaacatgtaacacttgatatagattagggatttttgaatatttagtttgtaaacattggaattgaagagattgattatattcttataactaatatcgatcaaatcaaactataaacatataagaaaacatgcaaacacacctcacaatacaaattttgaaatgcaaaacgcgagcgtcggtgaaacgtagcttaaaggtcgcaaaagtgcgacttttttgtgacactgaataataaaatgtttgaaatccattgagtttgatccataaatcattgagaagcactgattcagtagcattgagtacatatttaagtgttaggtttgtaaatgttttgctttcttaacttattttataatagtttgaaaaagattattcttgtatttgaaagaatatgtaacacttgatatagattagggatttttgaatgtttagtttgtaaacattggaattaaagagatttattacactcttataactaatatcaatcaaatcaaactataaacgtataagaaaacttgcaaacacacctcacaatacaaattttgaaatgcaaaacgcgggcgtcggttaaacatagcttaaaagttgcaaaagtgcgatgtttttgcgattatgtttttttctcgctaacgggttggtaaatagtcgcatacctgagactgttttgcgactattggttttcgtcgttaagtagcaactactttgcgttcatgttagtggcaattgttagttagtcgcaaagggatcacaaaaatgtcggtttattttgcgactgcaagtttagtcacaacaaagagtcccaaaatgcaggttttcttgtagtataataagaaaagttgcgagataactttttgatcctccaaaccgttgtaaggttctagattgagcttccgagaatctctgattctcaaactttcgtttttgggatgaaaggtgttcgcctagcttcttcaatgacctgattgatatccgactccgaactagtggcctgatggaactttgaccttatttcttttagttcccgactaccctttctcatggtctcgaactggtcgagactttcttgctcgtgctgatctgcgaattggtcttcgtccccgagctgtgtttccccgtctcccggctgaactaccatgttagcggcatctggagttgtttgtccgctggttccatctcgcgcaagggagcttggcgaattgaaaatagtccttcgaactccaacaggatttcctgcattcatagaacaaacacgagattctatagtactgacattttgtctaaaagatacatgggttggttgtagtgtatcaacggctttttccacatccgagaacttacgtgacatgtccgacatggtttgctgcatgattttgagaatttcggccaataatgcaatgatggcgtcttctcggccattgctgcttatcttgaaaatgttgtataaaaaatctgacgattcaagaatcctccgtccccacagacgacgccaaaatgtggatgtcggattcgcacactcaaatatttatttatttagtgagaaggattattcttgaggacaggtgtactagaaaatagattgatgactattgagaaaactatgagctttgtaggaaaatgcgtatagtaagtttgcccaaaaatgcgtgtccctttacatggcctttgacccataatttatacccaaagaatacattaaattcccatttacacaaaattattctatcttaaatgtatccgtttcagtcttcgaattaactattcaaacgttcgaatttgaattgattccggacttcctgggcttcacctgtcggtccattcgactctccaatccgggcagctttgacctcaatgtcacattcacctcgcggatcaatcactccgcttgtattcttgctcaagaaaggcctgtgggcctttcctcttttgggcccctccaacttacatggcaatgtttggccggatccgagcccatggtgcgggatccgacaccaacaattagccccccaagtctttcgaagtgttactccagtttggaaggctttaatgctataagggcaaagattgcgccaaatgattcttttgatttcccgcctaagttgcacaattgcgttgatctcagaatttcctataattactcatgtgagacttgtcgcaattatgaccgtatattgtttatttactattaaagcggagaaactcttccacttcctccacgactcccaaggcggttccgtcatcatcactggttcgcgtataggtaaaattactttactctttccttgtcattttattttttacgcttctctctgaaagcaaagttcttctctctctccaaaccttcaatcttcttattctctacacgatgaattccgaaattgaaagacctgaatccccctcttttgacaacgccggctctactaacgacctctgcacccggccaaatgacatcgccggtccccactatcaatccacatgcaccttctaatctcttaatcgattgggagagctctgtcagattctggtcgaagtaatgatggattttcagatgccggagcctaccgaatcgccggaggaacaccgtcccgggttcttctgcgtgtacgagatttacttcaaagggtgtggcttgacttttcctctccccgaagccctcgttcgttacttgtcggcccttgaaatcgccttaccccagctaactcccaacctcctccggactattctaggaattattactattgcggctgaagccggatacgccatcagggttctaaaactgaacgaacttctcagtgtgaggagttttcgaacaaagtcggatacttctcggcttatccgaacgccaatagaaatcttatctcgcaccttccgaacaaagaagagaattggcatcacccgtggttcttagttaaaaagagccctgcctcgatccgaaacctcctggacttgctcccctcgaagtggaatactaagcccggtagttgttaggtcatgcatatgaacttcattttatttcttatcttatctgaccaacttctatttttcaattcgcagctttcatcgcaccaacccttccgaccgtcgaattcagcgaattcttcaagattgtcattgaaggagaaaccctttggaactcctttactctcgaccggttcatagaggccaaccacaaacttaggatgagccccctggacatctcctccagctgctactgccccctcccttacctaaagggaatttgctccggccatcgcagctcgacgcaagaccctgtccaagtcgattgtggaggcttgcaaagtgaacaaatcattcctccaatccacggtcgacaagaaggtatatagcagaaccttgctagtcgatgatggcagcgccgaaggggcaagatccgccggtgcttacagacccactcctcaccgcgaaggtcataacggccggtcatcccacaaggagcgatcccctcgacgtgactcaccccggcccacttcccgaactggactcagcagcgagccaattgctgacctgattcggaagaagagagacaaaccatcccgcagtagctcctcccccaaaagagacaagacgagggcccgaactgaccgctctcctcgaccgtcgccgccacccgatctatgggtcctcctcctccagtcaccgtatctccttcgtccggatcaggaggtgaaaaggcagagcggagtgctaaccctcggcgggatgaaactgaggtccgagatgccggaactaaagttgttttggttcctcagaccaagtcgctcacgggttagaaatttcctcccattttttgttatcacatttttaccatttcgccttattgactcagcattgttcgaccggtccgaccttttttaacagcgatggaaacggagggaaacgtctttcgatgtttcaaaacccgaaaagacaccatcctgccagccttcgatagatggcgtcctgcaattcgcatgcaattcctactccacgcccatcactcatctcgggttagttcctttttcccacaatagatcttttaatctttgcttctttaccctgtcgctaaccccttcttgttattatctgatccaggcgaacagtgaactcaatgacatgattgagtactatgaaagggtactgcttgacagagaaaaagatgttatggcgtggaaggataagtcttcatcccttgagtccgatctccactcttcaaaggatgccaggctgaaattggagggtcagttgacaacctctccaccaaactcatgaagtccaacggcgagctgcaggagcagtaccaaaggtacgacaagatccaagaagaactctcaacttcccgggacagactttcggaatgcgaatccagtgcctacgagttgtccaaccagctatccgaattgcagcttaagtacaaagcggtggccaactatcgggatgctgagttggtgaagtcggcgtcaaaggccaggaaagaggtgaaaggtcgtgggatggaattgatccaaggggcaattgtcttcatccagactgagatggttagagcggagctggaatctgacgtcaatgagtaagagagtaatctcctccttttggaccaaactcatgaagatgatttttccgaagaacgagagagggacgagttgaaagccgtcctggaagagaagcgaaatcgtttagcttcccttccttcctcgtcgttcaacccccagcagttcgaggagttcttcactgaatcgcctcctttgagtgaatccggtttagactgggctggtaaatcccaactcttctccctttttctttaaaaaatcgatccacagtgaactactcttatattaatccgagataattgcctcaggtgtcagcggttccgtggaacccaaagtgcctattgccccggcatcagttccgcggcgataatcacgttgcctgaaattcctccatccacgaactcggagatagtggttatcgaggatgatgatggctcagagtccgtggttcctggcgagcagcctgctactgatgagccgggtgagactgagacagctgccgcagatcctgagtcagttcgaaccgaacccgagatacccgagaactcgtagtggctgtgtcaacttctcggcttgtcccttaaactcgaaatttactattgttttttttttaattactttacttgcctaagtaggctttaaacaaatactttgcctaaggaggcttttaaacctttcctttaagactacgatcccaagagggttttctttgtgctaatcttgagtatggatttgcaaagtccatttgtttaaatagcgtttttgtttaaccatgtggtcaagttacgggacttgtaggttgatcagacctatccctaaaaatgcggactttaatccgcgaactccccaactttataaccaaaatcctactttagcttctggaagctggttgcggttctagttcttatgctcaacgatacacaaagcatctagtaatatttgactataaatccgctaaccaagctacttcttgattctcaaacctttgatggtgaagtcaaagatcttatgagtttttggtgttttgaatcgtataacaaggaagcactactttacttttcgagatctctttgaggttctagttttctattcaatcatacacatgacatctagtcatatttcactcatgttggacaagatagtttactgtgggttgtccatcctgataacatgttgtacgacggaaagtcgcttatcgtccaagcaacactaattttggattaaaattttgattcaaagacacatcatatgcatcgattccagtagaccataactcttttaactcctcaataagaggttggaggaagacatcgagactacctcgcgggtgatttggcctagaattcagaattgtaagaaacaagtactatgtattcatgcacatacccggtggtaaattatatggagtcaggatcacatgccaccaagaatgatttcgcgacatgccaaatggattaaatccatcagtacataatccgagataaacgttacggggttcttcggcaaacatgggatgtagctcttggaaatatctccacttcaccgcatttgaaggatgattcatttcttcttcttttgattggtgttcggcatgcaacgcattgcagttgtagtctcgtggctctgatacattctcttcaatcggacaccaatgggtagataccacatacaactatatggcactttgcttgttcatcggtagtatccatag

SEQ ID NO: 35128 - DNA, 4031 bp, Arabidopsis thaliana landsberg
ctcctaactcccatgcaagacgcaaccaccagagaaagcgtcctcttttaaatttttctgagcctgagccgcatcgccgccgtaaatggtggcggttttgccgagatgacgatgacgacgccgccggaaatggaatccaccgtggaacaggagattcaaagcggtcatcgctcggggagtatctagaggtggaacggaggtttggagatgaagccgtttacaactccgccgaggcagagctagaggatgcggtggtggcacggtaccaagatcagcagccggtgatgggggagcgggcattgttcgctgacggaagggttcttcctccggcttcagctgaagtggttaccggagaaggaacgccggtagccacgtccctttgtagatttccggtttctttaaccggtatatgcagcggtggtggaggatgaatacgtcggttcatgtgtgtgtcttttatttgtatttagacttaaatttttgtattttgttcgtcgaatcggaatcattgtttgtggaaaatataacatgttgaatgtagtcattgtcaaagtaattatttgagaaataataatgattgataaggagaattatgaaggagattaattacaatggcaatagtaaaagataagcatatagaatggcacacatgcacagcttttggtgtaaaatggagctgttcacttgattagagttgttatttaaaatgctaaacgttgttctatcatattgagtttttgcttcaaattatttcatcaatacgtctttatactagtcagtctttggacaataatttgaccaaatcagattttgaggcaaacacaatatgattctggccaggagtgtgccacattcgtggttaattttccactagtatttctgaaagtaaaacaattaaccacaaatcatcctcataacataagaggagaagattcctaacgacgaagcaaaattatcgaacaagtggacacacacaagaaaccgaaaatacggcaaaatgtttgttatgtgtatccatattttataccaattgaattaataaaataaactgtacaaacaagaaacaattaataaaattaattttttgttttacaacgtgaataaaaaactgttgacaaaacgaaaataaaataaaccctcgagtgatgttaaaaaaaggaagaaggaaaaagaataaaaactcaaagggaacgcaacacactaaacaaaaactctttggcgtccttctccttagggtctatctctcttatcttaagcagcagcagcagtagctagaacaaaaacgtcaccgatggcgtctcaagctgcgaatctctgggttcttctaggtttaggtctcgctgggattcttatgcttaccaaaaagctgaagaagaccgtccgtgaagatttcggcgcttttatcgataaactcatgcttcttccccctccgcaacctgctcctcccaaagctcctcatcctctcaccggtctaacctttgccgtttccgacgtgtgagtctccgttgacttgtttccccctttcttctcccatatgtttatcatatctatatttgggggtttagctgaatgattttttccttgggtagagtcaaaattttgtttgacaaatgttggaatctgcgttgactcgactcgtaatcttctccggcgcactacatgtctgattctgagctttcgaaagtatggttgattgattttgagccgtttcactgaaaattgtgtttgttgtagattcaaatgtgtgtgtgtgtgtgtgtctgctagttttgtcaaactcatttcaaatcgatacttgttgaatctgttcattggaaggctctactgtttgatctctgttgctaggtgtttgtatgttttagattcgtcaccaagtttgacctcgacttattcatggagtcctacttataactgtctcaacatgttgattgactatttatctaatctgtgtatatctctcattctcttctatgatcttttgacttttgaagttcttgaaaagctaatttactctttctttccttttcatttgttttccagattcgatattacagggtatgtgactggatttggtcatccagactgggtcaggacccatgaagctgcttcgtcaacatctcctgtggtttcaactctcgttgaaggtggagccacttgtgttggaaaaactgtagttgatgagtttgcgtttaggtttgtctctgtttcataatgttaaattgttacctgtatcaggattcagattgtgattccagtgttgaaatttttattttatcaggatgttagtatattaattcctttgtttggctgttttcattttcttcagtatcagtggagaaaacaagcattacgattcacctacaaatcctgcagctcctactcgtattcctggtggcgcttgcagtggagctgctgtagccgtagcaactaatgctgtggattttgctctaggtgagttcagtagctacttttttccttgtttggacaatttggtatgagatgaccgtatgtttgagacacaaaacattgcataaactttcaaaacatggtcaataatcttcctttaggaaatttctgaaacgattgatagtttattcatactgcagaaacttatttggcatctaatagaattgcttgatttagactcttatggctatatggtaagatagttccatgcggatttataatttatatggtagtctgtcattggctcctcctatcagtatctaaaatttcaactgcatactggttggttcggtttcaattgttttcagaatatagttttgattacttgcatctttgcaggcatcgacacagttggcggggtaaaagtgcctgctggatactgtgccgttcttggattcaaatcttcttatggggctatttcaaacaccggaatcataccagtatcttcaagtcttgactctgttggtatggatatataaatctttgaattatactgtttgtggtggaatggtttggatcttatataggctaggtttcaattgttgtataatcacattgcaagatttagatgccttcgttcgtatgactaatttatatttaggaccaaaaaatgagaattacgttgattctgatcaatagatcttggcttcaggatggtttgcccgcgatccaaacaccctacgtcgtgttggccatgtactcttgcaacttccatttgccactcaacggaatccaaggcaaatcatactagctgatgactgttttcagctgttaaagatccctgtggatcggattacccaggtggtgatccaatcagctgaaaagctttttggaagtatgcccccctttactctccctgaagatcctccagtctctgttagaaattctgattataatatcattatcttgttttatatttaggacaattgctaaagcatcagaacttggagacctattttgaaactaaagttcctagcttgaaagagttcgctaggacaaaagccattgctaacacgaaggtctcaccatcgagactactggcgaatgtgatgcagcttcttcaaaggtgtgcctattgtttattcacttacagaggatgaaagaatcttagttttgaacactctaaaacaatattggcattgtaggcacgagtttcttcaaaatcatggggattggatcaacacagtgaagccagccattgatcctgtgatttcatcacaagtgtgtgagaacccagaactaaccaatgaagagattgagaacctgaatgcaattagaaacgagactcgagtggctattggttcacttctcaaggtattcctgctcttccatgacatgtccacaacttgagctagttagtttatgtctcttaactaatctctaattgttcccaactctgtcacgttatgtatcaaggatgatggcattctggttattccaacaatgccagctgttcctccaaaacttggtagcaaggagataacatctcaagactatcaaaaccgagcttcaagtccacttagcattgctagcatttcaggatgttgaaaggttaatgtcttctt

SEQ ID NO: 35129 - DNA, 2580 bp, Arabidopsis thaliana landsberg
  unsure (1)..(2580): unsure at all n locations
agcaacatagaagttgtggcacagaggacaccacttccaaaacttgatagaaacgagctaccgtattgaaatccagcgaatttagcagaggaagagttaatcatgatcgtaatatcctctgctccatcactactcattggagacaatccatcatcgacaaaaccatcacttcctcaaaagcattaatttttaaggtcgacaatcatacaaaaaaataaaaaccaattattcaattatgcttacatgccatcaaaattccttactaattattcatgtccaaagagaaaccaacctctataatgaatctttgagagaagtaaaggagtcgatagagaagattacaaatttagaaatatatatccaatagtacctgaacaatcgagtcgcaagtagtaacagaggcctaaagactaacaacctgaagaaaaagaagattcttcaaagtgaacaacgactcttaacagactagcaaccggaagaagaggaatcgtagcaaaggagcataacagtgctatcttggaagaagaagtggggcaacccgaaaatccgtggtgcaaaacgggttagccttatttcaaccgcaatccaaacgggccaagaccgcgaggcccacatttttttggtcttccatacatgggcccaaacccaccccgcaacatccctaaacgggccaggcccgcggagcagaggcctgattgacatggctaaagactagtatcggctaccgttggcattggacagttaaggttatcgagaaagttatcaaggctatcaagattcttataccaggatttgttatgggcaatttggttgatcaaggaaactagtatcggctgcggttggctttcggtagttaaagctattgatataaactgatttttactgattttatctatgttttaggtataagattttgagtttttatgttatttctcgagtgtttttagtgtcttttcaggtattctatgcaatgggacaacaatggagataaggagacattttggagcaaaagctaaggaaaaagaagctaaggacgattttggttcaggaatcagcgaggagtgtcgattgacacactcttggtatcgatcgacactagtttcggccctggacgctttcaagtttatagaagatcaaatttgccctagaagacttccctatttgcattattagtctctggacgtttttagggtctatatatattgtttttagacctaagtttcttttatcaagtcttttatcaagatctttgcaaactctattgtgagagacataagctattcatcgattgttttctcagagtttcattcaaatcgatatacagtgaagagatcccttcatactctaatctatttactgtgtttatgctttcacactcaattatgttgcttgtttcaatcaatatgtctgagtagtttgctcgttaggaatagggtttttcattagggattcatattgtttagtagatcgtccccgtgctaggttatctttagaatttttcatctttaattgttcttaatgctagatctagaataattaactagatcttgaatccagacaatagatatacccgccataggtatctttagttggatctattttttgatgaacttggtttataggtgtgtaataagaatcggcttatctactaaggttaacaattgaactcgtttagaatgcatgttttagttaaagatctcttggcttctccggttattcttagctataggcataaggagtttcgcggaacgccaccgattattccataattagagtttcagtttaagaatggttcgataacaagctagctatcattagatctactaaccaataattttttgagaataccctacccctagctctttattttaatcgtttcacatcaaataaatctgttgttctcttacattgcttactttttatttcaatcattccttgctagcttaatcttgacattcaattcattgtgtgaacaaaagaactttgagaaaattcgacccttaaatactgcaatcgatctcttatttgagagagtatgtttaaggcaatttgaatcatatcagttaccaaatctcaaggagacgaactgatcagagcaacaagttgacacaaaataggaatacatgagagacattggagataccgagatatcgaggaggcgatccgatgttgtacagattcaactttgggagaagagaaatgaaccgtcaagagagaagcaaaagcctccaaagtccgccaagactcagcaaagagaaccacccgacaaagacgacgacgtgactccactctgtgaccagcaaacgagaacgacgacccaagaacaccatcgaccaacaaatccgacacatttgagtaccaagacccagcctcattagatctacccccacaacacctactactccaaatcgtatagcctccatgcttccacaaacaaagaagttaaacacaagaaataaaaaattaagcagagaaacaaaaaaggtgatcgacgccggcgctatttgagccaccacacgccggttccaagcagaacatacactntgtgttaagggcggaagacgagagagaaaacaattt

SEQ ID NO: 35130 - DNA, 17949 bp, Arabidopsis thaliana landsberg
tcattattctagacttaggtctctttccgaccttgtcgttttttccatgatcttggtcaatctccgataagatcaaaaccccagaaatagtcaaatcccgactaagtctgtacccgatcttagttaagttccgactagatccaaatttcgttgatatcggtccatctccgaatatatcaaccaacttcccgtcatgttaaaagctttgactaaaaggataatatcttggttcccgatcatgagttgggtaacaatttccatttccaaacacatcgatccctcaacttccttatccgccaaactcttactatgacgttttctcgagcacctatccatcctaggatcaagcatgctctgataccaacttgtgagaccccgtcccggacgtctcagtgtccggcgacgttgtactcaagttcgcgcctcttcccggccgaacctcttaatttttcgcgattcaacatagaattgcctttacgaggctaaattctataatcgctctcttattacacagcggaagtctttctaaccttggtttaattctaaccaacttttgtaccggtttcatcgtctttgtcccttagacttagatcgatcctttactcggtcaagacatgcatatgttcgctaaccattctaagccaaacaatcgcatattcctttatcctactttcacgatcaattaccaaacatctatcttaactaataagctagatcgttacataccttggccaatatgcggatttgattccttagcccgtttgtcgccttactccattcgttcaacgactcgtcatcggtcgtgaattgatgaaccaatccctatcgttacttagccatacaaccaaccaaccccactggtctaagtacaacgatagagattggggatcgtacgattcccttggttcacgatggccgaatcaagctcttagcttattggtccatccgttctccaaacgtacgcccctctggctacatggtggacgattgagccctcggcttatcgaaccatccatgtttccgttctggtcgtttaacactacgaccgcccacggtttactaaccgtttacccgtccggtctatggtggtcgataaagctttcggcttaatgatccatccatgcggtccgaacgatatccttatcacacccaagggtccgtggattcatccactggatcatcgtaggctagcccatgaaatctttcttccgtcggcctcaggtttgctcgccggtccaacatccgttttgtccatcggttcccaccatggactttcccgttggttatccgtcgagtcaccctttggtcttaccgatctctgatcggtttcaccatggctgaggagatagatacatgaaggcggccacgatgttgatcctatatggtgaatcacgttccttacccattcttggggctttctccctttatcggtaagattgcatccatgggcgacccttgggtgtgttcggatgcacttatccttgtgcttcctcgaacacttttctcgatccatcccatccgacgatcggtctgtccgacccgttccgtcagacgatcggcctgtcccatccgacccgtccgacgatcggtctgtccgatccgtctggccgatccgatccgtctgacgatcggtctggccgatccgatccaaggatcggtctaccagatccgattcgtctctaagacgaacggtctaccctctccatcctctacactccatcgaaccgttggaccgggaggtagcatgcgcatcagttcggtcgagttatactcgccgagccgcaccccctttccgaccaacaactctaggatgtgttgggactcctttaagaatgttttatggtgttttggatgttgtgagatgatgtgagattccttgggcgtcctcccttatatagggggcgaatggatgcttcctgaagcatcacatccgttctttgcacccctccgaaaggtcacatccgttccttgcatcctttcgaaaggtcacatctgttccttgcatcctttggacgatgcaaccgttcgttggtacccgctcgaccttacactttttggccgagacacctcttcacccgtgagctacgacagtccaccagctcgagtgtcagctgaccggaccacccagctgggtcagtacttgatcagctcactgagctcagtcgagctgtcggtcagctcacctagctgagctagctagtcttccagctagtttagctcacatagcttacctagctagttcatacagcttgtccagctcacctagctggtttagcttatactttctcgttcttcctacttagtattttggtccgttcctcgaccatgatctagttttctcctaaaacaaacctgcctctttatgaacgcgggacgcggtcgttacaagtctaccccccttaaactgaattcgtcctcgaattcggcgtgtgtaagatcttggttactccctaactcgggacacgggcgttacaagtctaccccccttaaactgaattcgtcctcgaattcagcgggtttaagatcttgtttactccttaatctttagtctttccgagactttagatatcacatttgatcaaatctctatttccgagtttgatcaagtttcccgatctttgtctcttacgacactcgatcaaattcctgatcctggtcctctcccggactcgatcattatttcccgatctttgtcttttcctggacttgatcaatattttccgatctttgtcctttcttggacttgatcaacgttttccaatctttgtcctttcctggacttgatcaacgttttctgatctttgtctcttccgacattcgatcaaatttttgatcctggtcctttcccggactcgatcattatttcccgatctttgtcctttcctggacttgatcaatgttttccgatctttgtctcttccgacattcgatcaaatttctgatcctggtcctttctcggactcgatcatattctcgacttaagtctttttccgactttgtcaatatttccaaccttggtccccaaaggactcggtcaatatttccgacataggtctctttccgaccttgtcgtttttccatgatcttggtcaatttccgataagatcaaaaccccagaaatagtcaaatcccgactaagtctgtacccgatcttagtcaagttccgactagatccaaattccattgatatcggtccatctccgaatatatcaactcacttttccgtcatgtttaagttttgactacaaggataatatcttggttcgtgatcgtgagttgggtaactatttccgtttccaaacacatcgatccctcaacttccttatccgccaaaaccttactataacgttttctcgagcacctatccatcctaggatcaagcatgctctgataccaacttgtgagaccccgtcccggacgtctcggcgtccggcgacgttgtactcaagttcgcgcctcttcccggccgaacctcttaatttttcgcgattcaacatagaattgcctttacgaggctaaattctataatcgctctcttattacacagcggaagtctttctaaccttggtttaattctaaccaattcttgtaccggtttcatcgtctttgttccttagacttagatcgatcctttactcggtcaagacatgcatatgttcgctaaccattctaagccaaacaatcgcatattcctttatcctactttcacggtcaattaccaaacgtctatcttaactaataagctagatcgttacataccttggtcaatatgcggatttgattccttagcccgtttgtcgccttactccattcgttcaacgactcgtcatcggtcgtgaattgatgaaccaatccctatcgttacttagccatacaaccaaccaaccccactggtctaagtacaacgatagagattggggatcgtacgattcccttggttcacgatggccgaatcaagctcttggcttattggtccattcgttctccaaacgtacgcccctccggctacatggtggacgattgagccctcggcttatcgaaccatccatgtttccgttccggtcgtttaacactacgaccgcccacggtttactaaccgtttacccgtccggtccatggtggtcgataaagctttcggcttaatgatccatccatgcggtccgaacgatatccttatcacacccaagggtccgtggattcatccactggatcatcgtaggctagcccatgaaatctttcttccgtcggccttaggtttgctcgcgggtccaacatccgttttgtccatcggttcccaccgtggactttcctgttcgttatccgtcgagtcaccctttggtcttaccgatctctaatcggtttcaccatggctgaagagatagatacatgaaggcggccacgatgttgatcctatatggtgaatcacgttccttacccattcttggtgctttctccctttatcggtaagattgcatccatgggcgacccttgggtgtgttcggatgcacttatccttgtgcttcctcgaacacttttctcgatccatcccatccgacgatcggtctgtccgacccgttccgtcagacgatcggcctgtcccatccgacccgtccgacgatcggtctgtccgatccgtctggccgatccgatccgtctgacgatcggtctggccgatccgatccaaggatcggtctaccagatccgattcgtctctaagacgaacggtctaccctctccatcctctacactccatcaaaccgttggaccgggaggtagcatgcgcatcagttcggtcgagttatactcgcccagccgcacccctttccgaccaataactctaggatgtgttgggactcctttaagaatgttttatggtgttttggatgttgtgagatgagatgagattcccaaaggccttgggcgtcctcccttatatagggggcgaatggatgcttcccgaagcatcacatccgttccttgcaccctttttaaaggtcacatccgaaaggtcacatccgttccttgcatccttccaaacggtcacatccgttccttgcatctattgggcgatgcaaccgttcgttggtacccgctcgacattacaccttttgtccgagacaccttttcacccgtgagctaccacagtccaccagctcgagtgtcagctgactggaccacccagctgggtcagtacacgatcagctcaccgagctcagtcgagctgtcggtcatctcacctagctgagctagctagtcttccagctgggtttagctcacctagcttagctagctatttcatgctagcttgtccagctcacctagctggttcagcttgaactttctcgttcttttgactaagtattttggtccgttcctcgaccatgatctagttttcccctaaaataaaccggcctctttatgaactcgggacgagagcgttacagtcaagcttagtgactctaaacaacctcactttggaggaagtcccttgtctatccttgtacatattgctttcttgttatttttaatgtttttgtttaagtgtttcaagagagaggacttttggggaattttcaggccatgctcgaccaaactactcggttgacaggccaaatttgggcttcaattgatcaaagcccaggagtagaccatacaggcccagaccactcggcccaaagtcgagtatgggcctcactgtttaaagcccaagaacatgatccacttgatcagatgtcgagtaagatgaaccccactaagcccaacactgtactcgacacgcgcgccgagtatgtcggccgagtatcgcacgtgcgaagtcaacacaattcaaattcaaatttgaattggaatctactcggccccacacatctatcctgctccccaaaggccatcaaagattcttttgcaaacagtgagagcttgtctccttgaccaaatgaagggtggagatctagagtgtttgaagagctaggatcaaatctatttgcctataaacccacctcaacaagctaagacactcactctctctctttactcaattagtttcgcaatttgctacttctctcaagaaatttcaagtttttgctctcacttctctttagaattcccagaaactgaaccataattttatactttctttccatacaaaccatttcaaaacctattaaaacatcaatttctcttctactttgacctacctttagttattttgtggtgactacctgtagtaaatcatcccaagatcatgaatcccgaagaatcaagaaggagagcctctactcgagttgtggcaagaaggtttgagatgattaatgagaaggatcagtcaaggaatcaggaagctgcgagtccaggttttactcggatgacaggccgagtacaatggccgagtatggccttggagtcctctatggctcgttctgcggctgctcgagaggaaattgcaagaggcaagagggtttgggagtccgagccggctgcaatagaggaggagtccatgctagagaaggaagcatctgaggaagatgtgcaaattgatgaagaggtcccgatagttcttacaaggagaagaagaaaccacccaaggagaaagaaagagcctaccattgaagagcactaccagtatctcatggagctgagttttgaggggacaagatatccccataaacctaccatgcaagctttggggatatgtagggatgttgactacctcatggagatggccaagttggagaccttcttctcctacaagtgtgaaggataccaaactgagagctgccaattcctagccactttgaagcttcatttctatgctgaagaaagggagagagagctgcataagggagttggctatatcacattcatggtgtttgggattcaatactccctttctattaggcagttggatgctgttttcaagttctccaccaagtatgggatccgccaaaacttcagcaaggacgagctcctagatctatggttgacaatcgccggtccactcccctacaagtaatctagggccaagagttcgttgataaggagcccggtgctaaggtatctccacctttgcattgcaagtgccttcttcccaaagaagacaatcgaccatgttaatgagagagggagaactgaagttgcttgatctcaccttatgcttcattttggggcgcacaaggaatgggatagagatggaaggggatagggctgatacatccctttcggtggtgttgattgatcacttgattggttttagggagtatgcagcgggaatccaccaatccggctatggaggaagcttatgtgctggaggagtgatcacgcccatcctaatagccgctggagttcctcttcataccccaactcacacagcaacctacatcgatatggagtatttgaagaggaagtgctacttggataggtctgctccagcggatcaactctatttcaagttcaagcactccacgctagatctctctacgctagcactcccttgcaagaagttcaccaccattaggatcactacaagaaaacaggtgataaacgacttacacgacagtcgcatagtagccgtaaaaaatgataatacgactaatcagcgactaacgacgttagtcattattacatagtcgctgaatgagatagtcgtgaattagtcgttgatcgacgactatattacgacaataacacaatcagtaaacaattgtcgttgtatagtcgtatcattttggcgactatttaacgaccatagcacgattaattgtcctgtacgaagcgtgtgaaacacgtggtcgtataatagtcgtattatattgacgactatttaacgactattggacgacaaattctatcaatgtaaggaaataattctcgtagtcatataacagtcgtataatgttttacgactattatacgtctcgtggacgattatattgtgactatgtatcttagtcggataataatcggtaactagtgtgactattagacgactattttacgtctaatttgctactaaatacgactactgagcgactacttgttttgtccgaataggaatttggtcatcgattgttgggtttcttgttttttgtttgttggttatcgattgttgttttcttgtttcttgttttctccttttttatttgaattgctaaaaagatgaaaagacttgtatatatagaaaatcaagtacaaatacacatagaattatcttgtttattacacaaacaacttattcaaataaacatatgttcaagtagagtttgggcaaagataatctaaggatcattaggtggaggacttggtagacgttctgtggttgtggtagagtgacttgccatgaagtccaagaactgcggatcggtttggcggagatacttctcgactaaagacaattgctcgagcttgtccttttgctcagctgtgactcgggatgactcagcttctcgggcagcaatctcagcatctctcttctcattatatgcagcctgctcttctattttcctttgagcttcctgcagccgttcttctagggcttgaaaggatgatgaggaaccggagtgatggcggttggcgctgcctagagtgtcttttagacatcctagtccataaggattgcctcttgaatccttttctgtggactgcaagaaatagagaagaagctcattagtgacagaatattaattggactctaagactcataattatactaaaacatcttacctcgagaaagatggctgtataatcatctagtgtgagctccggaggtcgtgaagagccatcagagacagcagaagcagacgcctctagtgctgacagcctatctctcacattctgctgataagcttgagcaatcttctccgacttctgatcaacaaatgagccatccgacttagtgtgtgtttcgatgaacacctcaccaagatggaccggtcttcccaacttctcttcctgcaaacacaaatcaatatcaacagtagtcactagacataagaactcaacatactcacaagaaaacagactatattggattgaaaacagaaaacagaaaactctaacttatgagaatctgcagaaacacttaccaattcatcttggatttcttgaaaagattttggcccagagtagtggacgtgaggaccgataccgttacggtcagagagacgagctttggaataggtccgactccttttctgtgctgcttctgtgtcccagtaagcacacattgttccccacagcgtttctccaatccatggaggctgctctcgagttgtccttgcggtgctaaccatgtccttcaagcgcctcttgacgatctcattgaagtaatactggactgtccctgttagtaagggatcccagtggtgagttttctacaaaaaaaaggaagaagttagtgaaactacataaacttaacttgaacaagagcagatatagaggaagcttaccgcaaactctaaaaataatctttctcttttatcaactggcacacatgaccagttatagaagggagcatcgaatttttgtaagaaaattctagtgatcttcctaaccaagcgagatcctctgtctcgagtaaacctccaaccacatgcaacaaagaaagaagtaaacatgttacaaaagtgaacaaagttattttcccaaaagaaatacaagtcacacacgactataaaccatgttccacaatagtactgtctcaacaatatagcatcattcacaatcaaagcatcatcatttgtgtaatataaaacaacataacacgagtttagaactgaactaaactaatgactaagaactaatgtaatcacaacacaacactcaactatgtttgaccgattaacaacagagcatcaaacaacaataaaacaggcattactacataaactaatgagtctagaactaaacttgactaaatgcctaacccgaaaacactagcaacacaagagccaacaatgtttcacaacacaacagccaacaaggttcacatttttggtttgattccaaatccaacaaagaaagaagtaaacatgttacaaaagtgaacaaagttatgttcccaaaagaaatacaagtcacacacgactataaactatgttccacaatagtactgtctcaacaatatagcatcattcacaatcaaagcatcatcatttgtgtaatatagaacaacataacacgagtttagaactgaactaaactaatgaccaagaactaatgtaatcacaacacaacactcatctatgtttgaccaattcacaacagagcatcaaacaacaataaaacaggcattactacataaactaatgagtctagaactaaacttgactaaatgcctaacccgaaaacactagcaacacaagagccaacaatgtttcacaacacaacagcctacaaggttcacattttcggtttgattcacaacagagtatacagaacaagaaaacagggaatttaaagtgaacttaccattcggtttttggccggggaatgggagacaacacacaacaccacgcttctctgccaggcacagagagaatgtcattcagagcaaccacggagtcttcttggagctccggcaacactgcaggaatgccctcttggaagttgttgccttgagacgagggatgactgtgagatgcagtttctggatccggcgaaagaggagggtcttgctgagcagtctcttgtggtggcaacggatctacacgctgtggttgattggtggagtgttggaagagttgctgcggtggtgggtagttacggtagtggggggcagaggatgaggcgccggcgccggctccttgaggcggaatcgatgcagaaacttgaaccgtcgccgccgccggggtgaaatcgtactgctgcggtagcgaagagggtcttccagcaggcgttgaacctccggctctttgagtcacgtttggtgtggtcttcctctttcgagatcctccacgaccggcgttaggcatcctcttggagatgagagaatcgagatggatcgaagaggcaagggagagtttggcgaagaagagagaatcgaagaagagagaatcgagatggatcgatgtattagggtttgttggtgaaagacggatcgatttagggttaagaagaagaagaagaagaagaagaagaagaagagaatcgatttagggttaagaagaagaagaagaagaagaagatcgaagaagatcgaggaagaagaagaagagagaagaagagaagaatcgaagaagtggctaagtgtttggaacgaaggggaaatgtatcgaattagggttttcaacactggagtagtcgtatattagtcgcataatagtcactaaatcaattgggtttgggcttcgacgattaaaagcccaataacttacaccattgtcgccccatagtcgccgaatcatcaccacgtaaattaggttatgggcttagtaattttgaagcccaacaacatacacaagtgtcgctgtgtagtcgtataattgtcaccacttaagttgggtttgggctttgtgatttcgaagcccaacaccttacaagatagtcgctgtgtagtcgtatattaatcaccacctgagttagtcgcataatagtcgtaatttcgtcaccttatgccttttaaaattatttaataattttttaataattattcaaatacttattcaaatacttattcaaatacatcgtatattacaaaatttattcaaataattaattatacatcttcgtcttctatttcatcttcatccgaggacgataaattacatcggaattcatcttctggttcagcatctccaatatcgtaattgaggatgattggggttacgtctgctaccggatagtctattacaagatcttcaattgtagtctgcaaaacagcttcatcatcctcggtttgcaacaatgtcggatcagtattttcatattgtccagaaatgtttccccttggattgacctttaaaacactgagccaaatgttctttggtttctttgtatatggatatggaatataacaaacttgatctgcttgagatgctgttcaaacatgttatacatatatcaacaaaaatatatacaatagtatttattaatgaattagaaattttaagtatacttaattacgtaccaagaataaatggctcgtatttattgtatttcctcgtagatagaacatctacaacgccaccatggtttcgccgagtgcctctcccaatctttggatcataccacttacacttaaaaagtgtgatccttaaattgacaatgccctcatactcgagctctatgatatcagttaaggtaccgtagaaatccaattcatcagatgaatcagcgtaattttcacctttaacacataccccatagttacatgtcttttgtccagcgccgtgattttgcgtatgaaacatatatcctcttgtgaaatacattggccaagttttgaccttgttcaaaggtccttgcacaatttcttgaacccaagtaggaaatagagaagtagtgttccaatatgttacctacataatagataaataatattaatacatataaatatgattctcacttttcgaatgcaagaaattgatgtagacttacatattctttaacccataaatgatattcttcagctcttctcgcgtagagttctttttcgggcaagcatggatatttcgcagaaagacaatcctcgaacatactatatttacaaacaaagaaaataaatcaaagtgatcttagtgaaaatttacaaacgaattaatagtgattaaaaatacctctcaaatggtttaaaatagtcacaatttcttaaaacatatgcatgtgcgctttggtagtctttctctgaaagccattctacatgcatttcaccacttggacgaccgacgtgcataaatatgttaggtactccaggaacatgatatacaggaactttactttcatcgaatctcgttaacctgatccaaatgaggtaattcatggttgttaatttgaaaacttgcttttgtaaagatgtttaattactatatatttaattaccttgattttgtttgtatattatcggcaaagtagtgctttgagaaagaagaaatctcgtcattgatatatgactcaacaattgatccagccgcatatcttttgctttttgcttttcctttaaactttttgaaaaacttctcaaaggatacatccacctatattggacaggaccgcccaattctgctttgttggggagatgtataggcaggtgctccataacatcaaaaaatgatggtggaaagatattttctaagttgcatatgatcaaaacaatgttaagcttaagaatttgaacgcgaattttctgcaaagttctcgaacataagtccctaaaaaatgcgccaacccctgcaaaaaaatataaattgcatcatcttaggttaatataaattgcatcatctcaaggtaatatatatatatatatatatatataatataaagagtaaattatatattcttattttacctgataccgcaaggtgaacattccgatctaggagtttggcaaagataaatggaagtagtcgctccataaaaacatagcagtcatgactcttcattcctgagaactttccattctccatatcaacacaactagccaaatctgacgactaaccatcagggaatttcaccgcatgtttcacacatctcaataaacttgatttggcttcttctgttaatgtatatgaagggaatggagctttacccttactatccacatgtaagcttggccgagaacaaacttgttctatatccaatcttgacattatgttgttttttgatttacccttcacactcatcagagtattcatgatgttgtccaaaatgttttctctgtatgcatcacatcaatattatgtcggagatttaggtccttccactaagaaagctcccataatatgctttctttgtgccaattatgttccttcccatagcctggcatcttcttttcatgaccgttacccccaacatctttggtttttggtggattaacaccatgcaaccgctcgtaaaatacttgctcaccggttaaagactcaggtggatactctttagaagcatcttttcccttctggaagtcttttttgttcctccgtaatggatgaccatgaggaagaaatcttcggtgacaatcaaaccagcatgtcttccttccattaggtagataaaaagagttagtactttccatgcaaattggacaagacagtttaccgtgtgtgctccatcctgataacatgctatacgccagaaagtcgcttatggtccacatcagcactgcttttagattaaaattatgattcattgacacatcgtatgcatcgattccaataaaccacaactcttttagctcctcaataagaggttggaggaagacatcgagactacctcgaggatgatttggcccagaattcaaaattgtaagaaacaagtattctgtattcatgcacataccagggggtaagttatatggagtgaggatcataggccataacgaatgattacgagacatgccaaatggattgaacccatcaatacacaatccgagataaacgttacggggttcttcggcaaacaggggatataacgattggaaatatctccactctgccgcatctgaaggatgattcatttctccctcctttgatttatgctcggcatgccatcgcatagccgcttccgtcttatggctctgataaattctcttcaatcggtaaccaataggtagataccacatacgactatatggtactttggttctttgtctttgaacgccataatccattggcttccatctttgtgcaccacagaaccgacattgatcttcctttttgtcttctttccagaaaagcatacaattgttttgacaaacatcaattgtatgatatggaaggcctaaattgcgcatcaatttctcggtctggtaatgcgaactagtggcttggtttccttctggtaaaaaatttatcaacatttgacaaaccgaatccacacacctttcactcatattatgatccgccttattttgcatgactcgagaagctaacgataattgtgactggccttcacgacaaccatcgtataatggagtgtttgcaccgtctaacaaatcataaaatttctgtgaatggttacgtaccggttcttcgacattcttataactaccatcctcattatagttttcatcaaaccccgcattataagcaaatgcatcattcaccatatccacatatggatcttctacagtattacccatatattcatgattctgatcgcttagataagttctatctacgtaattactcgttcctacatccatattgaattcttcccaatgcttataccatacataataatcaggcataaatctttgactaaataaatgactactaactcttctacccgagacgatatgtttttcatttttgcatacactacaaggacagtgaaatttacaccgattactttgaacgataggctggcttttagcaaagttcatgaattccttcacccctgtgatgtattctggtgtcagatttcccgtcattttgttttacctcttgtacatccactcccgataaaaaccgccattaccgccgctataattataattgcccaccattataaaaataatataaactaatttgatcttttctttcttttttctgattttttttttgtgtcttttgaaacgttttctttgatgttgttttcgagttcggtgtgaatgagaagaatgaattattttcattatatagccgttttaagagtgactaaatggcaactaagtaatgtagtcattacaataccggtatacctacccgaaacgaaaaaacgtgtattccaactactttttacgactatttagctactatataactcaccgatttagtcgtaacttaggcgccaagttaacgactacaggaatatgtcgtacacgtagtcgccaatttaacgactaactatcgactaatgtattggtaccgccgattagtcgccaaattgttgtaaatagacaaccacatgactgaccattttttttggtcgccaattagcgactatgtaacgactaaatttgtgttgccctttcgcagacgttaaataggcgccaaattgccgccgaggcttaccactattgctttagtagctatttgtagtcgcgattagcctgttttcttgtaatacgtgcacgtgcccatccccgtctcaacgcacacatatgttaggttttatgagacaaagctcacaagagagagtagacaatcacttgatgattgaatctccctttacccatacaaagggaactcgttctcaagaggaagagaccatgaacttgtgatggaatccccacaattaaccaccaatatatctgaatatactagagagtaaatcatttatatgaaggagaaagcatctagtttgagtctaatccttgtctagtacaactgatatggttcaaattacctagaagtactctctcaaataagagatcaattgcagtattttaggatcgattcccacaaagttcttttgttcacacaatgaattcaatgtcgagattaagttagcagggtaatgattgaaagaaaaagaaaacagaataaaaagacaggagattgattttgttgtaaccgatcaaataaagaggtaggaacaggatattctcgggaaactattggttagtagatctaatgaaagctaggttgttatcgaactattcttaaactcaaactctaattatggaataaccggtagtgttccgcgaaactccctatgcctatagctaagaataacaggagaagccgagagatctgtaaccgaaacatgcattctaaacgagttcaattgttcaccttagtagttaggccgattcttattacacacctataaaccaggctcatcaaataatagatccaactacagatacctatggtgggcatatctattgtgtggattcaaaatctagtcaattactctagatttagcattaagtataatcaatgatgaagaattctacagataacctaatagggggcgatctacttaactatatgaatccctaatgagaaaccatattcctaacaagcaaactacttagacatattgattaaagcaaacaacatatttgatatagaaagcataaacagagcaaattagacaagggaaagaagggatctcttcattgtattaagaactcaatgaatctctgaagaacaagggatgaatagcttatgtctctcacaatagggttttgcaaagaacttgataaaagacttaataaacgaaacttaggtctaaaaacaatatatatagaccctaaagacgtcgagagactaataatgcaaatagggaagtcttctggggcaaacttgagtttctggaaactcgaaagcgtctagggtttttgctgggctgaaactggtgtcgatcgacaccaagggatgtgtcggtcgatactacctttgcaacgtcaaattcgtcactctcatcatccttcatgaactcatatccactttccatcgaagcagcatgccaagaagtagtgaggctgctctcattccatctagggataggggctgtaagaacctttagttactttccagaatctattcaagcattgattcttcatgcgtttaggtgcaggtggagggggtacttggtaagaagcaagatcaaagttccttgtgaagctaaaactattgttattctgaagcggttgctggaactgagaattctgagagtagctagtttgaccattcccataggaacctttgtagccttgttggtgatcaaatctctgatttggaaaatctctgctacgaacataagcgacatcctccacaagttgattgtcgaccgcgttaagcttagccatgatcccagcaatcttactcttgttcatgttgctcgcttgttcct

SEQ ID NO: 35131 - DNA, 3379 bp, Arabidopsis thaliana landsberg
taaaagaatatgacttatgaccttaaaacacatgatttgtagatattgttaatgaggaaactgtgttttggggacataattatgaaactatgttaaccgaaagatgagcttacgctgaaggtaaacaggtatttaattcaggatcttataccttctccagatgctattagggatagagcatgggcaggggataagacaacctcatcttttataccttcaacatatgtgccctatcaacataaacacatcacactaataatactgaaacttaagatacaaatgaagcttggataaatgaaatgcgcaagccccacattaggatttgatcaggttttctgcgacataatccaccagttacctgagaatcctctcgtattcttagattttgccctgttggatctagtaagtcattgatgacctgtaagaataattcaaaagaccctcaaatcatgcaccaggtggttgtactaggaatcaatgagaaactgaaaaatctagttctgcttcagaacaaacagccaattgtctcttcgcagttcatgagtttacagttacatgtataattgaaatggaattccttcctgaaatcaattacttgagcatactcacagtcgtaggttggacacagaatcacatttgagggctaaatcctatagcattcttctaagcttctaagcaatatcaaattgatgccatggataccatgtccatggaaacttacaacagtttaaattacaagcaggccatgcaaataaacagagtaagagcctacctcattgtatatctctagatacgaaacacgaagaagaaattcccgttctggtgtctggatagctgaaacaaaattagctaaagaatagagtagaaaaatccttttaagaaaacagaactaaagagtaacctatcacctcctgaataatgctaaatacatcctttacagccaacggaattattccaggtgacctttgctccccctaaatgcaaaatacatcattagccaaggtctacaaggcacatgtgtcacaaaagtggatgtgcacaagagaaacactttgttggatatctttcttactttaacacctaataagagacataaagatatttttcagcctagtaacttacatgcattgtatgagtcttcccactgctagtaactccataagcaaacacagtacctgcacatgggcaaggaaaggatgcatttttcaagctaatgaatttaaaaagcacctaacttgaagccctaccaacatcaaattgtccaaacgcataagaaatcttctcttttagaaccagaagaacaactagttaagatgaaacataccattaatccctgacattgccccactaacaacttgttgagcagcaatgtcataaacacgccgagtagttgttggtggaccaaatactctatctgcaaaatacacttaatcaattcgaaacaaaagaaaataattcatctaaagagttcaacaatcttatgaattgtaaaatttgactaaccaaatccataacaaagagatggattatactcattcctaatagtatagtctccatctgcataccacgcaatctcatctccattattgacctctcgtggactattttcaaattcaccaaaaacatgtcaataaaccaaacaaaactgaagtaaaaaaaacaaaaaaaacggattttgctaatcaaattaacctaacctgagaggacgaaaccgaatcgtgactgtaatattctccttcagtttcgtggaagcaacagccgtactagaggcggcggcggaggaagtagacggactaggactagaacgtagtaatggactagaagaagtaaccggagaagcagaaaagtgagaggaagaaggagtttccggacgtttcatcggaatagtcgccggcgatctacgaggacgagccggcgagatcgtggatgatctctgtgacctagtagcagacattgttagaagatactagtgaagaggaaatggttccaagagacagttactgtaagagatggagccaaagagagagagagagggaagaagaagaagctcgttcgccgaaatcaatggaggtcacgtcattcatgtatcgattttttttttcccactccctccaaaaaaacacaccataatttgaaaatgacgaaaatagcctcagatattaaagtactgctatctaattggttacaaaacaattctgtaaatgaatttatttatttttactctctgcgctacatattattatcacatggacaaaatatttaaattatttgatgaactgacagaaagaattaaataattttgctgagctgccaaaaataataattttttgaaaacaaattgttggctctaagaaagaaaaaaaaaacattttttggtgatgtttatctcagggcaaggcaacattattttgtaattatgtgagtttaattgtaaataacgaaattaccctcacctaatcatcattatcaagggtataatcggaatgaaagcaaaacattatagattatagaaaaataaattgtatttttgtgtgtgatgaaattccttaagtcttatagttttcttattgtttgtgtttgcacaaatcgagcaacctatcatatttacatgattcatgttagtaaaacctcagttagattgttttgtagttttgtgaacaattgatgtgttgaccaatgaaaacaaattgctgaaacttgtgttctttttttgtggtcctttaggtacatcacacattctagctgttgtccctgaagcaatattgaggagcccattaccataaatatgattcttgattcaagattttgcgagcactctaaagattctcattcatgttttggttttgccctcataagtcataacaaaactaaatatttggtattattttgattacaatacttattaaaccgaagaagcaagaattaaacataatgaaaaggtccaaaaacacagagagattggtttataaaaattgacccatgcagctggtcaactttcaagaagaggaattataaagcttagaggagatcattgacagttgcaggtaattcctccattgtgatgtattaattaagaagactgacatggttcattctatcaccatggtgaactcgatttctgcgttttgaaaccttccgtgcgaacttagactctctactcactctaacaccatgtatcggactaccaccatcagcatgttggctcaaacccgagtcagaacgatggtctttcctcacaccaactctaacacgatggttcctcggtctcagagactttctaagacgttcttcttttctgcattctcgaaacgatctatggtacgtgaacgacccatcatcatcaacatcatcatcgtcatcactattatcatggtaatct

SEQ ID NO: 35132 - DNA, 3509 bp, Arabidopsis thaliana landsberg
  unsure (1)..(3509): unsure at all n locations
tttatacataaaacatagtcatgccatgccagaaaattgtctaaccctagctagttagttgtactgccgaagagcacattatagttatacaaatgtcagcatgaaaattaaaaagctagtttgaaactgctagttttgggataagcgtttttgcaagaatgttaacttcaactcaatatatataagtcaaatattaagacataaatagcagaaggcaaaggaaaacaccaacctcagttctggtacagtcagctggaggaagtccaactgttgatgccaatctgacaagcattccaaaatcacgaggtttctgaggagtagaagataaaagaaaaaaaaacgatgcttattatgatgtcctgatggagttgcaaaaacagatatcgaggagatagattaacaataatgaaaaaggtatttcgtcagttaggacgtagccaaaatcttatgatcttggttaccaagaaaaagaggacagtttacgacacagtgatatggtaccaagaattttggccagaagattcgaaaagaatatgcaacattatgtaaattataaggtcgttgccactgatcgagaactgaccttaccaaagtgtagatgatagtcctgaagtttatcatcacaccaagcactaactgaagttaaaatagccttcacaagacctaagtgtatgtcagttccaatggtttgccttgaacatactagatgacttaaataaagatcttccttcgggttgccactttcagcagaagtaactttctgcaactcctgaattgtgctccctagaagagaaggctcacctgtgcacacaaacttcccaggaaaggagcacatgtgatggctatcttaaactcgtgtctggataaattatgtatgcagcatacatgcatcggtacagtgaggatcatataacatttaagaaaactcaacatttagtactttaactattgcgtagcagcaaggggtaggacttaagcctggtttaccgtttatccaactgtgagtttagatgccctaaattttggcttccctaaacaagattactatttacattatatacatgtgtaggtgtgtgcgcgacttgagtatttatacctttgaatttaaacacgaaacagaccgatgttattgatgatatgttatttgtactcaatggtacatagagctctaagctatctttttgtgcacatccaaatagtgatcagttagatagagcagatttttgaagaataagtgataagacgtacctgttggaaaagaacccatccatatattgcactatgtagattctcagttatgcccaatgtcgaccaaattgatttcatatggaaaagcattgatgaggcatcctgacatgtatatgaagtcagggaaaaatatgcatgacataaatgataagaagaaaaacaaggactaagaaaatctacctctatgacttgaccctcatcaagagtatcaaatacaccaaataatagtttctcatagagtctaatgttcaaatggtagatagcagtccagtaataagtttcttcttcaataccacatcggcctggtagtgatgacaactttgaagccacctgccttatagacgatagaacctcaatacgtagtgaagcagatactacaacatcccattcctatgccagccaaaaatagttttagattcaagaaaaagtctgttaagtcatatcactagatgagaatttgctggctacgaaacatccagatcacaattatagtgcgcacctttgagtctctaatcgttgcaaggcattttctcatagttgctcgttcgtttttctccagactaggtgagaaacagaggacttcttctagtaggttagcctacattgacgatggaaaaaagcacataattcaatgactgtagcaataaagctgagcaaattttcgttgcctttcagatattttgaatatgcatgtcgacgtgtttatgtaaatgtccacaggaccgcagaatgctgtagaagtaaacaaaattcgcaatccatccgagatcacaagctacatgtgcgtaatgaagcaggttacgttttagcttaagctgtggaagaaaagctatgcctatgtgccaatcagtcatatctttttctcatccagacttgcataatattatcatatgatctacggcaaaccatgaaatccaagaaatggctcaaagaagtttcataaggacgacaagaaaaaatagcactgtagtttgttatcacctgtctagtctaccacttcatgtagagcttttcattaggaaaatctgatttgaatattccaaccaaaagccccaatgctaactgtggaagatcaatttgttcacctgtccttaatgttgccaactgtaccagatttctccgtatgcatgtatccatctttgatgaaatctataaagcagaaacagtaagattaacacaagtgatgcaaacgaagttaagttgaaatatcgaactgctaattatattggtaagtaaagaaaatgctagcttatacttatagtataactaatgattttgaagcttgcctgcatctgtacacggatcatgttgatgacctctgagtgtgtattagagatctgaggctgcagatgtggtttatcttttcttttcaaacttaacattagtctagagcttttttctatctttcttctatgagtaggatacgcctcaacactgtttgttaagaaactaagaaaatgagagacaccacacagatctatctggaaaaagactgcaaggctgcaccataggcaacacagaatagagatgtatgaaggagaaaagagagtgagtaccttgaaagcaacatagaagcaatcattaattcatatgctgcttctcgtaaatcatcatccgataacccttcaaaatccctaacatcatgtatcagttcactcgaaagatggtaaaccaaaaagatcaagattcgcgaaaacacatatagtaatctaggacagaaaattcaaaaaacaattgcctaactaaatacctgttctcaagggtggcaagccaagaggaatgattttgataggtttcacgggtttgatgtcaggtgtttcctctttaaatacatagttgtctctagctgaaggagtattagaagaatccatgtgacgcgacatgtctgcaccattgttactggatttttcaatgttaactggaggaggaggcatacgatgaggaggagaacctgctaaatccggactcgacacaagaaaataggaatctccagactcagagtgtatctgcaaatttaaagcatcaaaactaatcannnnnnggattattaatcatcatcaacaaaaggtattagtgtttgacatccacagcttaagccagatgaattgcaaatgttttacttccaatcgtcaccactctacttcacaccaataatacattttcatgaattgtataccaacagcttccagtgtttactataactatagttcccatcgaggtaagcaacaaaacaatcaagaaaagttatcactgtatgtctg

SEQ ID NO: 35133 - DNA, 1491 bp, Arabidopsis thaliana landsberg
ctgattggatgtccgcaactgaaacaaaaatttggattcaattcccgtcgatcaaagaaaactgaagaggtaggaagttttgataagaacctttgagcagtgattgcataaaagctcttccggttgtgagtctttagtcctttttagagattttaatggcattactgagccacaaccgtcgcatgtctttatgtcctcatgatatgaaccctacacaataattaaatcagcaaatcgtttaggggaaggtatttccagtaactataaaagagtcagatacaaacagtacatctacgcctatgtagtatgtttaaacttcatgacttagaacagaaagtatatcaccagacgtagacactacaagatgcttatagaactgtccagaattgatttacttttgtcttcccaaaacaattagaagagcaaacttgaacatctaaccaaaaaaaagaaaaggaatatgtgtcaagaaaacgtgcctgaaatctagaagcaggtccatagtcctggtcggattccgtcccagaggaatctggggagatgatttcagcatctccaaaattaccattttctgctaaaactgcttcctctagtgccttgttaaattcacttgccttgtaattgaacaagtttgtctgatcctgaaatctgaagagatgaaagactagtaaggaacaagaaacaaacacacaagtatgaaagatttccagaaagagcgtctcatgtacttacttgtccataaattccgtaaatggatacaccatcccttgtcttacccatgcatagtcctgttaatgaccacaagttttcagaaaaaaagatagtaaaaataaacgccagcttgaagacagattaggattaaagagattaccctctgagttccatccttggagtacccaaaaaacatgacacaaattgcgccagggacgcaatgtttcaagaccccatcaggcgcttgtgatatcggatcgatcaccacagccggccatgctgggaatcttttcccacacttggcccacacaagatcgccaaccgtaaattcctctggtttgtacacgcccttacgcgaggcgtcggactttttcggcataccaaagttagcatcgtcgtaggaaatttgaacatcccagtaatcgcaatctacttcactgctgtctccgttatccttacgtggaaacaccttcgagtctttgctgcgatgcaatttcgagcttccactgaaacctttgaccttcttccccagagatacgtcgtcgtcatcatgactagactccgtcgactctcccttgcgacggctagatttccatgtaccaacaatggagtccttgaacctagaaggaaccgctcgaactctgccacgcgaagacttggactggtcagagcaaacttgttgagattcttctttgcttgtcaaggagcttgagctactagtaaggaagttctgggttctttgctacatgggtggatccaccgggtgctctttggctcttc

SEQ ID NO: 35134 - DNA, 2420 bp, Arabidopsis thaliana landsberg
gcagcgtttttaattatcacacgcactgaaactaagggggagacagaatcacgaaaactaaattagtgttttttttaaataatcctcagcttcttataacaattgaaaactagcgttaaagacagatttttgctaacatctataaccaaaaaacttgcgttaaaggtctttacaatgggaacttcttatttcatggggaagtctcttattttgaaacctagacagcaaacgcacagtaccagaacaaacgttgttgagaacgtaagtcttcaaagaacattatacaacgttagaggagaacctgtggtgaccaacaactttgacttctttgtcttcataagagcttctatatctgagcacttctggttaaaaactatcatttcttgcatacgagtttcaccaatctgttcttccttcttcttttccttaacttcctccagcttcttctccaaccaatcaaccttaaagccagaaaacttcaggtattggaacgcattgtctcctcccacaagatcatcattggagagctcttccagtgacttgcacagtgtctcaataagacttacgaggacatacatgcatgctgggctcaaatggtgcttctttgcttgcaatatggatgcaatttctgggtatgtttcaaaaacacggcttacaaatttcacctgcaaatacaaaaggatgaacaaacttaaaatcccacacatatacatgtcagaaacaaatgataaagtcttataaattataatgcttaaatctctaaaaaggttgcatctttatttacctgggaaggaagaacatgaaacacattgacatcaaagctttcaccatcatcatttagccttatccttttagaggttgagattcctcagaaacatctaatttgccaataacctgaagaacatctacctctgcaataatcttgacttcattgttcacaagaaatccaccttctttggcattaagttcggaaaggagtagcatttcttctaacccatgacaagagagtttttcctcgaacaacaattttgacttcattgtttactctctacgtggtaaaatgtttctttttaacagattcatcaaagttaagcttttaattagctaacataagtactgacatttgataaagacaccttgtagcttaacctttgctgacaataaattgccaccccactcccccgcatagctcctctccgtaaatttgatgagccatccaaatttctctagcctgatccacaacaaaacgcagacgatctcgacaacggccattctctccaaacacgttcccacatcgccatttccaggcccaccaaaccactatcgcaaacaacgtggcccaaggacagcctcgtatctccgtaacatcactcggattttgataaacccagtccaagatgttgctggcaaagaaagctgtgatcttaccccgaggaacaaggcgaccccagattccggctattaaaggacaatctcggagcacatgaagaatcgtctcatccccacccttacaaacctgacaaacgcccgacgctgataaatgtcgccttcttcgttccacatccgtcataataacttgatggacgactaaccaaatgaacactcgcacccgttctgttgtagttactcgccatacccgatcaaaaaactgcctcatattctgtgcttgagtcccactttgtaacaagaacgaataagctgatttcactgtgaactgaccatttgcggttgctccccaacttgttctatcattagaacctgtaaccgtatccaccaccattgacagcaagcgtaaacgcacaccctcggagacataaagtgttattttcgcaaggtcccagccggaaccctcgtgccaaagctctcttattttaatcccctgaaagtccgctggaagctccacgactgctagatcacgtatcgggtcctccaccaaccacttatcatcccataaacaaatgtctttaccatcaccaacaacccaattcatacctgggatcaccacctcacgcagcccagatttgatactccgccatgtggaagaggcatttcgcttagtattcatccaagtagtatcccgcaagcccccaattctgtatttgctgcgtagaacccgagcccaaaggctagtcctatccttcattagtctccagcccactttcgaaagcagcgctaaattcattggtcgagcagagcgaattcccagtcccccctccgctttgggtaagcaaacccgatcccacgctataaggtgtaactttctcttctctagagtgctccccataagaaggatcttgacaactgatccaacttagctaaggtggacttaggtaaggcaatagtagtcatcgtatgaaccggtaatgacgccagcactgctttcgtcagagtcaatctccctgccaagctcaagaaacgac

SEQ ID NO: 35135 - DNA, 3744 bp, Arabidopsis thaliana landsberg
  unsure (1)..(3744): unsure at all n locations
ccctcgttggtaccaactcattctccgaagttcagggtccgaaatcttacgcaaacgttgttagcagtcgcctcannnnnnnnnnnnnnnnnnnnngatgtttcagtagtagatgggaaatctatggttgtggttccagatgtggtgcttgaggattcagttccgctatgggatgatttcctagtcggtcgttttccaagctctgccccccatattgccaagatccatgttattgttaacaaaatatggaacttaggtgataaatcaattcggatcgatgtttttgcggttaatgataacacagtcaagttcagaatcaggaatgcatctgctagattaagggctctccgtagaggtatgtggaacatttgtgatctccctatgatcgtctcgaaatggacaccgatcgtagaagatgctcagccggaaattaaatctatgccaatgtgggtggtcataaaaaatgttccctactcaatgttcacatggcctggacttggttttcttgctagtcctgtgggggaaccgcaaagattacatcaagaaacaaagtaagtaacaagcttcgaggaagcaaaaatttttgttgatgtggatttatcaaaaccgctaccaaaaacctattttttcaacattaagggagaagagttctgtgtcgagtttgaatatccatggttgcctccaaggtgtggtgtctgtgggaagtggggtcaccctgaaaatggttgtttggctagcttgggtacaacaaaggtttttacgggtcctctgttttgctcagaacaggtaattgttaaatcaacatcggcccaagtgtttctctaccggttgcagtggcggtgggtaatgaccttgtggagtctgtaccgttggttgattctcaagctttggaggtagtaaagggagatattgcagaagaagttgaggagggagaaatagcttcaaattcaaaccaaaagtcagttcagggggaaaaaatacaagaggaaggggattggttaacagtctctagttcaggggggaaaaagtacatatcaaaagtcaggaaggactttaacctatggtcaagtttgtatcgcttcaccctcacgttatgctattcttagcaatattgaggatgattcagttcttgaggaagtgcaaaacgaagactcggtggggaaggaaacagaagactcagttaagggggttttagaagtagtagtagtggagggaaaagaggaaatggctctcaataaaactcaacaggtgaagtcttgttttgatggagcttcaactcgagtttccatccccagatcatctaagaaggctcataaatttgtctcagtccccaatcaaaaggccacggacgttctcccaagacaagtcagcaagaagaataataaacgctttccttaatgtctggttttttctggaacatacgggggtttaataagcataataaacagaaggttgttcgagaatggattaaaaaaacttctttgcagtttgggtgtgttctagaaacaagagttattgaaagtaaagttccggtaatttttgcgaaggtgtttaaggattggcaaatggtttcaaactatgagttcaatcggttagggagaatatgggttgtgtggagttccagtgttcaattgcaggttatttttaaaagtagtcaaatgatagtgtgtttggtgcgggtggagcattatgatgttgagttcatatgctctttcatctatgcctcaaattttgtggaggagaggaagaagctttggcaggatcttcataatctccaaaattcagtggcttttcgaaataagccatggctcttgtttggtgattttaatgaaactcttaagatggaagagcattcaagctatgcagtatcgcctatggttacgccgggtatgagagactttcagattgtggtgagatattgttctttggaggatatgagaacccatggtccgttgttcacatggggaaataagcgaaatgaaggactgatctgcaaaaaattagatagagtgcttttgaatccagaatacaatagtgcctaccctcattcctattgtatcatggactctggtggttgctcagaccatcttcggggtagatttcatctcagatctgcaattcagaagcctaaaggtccttttaagttcactaatgttattgctgctcacccagagtttatgccaaaagttgaagatttctggaagaatacaacagaactctttccctctacatccactctctttcggttctctaagaaactgaaggaacttaagcccatactcaaggacttaagccgtaataatctatcagacttgacacgtagagctacttacgcctatgaggagctttgtagatgccaaaccaaatctctaactactctaaatcctcatgatattgtggatgaatctttggcttttgaaagatgggaaaaggtggcttgactagaagaagagtttttgcgtcagagatctaaattgcattggctacaagttggagataatatactaaggcattctacaatgtgttaaaggagagacacttgttaaatgccattcatgaggtaatggatccgcaaggtactagacctccaaatcaagatgacattaagattgaggcagtccgtttcttctcagatttactatcctctcaaccaagtgattttacagggatctctgtggacgaactaaagggtatattacagtatcgatattccttgcatgaacaaaatcttctagttgctgagatcactgaagcagaagttatgaaagtttttttctctataccgttgaataaatctcctggtccggatgggtacacagttgagtttttcagagaaacttggtcagttattggtcaagaagtcacaatggcgattaaatctttctttacctatggattcttaccgaaaggtttaaactctacgattttagctcttatccccaagagaacatatgcaaaagagatgaaagactacagacctatttcgtgttgcaatgtcttatataaagccatatctaaattgttagcaaacaggctgaaatgtcttcttccagagtttattgctcccaatcagtctgcatttatcagtgacagattgttgatggagaatcttctgctagcttcagagcttgtaaaagattatcacaaagatggtttgtcaccccgttgtgctatgaagatcgacctttccaaagcttttgactcagttcaatggccgtttttgttgaatacacttgcggctctagacattccggaaaagttcatacattggataaatctttgtatttccactgcttccttctcagttcaagtaaatggtgagttagcgggttattttcaaagtaaatgagggctacggcaagggtgttctctgtcannnnnnnnnnnnnnnnnnnnnnnnaatgtgttatcggcgatgcttgataaaggagcagtagaaaagagattcggctaccaccctagatgcagaaatatgggactcactcacttatgctttgctgacgacatcatggttttctctgctggctcggctcattctttagaaggagttttggccattttcaaagattttgcagctttctcggggttgaacattagtttggagaaatcaactctttttatggctagtatttcttctgaaacttgtgcttcaatattggctagattcccttttaattcaggctctttacctgttcgctatttgggacttcctctcatgactaaaagaatgactctagcagattg

SEQ ID NO: 35136 - DNA, 1572 bp, Arabidopsis thaliana landsberg
tgtacttcccttttaataataaggagacaagtagtttaataatgagatagacggactttagctttgattttgaggttaatttaggatttgtgtaagagacaaacttcagttaaaaagacgaagagaatgtcatatatgcaatccaaacattcataagtaaagttgacaaacctagaaaaaaacgcaagagatgattaaaatttgacagaattcaaaagacaacatgttaatgttactagagtttccgtggtcgcctgagatgtgttatacgccgaagcacctccaagatctcgtgctctgtttcctctaacaccaaatattcaatctttgaaggggcatatgtaaattccaattccccttgggatagatggcatttccggactggcggtgttaacgttcgtgtcccctctacttgctgattgctacgtgttacctgtaaggcaagtagaatcacgagtaatctagtattactcagtgagttgggactatgaattaaaattctaaagcaacgcaagcaagataatgaggttaacaatcgcaaagggattttcagtgaacacgaagcacgcaaaagaaatgaataagccttagtgaacgagaatactatcggcaaacaaatagacacttcttctatgggctatgtgctctgtttctcctcacacaccgtcgcaagttggatctgatagggacttgtcaactgccgaccaacccatcttattgaatccacaaagaaaaccaataagaactatgcatcgtcatgcattcccggcctatgttccgggccataccttagcatgactgaccactcatgatcaaagctcataggcatccaccacagaacggaacaacaacacactattctacacacgcctaaaatactcggattccgcatgcaagggatcctacaaaacaaccaagcacatcccagtccaatatgaactcggtgatggcaacaaacatcaagcaacatagaagtcgaaatcaagcaaagacaaacaatcggaactcaagaaataacatacttcaactacatgcatctaattcattgtttaagttagccggattttcaaagatttattctaattctttattagtttaccaacgcgatcgccaaactcggataaacctattatcgagttggctcacacacgaagtgccggattttagcgaaaaactcaaagaaataagctaagtgacgatttctaaactgaaatatgcaagcgattatactaggtgatgaactaggcgtttaggtcatagcttatcatgcatgcaaccagatttcaagtgtaaatctagaatgcataggaagcaaacaatgtagtcactacgactcacaagaacggattctcggaggggttttcttggtcggagttacgacggtttgggctagactcttggtcgcttctcgtggtctcagcctcgtcttagttctctccgccttctttctctctagctctctctgtttctttctaatttctctattctccttccaaaaactcgcggaataatgagggcaagcattttatagcgcaaattggcacgtcagcttagcaatgaaagggtgtgtac

SEQ ID NO: 35137 - DNA, 4139 bp, Arabidopsis thaliana landsberg
  unsure (1)..(4139): unsure at all n locations
caattcctaggatcttacttgcagcacctagatccttcatttcaaattcctcactaagtgtcttctttaacttgttaacctctgacatatcttttgcagcaatcaacatatcatccacataaagtaacagatacacatgattttctgcaccaatcagcttgacatagacacacggatcatgaacacttctaacaaatcgttcctcagacatgaatctatcaaatttcttattccattgacgaggtgcttgtttaacccgtatagagcactacaagaatatggagcatttgtagcgcccgaaaaacactatttaattatactatagcgttattagaagcgctttatcatcgtccgtcataataggtcggagacatattgtagcacttttttgttctgcaatcattatttcattaattacagcgctttatctgctgcaatatttaattgtttaatagcgattagtttatgatattaataactattatacatagcatatttaatttgctacatataattagacaatagcatttagttaattgcaatatttatatattatggcatttttaattatacaatatttcttcaattaattccagttcataaattaatttttaatcccaaattcagaaagaaattcatattatttagatatcataaattcaaaatttagaaagaaattcatattatataaaattcaagattccaaattacattttaatgtcaaagtacttaacaaaaaaaactacataatgtttacacaaacatgattttatcagtaggccaagccacaatactacctactgcatcgacaattgtttgaatttcagagtttggtctccacacagcagcatctccaatctttgaaacttctacacataccttgctcgcatttggacctaggggcatatgatggactgtgtctgaagggttagaggtacatactcttccttctgctactctttctctcccgttcttgtaatctaacatgatgcatttcttcttcgcagatttgctggtgctagcagtactgttactcaagctctacatgaatcaaaataataccaagttaaggtgcagaaagtgcagaccgtgcaaacaataccaagttaaagtgcaatattaaagcgatggtctttcatatgcatgtaagttaaagtgcagaaagttaccaatggaggtgatggtcttctatttgctgatgctgtttcatcctgtataggagatatattcacatgttgtatactatgaagtggccacgcaatgttctcatgtagtacatctcccattacaaactttcctggacttggtctccacaaatacgctgctttgtttaacaccttctcaaccttaacaattgcagcagaaggaccaagaggcatattgttcacaagttcgtgtctgtctattgaacaaaatcgaccctcaccaacaacagaatcagccatattccaatcaattatcttgatcttaactggtgttgcatctttagcctaaagaatggtgcataaataataagtgagcagtgagtgatcttactagataattgacaagtgacatgggaagaagattaccgaagatcctgcagtctgattctcagaaggggaatttacatcactgtccaagatgatcttatcaaaaggccaagcaatcttgttccccaaagcttcaccaagtgtgtaaacagatggtgtaggcctccacaaagaaatttcataaactcaagttcactatcaattcaagttctatgttattactcaagttcaaatctcaaaatcaatactcaagttcaaaatcgaaacaagtgaatggtctcaagttcaattctataagaaacacaaatcgatacaagtgaatactcaagttcaaagctatatgacattcaaaatcgatacaagctaagtgaatactcaagttcagttctattagaaactcaaatcaatacaagtgaatcctcaagttcaagtgaatactcaaatcgatatatgcaaactaagaactacagaaatcgattcaaactaagtcaaaataacatacctgtcaaatagagacacggtagttaccactgaaatcttcgagacacggctaccaaaagcttctgagaacctgaaagcgaaaccctaaaactgttaaaaccccaaatcgatgctcaaacaagtttaatgggacatgcaaaccctaaatcgattagaaaaggcacataaccttctcaaattagaaacagatctgtgactgagaggctgaggagtagcgagcgtcttcgagagagattgaacagagtcggtgagcaagaacacgaacacaaagagagacagagagaagaagaatcgattagagcagaagacagagagaagaagaatagggaagaacaagaataggaagagaaagagtcgagaaatgtttttcagtacttagaattattttgaggtcaattatttgtttcggcgggcaacaaaaattaatccgcgctattacattaggtagcgtttaattaatggtaatgctatagaagaataaccctaaatccaaaaacatggcccgcgtcattttttatttcccggttatgagattatagcgttttgaaattaccaaacgttataacgttttagctggttagtaaattatagcagaacacggttagctgctacaatataatgttataaatgctcaatattcttctagtgattttaatattaataaggaggtcttgtataaactgattgtttcctggaagtgttattgcatcgccaaaaacagttggcggaagtccagcccagtcatgtattggaacatcaattactctgttcttgctgttagaatcgtttggctcttgagtctatgacagtttcttttgtcggaaatgttgtgaaaaataaaaatactatgacttactggagtttcaaaatataaccaaaaaaaacgaaaatatattataagaagtctgaaaaaagtaaaaatttgtttttagcaaaacattaagacgtgttaattgtcaagagaagaccgatgcatatatcatagtctagaaaagacagcttataataaaaatcgaatggaactgtctntttcaagtgtgtcgggtaacaatcataaattcgaccacgattacggataccactaataattatggtcacatgcagatgcaaatggattggtcaaaaacgtcaactttgacttcgcagctctcaagtaatcttttccccactactaatagctctcttctctcaatcaacacaacacaattcaccaccatgaactcttcctttactctcttcatctttaccttcgtcatcttcctccaatgtctaaatcccaccggagctgccacgtgtcatcctgatgatgaagcgggtcttctagctttcaaagcgggtataacccgagatccttcgggtattctcagttcttggaagaaaggtaccgcttgttgttcttggaacggtgtcacttgtctcaccactgaccgtgtctctgcactctctgtcgctggacaagccgatgttgctggaagcttcctctccggcactctctcgccgtcgttggctaaactcaagcaccttgatgggatttacttcaccgatctcaagaacatcactggttcttttcctcaattccttttccaattaccaaatcttaagtacgtatacattgagaataaccgtctctctggtcctcttccggctaacatcggtgcgctaagccagcttgaagcgttcagcctcgagggaaaccggttcaccggtccgatcccgagctcgatatctaatttgactcggttaactcaactcaaactcggcaataatcttctaaccggaactataccgttaggggtcgctaatctcaagctcatgtcgtatctcaaccttggaggtaaccgtctcactggaaccattccagatattttcaaatccatgccagagctccgatctttaactctctcccgcaacggattctccgggaatcttcctccgtccattgcatcactcgcaccgattcttaggttcctcgagttaggccataacaaactctccgggacgattccaaactttttatcaaacttcaaggcgctccacacattggatctctccaagaatcggttctcgggtgtcataccgaagagtttcggtgatcatctagagttg

SEQ ID NO: 35138 - DNA, 3718 bp, Arabidopsis thaliana landsberg
gcgcgtgcacacttccaaaaaaccttatgcaaaggtcccatctgcttgtatcttttctgcaagtttgcaaaaatgtgtctagcacacattctatgctctgcgtaaggtaggacgttttttattgcatatatcagtcccttttgctgatccgaagataatgcaagaccattaccaagctccaaacgtaagtcttctcctaataacttcataaaccactgccaatagaccttgttctccactggtacaatagcccatgcgatgatatacattgcatcattaggatcccttcccacagcagtcaacaattgtcctttcatgcgtccctttagaaatgttccacccaaatgaattacacgtcgacatgctgtcttccaacccgttttgagcttcgaagcaagtatagaatttctcaaaaattctatcttttgtacctaaaataactgttgaacctggattagtctttctcagctcttcaacataatcatacattctcgtaaactgctcagcatactcatcactaatgatgtgttttataatctgccttgcactctgacatttagtttttgtgactcgaagaccatttagatacaacctctgcattatttggccagctgacaagttcgaattagtcctaaactcatttataaaatcagcagctatctttggtgcactatagagatccacaacacctataggataacaactgtgaattcctttgtaagattgaacaaccatttcgtctgaacgacttgttattgatgcatatattctccacttgcaacaatcctgaacacacactccttctattttatttctttcggatctcttaaaatgtatattcaccttctctctaacagcatacttctcaatcgtatcctttctttctttttttttttttttgttttgaatactaggaggttctgggccgaagcccgtaattccaccagacccgaaaccacaacatgtaatattagtttcgtcccaaacgtcacttgaaccggcgacctctaagctttgtctaagatctttaccaattgaactaacgacacttgatatttgtatcctttcacctctctttagaaacaaactcttgccctacataaaaatctattctagcaccatcatcatctgagtcatcactctcgacataatcatcacggtagaaatcaagttgctcactctcaggttcctcttcttcctccctttctccaataagaacaccatctagataaggatcatttgccctaacaacatataaattcttgctttccaactcatatgtacacgtaataatttcggcaacatcactatcaccacacaaatccttacgattttgacctacttttctagatgggaagtaagaaaacttactcatattttctgtataaccaacactcaaaaccatatttgtcaacattgctaaactcggatcttcgaaaatcaagctgtaaacatcttgtctcaccgccatggtatgaaccatctgctgcccaatatcctccgacatgcaatcgaaagaaaagcgtcctgacaaatacaattatcaaaaactctctaaaaatctgatcaatctcctaagtttttaatattgtatcatgtaatgcaaggaataagatatacgtctcaaaaccaatttaaaaaattgaaagaacaagaatattttccaacaaaattcaaaagatataagaagtgggcacgagtatacatgtagcatctctaagcatgaacgccatcacataaactcaaagacgtggctctatagtgcaccaaagaaattaactccccaaggtgagtttaaaagtcagagtatggatcgaagcaaaaaaagaagtttttagagtatgtgaaaaggaaaactaaaaccaataagaatgtcttgtaacagttaccttaacatcttgcaagctccagccgcattcagtttacaaaatttcgcgattcaatgtcgtcgatttaagagttaaagtggatttaggggtttataataaggtataagaacttcgtggtgttttttttgtttatttcgtgttgttttaagcaaaaaaacatgtcattttttatatttaaaacacatcattttattttgacggtactgtagacggcgggtggttttcacaaataattttaaacttcaagtattttttcattaaataaataattgaggggttttttcacaatatatctttagttggggggtttaattactaaattttgaggcccgaatcgatggttttagttgctttccttctataccagtcatgcggccttgcatacaagtgcagaactgcagattgcaaaaatcttatcttatttccacgtgtatcgtttgattaagcagttggattataatcttacggttttaaaagttggggcgtaatcctaatgagaatcaggattgaagcacttggagaaccttatcatgatgattagggtaaagaaggtgactccttataagtagagagtgaaacaccttgactatccagagcaaaaaaacactagttaagagattcaggttaccttcaagttacaaattgagacaatcttgttctttgtttgttagattaccttctattcttgattgtgttttccgaagattttttagaaccaatccacttgtttttcctaatacaggggtggtgttttcgtggtggtaaaaggataaaatttcttgagaatgcctgcatacatttctgaggtttggtttgtaattatttgcaaaatcaaacggcaataaactgtttttcattgtttttgttattatatatgctcaaattaaatgcagagattttggttgctgaaactcattgacatttcaacgatttttttggattcttgtactatatgtttttctattggataaacagtaaaaccatctcgctttagattctagtataattcattctttgacgaatactcttatttagattctagttgttagagacattgacatgtgactccatggctttatacatcaataaaataatccagttgttatgaaataatccaattatttaatgatcttcatgttaggatatatgttaaggtgtaatagtttaatggaaagcttgtgtaacttacgatgcaggagaagttgttcttcaacaagaaacctttcggatccaaaatctcagacaacaacgaaattgaaaaacttgatcaagagaatttggttgtgacaagacaagaagttaatgatgattccaaagtggcaccgagagatgtagtagctacatcaacaagtgtctctaaggaggctttaaccttgggagatattttatcattggaggattcccaaagcccacccaacaaaaacaacactaatggacctgaagaaaacatggtccatcataacccacatctggagataacagaggaatcagaagcagacaactcttgtgatgacaacaatctcttgaaaaggaatctcccaaatggtttcggggaaataagtttctgtgaagcaaagtcgagtttagattatattacttactgtggaccactctcaggctccgaaaacctctctattcgttctgatggaaccagcgcaagctcttttgctctcccaatgtaatactcatgcatacactcacatacattttgtgatctgcaaattctgtataccttaattctgtaattgtttttgttacagacagcaaacggagtggaacagcagtccagtaagaatggggaaagctgaggagacgcaacttaaaatggt

SEQ ID NO: 35139 - DNA, 7170 bp, Arabidopsis thaliana landsberg
aaatatcaatctaacaatctttattccgagttctattcctacacggtaagggacacatttccatgagtacactagaatttagagtagagtaaattagagaatagagaactttggtgaaaatataccaaaattttagtatcttgaagtataatcctatttaccaaaattttggaaagcagtctttttagtaatataaattacgtagatatctaaagaaaatcataaagaagagaaaaaagagagagtcgtattctctacgagtgtttgaattgcaagtaataagagtctactactaggctttctcaacagtaataggtctagaaggatgcttatttcatcgagtttatgaattctgaattttgtgatcattgacaatacatatacatctcatttttacaagatctcatgatcaagctcgcagacagattcttaaatacacctacttaatttacgatatgcatttacaaccaattgataactagcaagtatagcatgagcttgcaaacgtgattgatgattagaataaaacaaaattaataaaaaaaaaatactatgtcaagaatcctaatggacttgaatgtacgaatggaaagtttaaatcctttttcatatattcaggtaaacattgatgaagttttggtaatttatgcatattaaaaattggttaacccggttgtagatggtgcaccgggttaaaccgacccgagaaaaattcgggtcaacacaaaccaggggacagagacacgagaaagaagaagatagtaggtagaagaaaacgagaggcaagggtcaggcataatatgctctctcactagcctaagaatttgtagaagcaaaaaccatggattagggtttttcagtttcctctttcaatcgattaacccacagaacaaagtatctcttaccttcgggtttagatattctcttcgtctccgtctatatatcatttctcaaagtcgacttacgaatttgactcaggagatatttcgtttgtgattttgttaaggctagcttcaattctattcagattaatcaatggattctcagatgctcgtggcgcttggactatcccttgttgggggattaagtacctctttaggttggtcaatgttagcttccttctacttaaaaaaaaaaattctgtattttgcaagtgttgctgaattttagatgtggcagataagtgtatgatcttagaatcatgattcattgttgttcgattgttttaaatgatgattgatggttcttttgatgatccacaacactctgcctttgttttactatctttggtgaattgttttcgttcaagaaattgtcaaaaagctacttgtaggatcagcaattgcttgggttaatgataagatttgtgcaatgcttgagtgttcaatacattgctagtttcgagatatgaagcttcaagttagattgttttcttcaatttaattaagtttcatgttactttttcgtaggtgcgctttttgtaattcttagtgagactcccaatatgaagatgcttggacttctacaggtgacgatgctacgtctagttttccaatattggtcaatttctggtacaacagggttcccgtaattgtagtcttgtagaagccattggtggattttcattgctacattctctttttaatattgcatcaatgctatattctcttgtcgtcaagttttgtagggtgcaagtgacgagaatttgtgttcttgctccaacattcttttgtactgaaccttttcacttgggaaaatttgatccatcttgtaagtttgtttaactgatattttcactcctttttacagggttttgcttcaggtcttattttgaggcatatcgttcttggatttggctcataatgctataaactttattgggttcttaaaagccaacctctgggttagtacttctgtccatcttggtacttcagtggtttttgttattcaaataatatgtttatttatttcacactgaaagtaatatagttttctagtgatgcagtttttcggtggtgtgatattctttgcgtgtattaccaaattcatacccgaaccaacacttggtccttctactgacggcaaaagaagaaaggcaagagtgttttttttttctttttttacgaattgttatcaaaggctttctggttctgtagcatcatgtaactttggcatattgttgataacagaaaaatggagacgagggaggtaaagacatgatgaagaagcatcgcaagcaagtcttatatagtggacttataacagctataggtatactaactttcactaccatccctttcttttattaatcatctgttgtccgagacttgggtgcatattttaatctgtaatttgttggctagatgtttcgacaatgactcctacaaaccattacatccaatgtacttgaactttattcgtttgcacaaacgtctggtgttgacttgcaactttaaactctttatatttagctaactagtcaatatattacacaacaataagattatatgtgtgaaagacctaatgatctgtgtgtttgttcaactgggaagtttcatgttttttggaattatataaaattttctttgattttgatgttaatgttatagcttaaatacaaaataaatgtttttctaaactcttcatgtatttcttatcattttggctttgaactataggcataagcttgcacaattttccagaagggatggctgtatttctcggatcaataaaggtgaggattaaaaaacatgaaaaacagaaaatttcagggagcatgcatgcattctaacaatatatctctatactatttgataacctgtgtcatctacgtattaatatcaatatttgcttgttggattctacttcacagggcatgcgagttggtgttaatctggctttggccatcgctttacacaacattcccgaggtagaaattctgtaaccattataaaagatacctagaaagaataacatgtcttatttttcttgcgtgtttcctgtttgactgtctattttccactataaactaatattaaagaggattaaacacctagattgttcatatttctgatttgacatgcttctcttgctgctccggtgtgatattttcagggtgttgcagttgcacttcctatttattttgcaacagagaggtaagaacatgattgcatgtggatttacatttatttctctatccaccttgtatattaggataggatttatgcagttcattatactccgtggttgtattcattccaaatcaattttatgcatgtaacagcaaatggcaggcatttaagttggcaacactctctggtttagctgagcctctaggtgtaattatcgtgggtaagttgcattggttttctttgctcaagttgcttcttatatacgagtccctgttctcttaagagttctaaaaagagtattataaattctgctttgatccatcttccttacgatgcagcctatctattcccgagaagcttaagtccagaaatccttgaaggtttgttgggagcaggtaagtaggaattctgcagcatttctatactttaaactaaaatcattggatggaaaacgaattgatgcaaaactgttgtttgtatgatgcagttggtggaatcatggctttcctaacattgcacgaaatgcttcctttggcatttgattatgcgggacagaaacaagctgtgaaagctgtgttttttggcatggcatgtatgtctgcgaggtaaaaatgcaaacctgagaacccatattcataaatctacttgctgtaaaacataattgaggccttgaaatagtacttgcatcctaggattcaacctagtagttagaaattattggtttaccttaaccattcatcaacataatagacgagaaaattgtagtggtgaaaatgtatctaatccgtggcgtagattatgatgtgtttgtctatgttttttctttctcttttttgcagtctttactttctggagctgagtttgcctgagacaatgagcttgtaagtttaatgatgtcatgtgcaataattgcctcccccaaagagataaatcagtctctggagtgaagtagtctctttgtatctgtaaagactgaaatctgtaaacaatctgactattcattttaattcaaaaggaataatctctttagtaaactagagttttcacataatttataacaaatgtcactctaaatctatatttttttcaaataataatattgggcaaatactacacaaagtgcttatttgtttctcatcacaatttagtctttttcttttagaagaccatgtgatctgtggaccaaaaatccttttgccaaaaacaaaaagattctttctattttattctgagaccaattcaaacttatcagaaaaattacagctctagtttattattgccatgaatttattcctaaatttagtaaaaaaaaaaagaaaattctttgaattctcctgttttgcatatcaatggcagagcttgaaactctctctacattttattatagtatatattccttccccaccttcaccttcaaatgcatcacaacaaaaaatacaaaacaacaaccaaaaaacaaaaaaccaaaaaaaaaaacaaaaaacaaaaaaaacacaagaaataatggagatgaagaacatctttgtggccctctttatctcggccgtgttagtgagctcagtctccgcggctacaatggagtctccagcaccatcaccaggtgcttcctctgcctccaccgtagcttttccggtggttggctccattgttgctgcatcactctccgccttcttggctcttctcttgcagtagaaagacaagagtcctcaaaatatgaggagatatataacaaaactctttttttgttctgattttgttccttagaatctatgatgacaaataacccattttgatgtataatttcattgtgtaagttattacactaatacatatgagtatatgataataataacactattttatcagatctaatgatatctgatcaaaaacttcattgctttaattctttcatacacaaaatggttacatgaaaacttgtggttaatgtttcttttaaagattggtttcatcatcgttttgctttctctttacattcatgagactctttgtaagccaaatagcggtttctcttgatgaaactgtttcatctccaaaaggtttcaaaactccttcaagctcatcaaacttctcttgcctaagtaaacctgcacaaagctccaacaaagattccaatgcctctgccctctcctcgcttttcgggcttttcttttgaaactcgcgtagcagtgttaatgtgctaatcactgacatctcttggctctttgctggtctctccttgtcttttgaactagagctcgtatccttatttctcttctctgtttcctctccttcttgattatgtttaatgggtgtttttgcggatttggtcttcggggggatacctgttctgttttcgttgttgttgtgttctgatttggacacaaccggtttgaaaactggggacagattttggcattgtgcaagatatggctgtaagtgaggatgtcttagcaattctgcagcctatatagagacattttccattcaagaaagttagaagaaattgcggaagtaaagtagaaaaagaagaagaaactaatggaactcatcaactcacagttggtctatgttcagggttcttgcgcaacatacttttgatcagtctttttctgcaaaacatattagaaattcataacattaagtcagtaacactcaaaagcttgttttctgcactaaactaattgtatttgtatacttacaatgaagaggaatacatgactgggagaggagaaagcgaagagcggttaatcttgttgatgagtgctgccatgtcctgtttacaagcaagatagtttcagaatctcgaaaagaatttcgggtttaacaagtcgaaaatggaaaaacttcttacaggagccttgaaggccggttgatgagcagctacttcaaacatacaacaacctgtagagccaatatctttatgagaaaccaagaacaagaattttaagaaatcacaagataggattgtaagttaaacctaaagaccaaatatcagatttgtagccataaggtatatctgcaagaagttcagggcacatgtagtttggtgttcctaccatctacaaaaaaaaacaaaaaaatgtttcagaaatacttcgacgaaaagctataaatcccaatggaatatgagcattaccgaggaagcaagatcatctttgcctagaagttttgctaggccaaagtcacctgataaaagagccaatcttaagacaatggttctagaaaagcttcttaagaggtaactaagagaggattttgcataggatttctttacctaaccgaacctcgttctctttagtgaggaatatgttggagcactggaaaatttggttagcagtgtgaatggatgtgttgttccattgaagcaaaagaagcataaagactaatagaagttgttaccttaaggtcacggtgaagaactcgattgttatggaggtaatctatagccaacagtagctgcaccatccatctacagagtttctacagagaacgacgaagatcattattagttagattcaatatcagtctatcatttagaccaaaaagattccttagtgattgctaacttcttcggacgcgaatactcctcttgatttctttatcatttgagtcctgcatttaccatgatcacttaggaaaaccatcaccaaagaataatcaagaaacatacaattgaaatatgaaatgatttgacttacatgtctccaccctcacaataactagttacaatgcatacacaatcctgcataaacaaaatcccaaaatagtttagaatttcctgcgccgctagataacgagctttgaacaagaagaatatattaccttttcaacccaagaatctttgtactccacaatataaggactcttaagctttgatatcaaactcatctacattataacaacaacaaaataaacattttgtttttcaagaatcaacattggatatataatcaagatcatgctaatattcaacctcttggattgcagcaaacaagaatctctctgtttgtttagccaaacgaatcttcttaaccacata

SEQ ID NO: 35140 - DNA, 3998 bp, Arabidopsis thaliana landsberg
  unsure (1)..(3998): unsure at all n locations
ttatggttcaacatattatacgtggaaactgagttcttaaatagtctatgataaacagattggcagcttcttatttagttataggtgcttggccaggagctgtggtggccgaggaccaactannnnnnnnnnnnnnnnnnnnnnnnnnnnaactgagacaaagacagacacgaatcgacgtagataagactaaggcgaggcgagattgagttttacattggtttagtcttcccaccattgatgaacaaacacacctctggctctcagagtttgaagcatgttgatgcagtctgacttgtggttggaacagcggaggaaaagctcatccacgtagcatatgactcctgtttccagtaaaacagttaggaacttcatttccacttggtttgtgttcatcttaaggactacaaagtctgcgtatttcgcagtttcctcaaaccaagcaaggaaatcgaatctctcatcttctggaaatggttctagctgttcaagcggagttatctttttccctgtcgagttgttctcagccaaatccggatggtaaacaaaggtgacgccgggtttcttgacataggatagcattactgaagtgttgtggtcgacaaagtagacattgaatgctttgctgtcgagtgggtataacggaaagaaccagtttggagttaaattagcatccatgtgctcggctgctccaatgtcaatgtagacaaggctctttttcagagagagatcaaggaatttaggtaagtaagctactgattttgggaaatcagcaggcttttgctccagtagaggttccatgaactctgtgtaaggtctattggtgtcaacagatttgcaatctcttggtagctgagactttccaatacaataagcagtctccgttacattcctcttgaatacaatgacggtgaacttatccaagttgttcacacgcactatctcagactgcttaagccccgaagtcacggatttgacaagacgattggcattagtactcacaaggactgctccggttccaccaggcttcagaacccgctccatctcaagcacaagaagagcaggggaagcaacatgatcaacatccccacagagcacgaaatcaaaagacttgtcaccacctaagctcaagctcgttgacatgcttcctactgaaaaaggaaaacaatggatgcttaggaaccccttgaacaactgagaaacccatctctttgaaccctgaaacagcagaatccgatccctgaccaatgcagagaatcttagcatcataatgcaatagctttaaccccatgagctcatcatcgagatcagcaattaccacttgtggatacttctctgtctcaattttaccccagaatggttgaacgagcttatggaagaacaatttcggtcctggaataacaaatcggccgagatcgaccaaatccactgctccatgatcaccaaagacgtgatttttagcggttaactccaacaaagggacaacagatagagcagaggcgatgatgagagcacgaaacagagcatgcctattcgtagatccacggaagatattaagcttcaagatctttatacccattgatttcttcaaatacttcagctccgatggaatcttaaaatatgattaatgtctagtacgatttgctaaacagatcttaagaacaaagaagaatcgcaaagagaaaatcgaagaatctagcgagtacaaaacctggaggaggtatggtttcacccacgaggagaactatagatatttgtgatcaaaccagacccttcttggaaccctaatcggcttccacctccgtccccattctcaccgttcgatcccccatgcagaaaaaaaagaagcagaatctcgtcttacatgcttgtagaaatctaaaagctaaacacagtttcttgattgtgtttgagaaatgcttatagattcgaagggtttgggactatggtttcgtgattctcttcctctgtcttgttttttttttttggggaagaagagtgagtgaggaagcgcttttaacagatttaatggtgaagctaaccacaatgttaaaattctaccgccccaatattgccacgtgacaagaatttatgctaatgttaaatgtttgaccgtttgtgattatacacatactacgtggatttcgttttcatggtcttctatgattattgagtagtagtaccaaactaccaataatcgtttttttaaacagaataagtgagaattgtttatatcgctaatttgttattcaatatctttgacaaaaacgagtggctcccacttattgtctgtgccttcgaaataattatttgatgttgaatttggctgctgtccctacacagtgtccatatccgtgtgggtggtgaacacatacgtgttgatcccaagtagtttctgttttaattttcttaaaaagtttttaggaaactaatttttttgaatggttgtaaaaaagaaataatattgtacgctaatcatattaatcatccaacctagcatagataaactctctttttttttttttttaagttagcaaaaaaaaactctgaaaatttgtaaaatgtaaacctattatgttttggatcgaacacgagtcgagtggtggccacacagttttggctaagttgggccgagttgggccttccacaattatttttttgcttttgatatcgtcaccgtcccattttctgtcaagcatgatttcatttcatctttcatgtgcttcagccttcagagtatagcactaaaaatgctatcagatttgtaagattacatgctctttcgacacgtcgttgatatagtttcgtgaaaaaaaattcacattgttaaccatcttatagtcattcatatcataaacataatctatacatttagtcggtttgatgtacatgtgtttgttgagacatcgatcctacttaggtgtgatgcgtgttacattttgccttatccattatttctttgtttgtgtcagcgtaactaccatattttgcgttatgagtcgttcttatctcgacagaattttaaattgttgtccaaaggtttatcactctcaatgttatttacttctttctctcgaaatgttatactttttctcctttttcccaattaataaataaattacaaaagtattttttttgttgttttatctttcaaaagcagtataacataaactcagcattgcacatctaaataagtaaagacaatctgtatttttcttccaacaaaattttcatacataatatttttttcctaatctctttttctgttctaaatatgttcagattttgtttttaaaaaattcattgtttcttttttttgtttaatcagattttgtgccaaatatgatcagaaatacacataacctatttgtgaaatgttttaatacattcagcagaagttcagataatatccataaaccatttttgaatcattttttaaaatgttatgaatatctgtaatctgtacatacatttgagtgggctgccatacttgattaccttcttactattgctttacacatttgatgcattcaaatatttgaatagaaacatgattttctttttcttctttcacaagaatgttgaagacaatttttatttgacatgtaagctggaaattttgattcaaaattatatgcaccactggttaaagatatataccaaaattaaaaaaaaaagaggttattacttaagtaagtaatagagacaaaacaataaaaataaaaaccgccgaatccaatttacttctttagttgagagaaacggggcaggcactgagtaagcacacaaaattgaagcaacctatatgagtgttcttgatcaaaagcttctttctcagattatcatttctcctaaaaattagtccttttaagcaaattaatcccaaagattgatactttgttttcctgagattcttcttttacttcactgtttctgggctttgcaattngatggtgatggatgataaagataaatatcgcgaagtagtagaacattgg

SEQ ID NO: 35141 - DNA, 3287 bp, Arabidopsis thaliana landsberg
  unsure (1)..(3287): unsure at all n locations
atcctccaggaccgattgtaagtgtgcagatggtctgcgtagagaacatctttcctctttcttcaaaagatggtaggtcgaaaatgccaactgctccattttggtaagagcaaaacatgatcggtttggcctctgcatcgtgcattccacagagagtatgaacactcagttcttgtttgcgagtttgaacaactttcaaactttcattttcagaacaagcccaaagttttatggtcccatccaaggaagacgatatcagacacttgtcccaacataagagtgaagtgannnnnnnnnnnnnnnnnnnnnnnnnnnttctacattgcaaggtgttgtgatcccacacctagaaccacagtactcagaggttattataatgcattggaaataagattaaagatgaaatcatttcgtatttagtagcagccatatcttacctttattgatttatcgacagaaccagagtatagcgcttgacctgcatcaacaaaacaagtgacttcaccactatgatgtccctcgagagatgtcaagtatttgaatggatcagactccgagtctgtagctttccagactaatatactaccacaacttgttccagcaaaaagcattctgtttaaaataccccatctttgaattgttaatacaccgatttaacatctctatataccaaagtaatgtatatattgttcacaatggaaaatggagattaaaggaacaacaaaaattgtgaaccaaaaaaaaagaaatgccaaaagatagaatcaaatcaattactcaaagataacaatggtttaaaagcaaaaaagaaacctagcttttaatctaaaaccgagtggttgaccaatggttaattaatgtttctacaccaagaggtcttaggttcgagtcccagctactgcgatttattaacagatttgcagattaatggaggcaagtgtgcaagagatctacaacgatgtacaattatatccgttcgtcaggattctacgcatagaaaatattgaagataaccatcaagcgcatggagaagaagaagaaggtgtcgtctgtcgtggatctaataaagggtcggaaggaattgtccgtagtaaaatcgtttatgtaacagttttcataatttgtataaaatcataaatctagacggcaagaaaaataaagacccatttaatcctttccatatagatccgccatagttcagtcggatgtctctctttactctaccatcataggtcaacgttttctctctaaggtacatttctttacatcaatgtttcaaagctctatatcttatctgaattatattgccaacgtaatgagcatccaagatcaccaaaggttacttagtattagattatagttgcatatgcttccttttcaacaagaatcttgatcttcttccttcaataaataacttgtgttgatcctctgctagaaaaggtatatacactttttccctttttaattaaaatcccaaacctatatatgctaattactgactaagaaacacatacaattgccatccatatgtgaagattcaaccggttccagatgactgaaagatcggaagcgttagggaaggatggacaccgtaggtgggatgacaaatctgaccacgatgatgtaacaaatatatatgtaaattattctcttatgggcatagagtccattcgtttcgactatgtcaaaagtggaaaaccaattgaaggacccttccgtggtgaaacgtataatacatacacgcatacggtatatatatgctgacttaagaaaattttactattagtttttctttctgtcatatataaccttttccgctttcttagatgttgaaaattttgtaaatcattttttgaccaatttttgcagtttgagattaaccatctaaaaaatgaacatctcgaatctgttgagggctcctacacacagagagggattcaaacacttcaatttaaaaccaacttgcggatttctgaaccgattggatatcctggcaaggatggtattaagttcatattagcagtagagggcaaaaaaatcattgggtttcacggaacaacttattttaggctgtactctctaggagcatatttcactcgggttactcctacaagaattgaagcgatagggggcaaggtaggcacaaagtgggatgatggagtcgaccaggcaggttttacaaagatacatgtacgaagtggtcaagaaggcatacaattcatcaagtttgagtatgttgacaataatgggcgtctgagagatgggtcaatccatggttctatttatagaagaggttccccacacgtggtatgtactacatatcatggagaaatagtaaaaattctgtttattcaattgcatgagtataatgctaaatcttagacgtaaacattgttttacagtttgagattagacatgttgacaaagaatatctggtatcggtagagggttactatgacggtgatggcgactgtgcggtcattcaagcacttggatgcagaaccaacgtcaagacttcacaacttatgggacccaaaacgggtaagaagtttagacttgcagccagtggaatgaagatcattgggtttcatggatatgctgagaagaatctaaactctctcggagcatatttcacaacctctcctttgatttcattagaacacactacaggttctgatttagttaatcatatttgggatgatggaagttttgaaggcgtaagaaaagtatatgttcgctatgatagcttggagatatgttatgtcgagtttgactatgacaacaaaggcaaagtggaaaagcgtgagcatgggatgttttattcatgggtacaacaaggagaggtaaatatttacgtcaacttgtataagtgtgtgttgtttgaatagattatacgaagcttctttttgtgtattgcagtttgtggtggactatcctaatgaatttatcacatctgtggaggggactatatcaaaacaaaatgattcgccagttccgtcattgacttccgaaacagttgcgtcattgactttcanaacatcaaaagggagaacttcttcaacatttggaagtccggctactaaaaaatgtgtgcttcagagcaaaggttgtggcgttgttgggttccttggacggtccaattattattatacttatgcgcttggagcacatttctgtccgttaccacctcttcctgacggagaaacagtagaagcaaaaggtggtgatggaggagcttcttaagacgatggccgttttgattgcattagaaaaatatacataggaca

SEQ ID NO: 35142 - DNA, 3025 bp, Arabidopsis thaliana landsberg
tgtgaccaagtcgattcacaagttgctatatgcggaaagtagtagacgaaatcaaaatccagaaacatgtgatatttttatttgtcttctttagcgataaaagcaattttgtgagaaaattgtagttgatttgttgggtatatgtccatttcaaacattgcatcaccactgttcacacttcatgcacttatattacatgggaattcatgtgtactcttcaaacaaaacgatcgatatatgaagaggaagtatataaggaggataacattacatttattatataaaaaacattacatttttaaaaatgaccacgagataataatctttgtttcggtccaaattaatactattggcccaaatgagttttttttttaatgatcctaactcgaaatattcttgagtaaatgtatttgtaactataaataaataatttttcatttatccagaatatatcacatgttaaaattgccacatgctacataattctgttgccgacaaaatcataaattgagtaggcgtaacgacagtaattaaggacctggagaactcgaagatttacaaagaaacatttaacaaataatttgaagtgataaggatttgactttggttacaatatgacgagctaaactagcggccatatgaaatgttttaaaatttatatttttattgttagatccaacgactcccaaataaagttgaaaatagtgttgactttgtggatatattaatcacactattgttttgacaaacagattatcaaagtctcctccgttcgtttgtagtcaactgctttttgactttatggtgttgatgatttctaatggtatcctactcactactacatataacatatgcaaactaataataatattatgattttttgggggttaaaatagtattatggttggagttaagaaacaaaaaaagtttattatgaatgtatgattgttctcaacaaaagaacgccaaatattatgatacttgtagttattataaaagttaatcatattattttatgtatgtcgtctatgaaactagactaatgatgaacatctttgtagaaacaatttatgatccttacttattaggtctgattgatgatcaaattaatagaactgctttctgtaaagaaagaaaattgataagcttaactcccaaactttcgtggtatatatcttcatttttgaggaattgtagaaacatcaagtcctaggattcccattctttcagcatcaccttgagctcgattaacgagagcataataaaggtagctttttcgcttaaataaatgaccgatgataaacattaaaatagaaatataataaaacgatatcatcatttattcatattgcaaagagcaaaaatctttgtgtaatacacttctagggcttttcttctttcacgccttcaacattttaagagatcagacaaacaaaaaacatgatttaacctaagtacattggcatataatatctgtatctattaatgatctaattaatccatcatctactcattatcgtatagaggataatcaatgaaggagctaatatcgtgatccaagtagttgttattgatcaggatctcggttccgtcaaagccattttctaccgtgttgttgttggctatctcatcaaatagctcggcctggaaattctcaaacccgtccataaagaacatatctggttgatcatgatcattgtgattgacggtgtagtgagacatttgtaaagatgaattattagtaccaatactactagtactgctcatggagttcaatgatggggatgcatgatgatgataagatgaagcagctgcatcataatcaacatcaaacaaaaccttgtttggttcccaagaaaatggttccaatatctgattcttgatcatgctttgttcttccatggcaaaagctctcattgatggatccaccacttgattatataatgtttggttcgatttggtgttctcatcatgaaacatttggatctggttctgactcgatgatgatgatgttgttccacgctcaaatttgacattaagttgttgatgaaatgccttcccttgcttgctcaatagcttcttcttcagcctcgtgttccaatagtttttgatgtcgttgtctgttcttcccggtaattgtgaagcaatgatagaccaccttcattttaataaatatacaccaattattgatgcagcgtttaaataaaatcatatctatatcatataggataataggaatatataagagatctagctaggtaacaaacctgcttccaatagtaatgtaaaggctgcaaatgatgtaatcttcttcatcggtgaagcctccatgctttaagttaggcctcaagtaattaagccatctcaaacgacaactcttcccgcacctctttatcccttctcatcaaaatgtaaaattgttaagtattatatgtcacaactataaagtatataaaagaatttaaaatcaaacaaaggattttatagaaataccaattctctgagggagggaaatccagttgttgccggtgccgtgtttttcgatgtaagacttaagcacggcatcttcctccgtcgaccatggccctttcttcaccgccatcttgtcgcagcacggtgctcttcccattttcttcttattctttttttttaccttctttcacttttagatttttggattagtttttatttcccttcccctcaatcttgttctctaggtatttatcttctatagtctctccactatatgtgtatatatatgagcaagttagctttatgaagaatgatgacaagtgggtttctgtctgtacatgtatgtatatggtgagaaaaaggcaatgatatcaagggaagaatcggtctcctaacattcaaataaatgtgaatatgactaagaaatatattatcgtaagcaaactttatgaaagtaatattatgttccaaatatttcaagactgaaaagagaggaaaagtagtaaagagccaacaaatgggattattatttgtccgtgtggtccagcgtatg

SEQ ID NO: 35143 - DNA, 892 bp, Arabidopsis thaliana landsberg
gtccaagtcagatttttgtgatgtgtttatggtttttcaaaaacttgtcgagaatcagtttagtaagaagattaaagtttttcaaagtgatggtggtggtgagtttatcagtactcggttcaaaactcacttacaaggtcatgggattcaacatctaatctcttgcccatcaacaccacaacagaacgggattgcggaaagaaaacatcgtcatctaactgagcttgggttgtcgatgatgtttcaaagtaaaaccccattaaaattctgggttgacgctttttactcagctaatttcattagtaatttgcttccaactcctgcgcttaaccagaaaagtccacatgaacttctgcttaagattaaacccgactactccttccttagagtgtttggtgctgcgtgttatccttgtctccgctctttcactcaacacaagtttgaaccacgctctcttcaatgtgtttttcttggctatcatccacaatacaaaggttatcgttgtctctatcctcccaccggccgagtttatataagccgccatgtgatctttgatgagaattgctttccattcacggatagatatcgagatttggtgccgagtcataaaactgggactcttggtgcctggcaatctgctgatgcttcgagaccaccttgtgtgttgcctactctacctccgcatatcaccaatgctcccaatgattcacaatggcttgaatatgtggtggaatttcctcaaggagacaatgaatgtacagaaacgagtatatatactgaacacggttccccaccttcatcctcaacggatccttctacggtgaccactgaagagattggctctccggctccggttcaaactgacgattctcccaccacagcccaatctctc

SEQ ID NO: 35144 - DNA, 2180 bp, Arabidopsis thaliana landsberg
tattagaatgattgtattacattgtactatgttatgcgataataataaaattcagtttaaaacatttctttaccttacactctttctcctcaactttccgcaccaaagtcgttgctaattgatatcctttggttccaaaaatggaaagtgttgactttgtggggttcatgtggttcacctcctatgtggtctaatgtgtcttcatgtttccatatgaagcattgaggcgagtccaattgaaaataaggatagtttccttatatggctccaagtcattatatatgtaattgtaattttaggtatttgggttgtaaataaatattaatatactaacgtttttggtctacacttgtatatttgatactttcgaatatccactgggtatcggatttggtactggttattcggatataaaagtctaatacccatttgacatttaggccattttctgttcggttaggtacctccaaattcggtcgattccgattcgattttgcgggtccagaaattcttttttttttttgaatttaatgttaaattatattcaagaaaaaataaacttgttctacaacttaatgcatacttgttttaaaagacatcactaaaaatcaactagatctttttatgcttgtcttgattcaaaccactcttgaatacctccaacaaactttatctctccgccactccgaattgtgctcaatctattacgaatgttcttgtcgatcactcttataagtctctcacatggggatggttcttcgttgtgtcgtctattgttccgttctctccaaatagagtggacagcattttgaaaaatgtatgctactataaaactctttgtcttactcagccccttgtcatgtaacagtttgaggatgtccttccaatttgcagtgaagctagtgtggaggattccttatgcgagcttgcgtcatacctgcagagaataagggcacataaagaacaaatgatcccttgtctccaaagtgtgttgacagagaatgcagtttggagttacttgcgggttccacttaatcagcttgtcacccgtagctactctatttttttgaacgagccatgtgatgagtgagtacttcggagtcgagtgcttgaaccagattccgttgtagttctccatcaatggctttgcggtgcgaatctgcagccacgtctctttggtgtgaaactcttttcgatagtggtcatgctttccattccataatgctacatcggtctcattcgatcttatgagcttctgttttactatttcgttttcgacttgattcaaaatagctacccgatattttcttcttcttgcccctgccattacctcacccacagtagcagtcatcgggctacccaaatcaatgcaccctcttgcacccaatctgtcataaagacaacccatctcactccatctgtcaaacccaaaagaagaagcttcgccgtttctaacttccactcgatagaaactctttgctgtgtctctgtatttcaaaaaaattttccatatccaagaaccacaagttgtattctctttcactaaccaaaaggagcctcttcgaataagatatttcttaaccaattccacccaaagcgaccgcctagctgagagaatgcgccaaatcaacttcaaaacacagactttatttgcttctgcaatcgagcgtaatcccaaacccccttcttgttttggagaacatacttcagaccatgcaactttcaccttccgagagtttaaagctgaacctgaccataaaaaagcagaacacgaatatttgtcttacgagttagaattcatggttgacaaaatccgctgaataatgaagcaaatatttatatgaaatcgagtcaagtaggaagaattattgatttggcaaaaaatctaagagagcaaaactttagacaaattctgtgtcaacaaacttaagactttacttgtaacaaaaaaaaagaaaaaacgtttagagtttagaaaacttagcacctaatcctcgatcccatcatcgatcttcacgtggggaactcgaagcgacacaatggacaaaagtgactggtcgcaaaccagtctacaatacacttatcggcaaactcatgtccacatggtaaagtcacaattcttgctccttctttgaactcttcccaaacgaatatgcacttatcaccaactatagagctag

SEQ ID NO: 35145 - DNA, 2051 bp, Arabidopsis thaliana landsberg
cagattttagaaaaagtgagtcaaggtttcacatctcaaatttgactgcataatcttcgccattaacaacggcattatatatgtcaagccaattttccatgttgcgtacttttctattgaggtgaaaatatgggtttgttgattaatcaaagagtttgcctaactaatataactacgactttttcagtgaccattccatgtaaactctgcttagtgtttcatttgtcaacaatattgtcgttactcattaaatcaaggaaaaatataaaattgtataattttcttatattttaaaattaattttgatgtattacccctttataaataggctatcgctacaacaccaataactacacccaaaagaacatctttccttcgaattttctttcaattaacatttcttttacttgtctccttgtgtcttcacttcacatcacaacatggctttgaagacagttctcgtagcttttatgcttctccttgccatctattcgcaaacgacgtttggtaagtttattcaaatcgctgtatatatcaaagttatccacatacaagctagatatagttctattataaaacattttgaacttacatcgtaagtttttaacaaatcccaattagctttctcgattgtatgttcagcttaactaagacattttcaaaggtatgttattcttttgttattccatgtacaaatactaagtagcattggaattaatttggtaggggacgatgtgaagtgcgagaatctggatgaaaacacgtgtgccttcgcggtctcgtccactggaaaacgttgcgttttggagaagagcatgaagaggaccgggatcgaggtgtacacatgtcgatcatcggagatagaagctaacaaggtcacaaacattattgaatcggacgagtgcattaaagcgtgtgtctagaccggaaagctttaggtatatcttcggacgcattgtggaatctcagttcacacataaactctgctcggttaaatgcttaaaccaatgtcctaacgtagtcgatctctacttcaaccttgctgctggtgaaggtacgatattggtagaccagtacggttatattacttttctgtctctaatagattatggtataatttatttgtttggtttgctataggagtgtatttaccaaagctatgtgaatcacaagaagggaagtcaagaagagcaatgtcggaaattaggagctcgggaattgcaatggacactcttggaccggttggaccagtcatgttgggcgagatagcacctgagccggctacttcaatggacaacatgccttacgtgccggcaccttcaccgtattaattaaggcaagggaaaatggagaggacacgtatgatatcatgagttttcgacgagaataattaagagatttatgtttagttcgacggttttagtattacatcgtttattgcgtccttatatatatgtacttcataaaaacacaccacgacacattaagagatggtgaaagtaggctgcgttctggtgtaacttttacacaagtgacgtcttataatatatatgattcgaataaaatgttgagttgtggtgaaaatatataatatgtttctgtttttggtttttaatggttaaattaaattcaaagaaaataatatcttttgtacaacaagggcaacattttgttctaagaattatagctaaaaatcagtagttgatgaactcacccgctagattcatcccaagtttcaagtccttttatggtaatgtctatcaccaatggttcatattgaggacatcctgtaccgttcattaattgatactagaatggcaacaagtagaaaatgtagaaatttgggtatctatactccaaaaatgatttcaaataaccaaaattcaaaagtttggttattcgtactcaaacgaataattgatctcaaatactcgaattgaaagtacaggtgttagaatgtcttacgttaaaagtatgtacattagttttctttattcataatcaattggtttttgagtatatgtttattagcattcgagtacccgaaagaa

SEQ ID NO: 35146 - DNA, 1668 bp, Arabidopsis thaliana landsberg
ttcaagatctccataacactttcatcaggagcttctataaatctacataatgcatcgtcccactcctttaaagatgtcattcttcggaaaaataatccataagcttcaatagcgactggaagaccttgagcaagccaagacgctcggattgacagtttttcataaagttcagaaggaggaagcgctcctttgaaagccaactggttaaataactgaagagcagcatcattatccatgcacttaacttcatatacagttcttactccgtatggattgagcaagcccttggctcggggtggtatgattattcgactgcctggcccaaaccagctcgactcttgagcaaaagcatgcatttgtctcatgtcatccacattatcaaggacaacaaagactttacgacatccaaaccttgccttaatctcctggggtccaagttttacgcccgaacccttcatcttcttcttagacagaccaagtgtagttgaaagaaacttttctgctaaagacgagacaccaccctttctataaatcttggaaacgttttcaaggaaacaacgagctggaaatccctgtgaaaactggtcaaagagacacttggcaatggtggttttgccgatgcctaccattccccagattcctatcatacgaacctcattctcagagtccatactcaatagaggactcaggctctccatgtgagcgttcatccctacgatgtcgctgaaatctactggctgcataatcaacaacttttttgaaatgtctttaacaatctcttcaatcatcgacgcctcgtcttcactagaatatagaacatgataagaataattattatcagttccatcgatattgtacactaaaaaccatatgttggtggtgaaaacttaccaagtttcaaaatcctttcctgctaaactggcgatctgggtgagagcttctctccaagttgtgaccttgttaggcattttagagtcttggtacttgtcaaatgtgaaactcccagtctgatgtctcacgtgagaaggatcaactccatagaaaatggggacaactttaatcttattctttaggtgaagatccattaccatgcggagctcgtccaagcaccaactagatgaagcgtagttctccgatagaatcacaagagcatatgtagagttttgaatggctctgctgatttcttcggagatggagtcgccgagctcaagctttttatcatctttgaacgtaacaactcccttatcgacaagttgtttgcgcaaatgactgacaatgttcttgcgggtgtcttctccccggaaactcaagaacacatcgtacttccagataggagatgaagaagatgaagccattagtctctctctttatggatcaactatttggccaagaaggaggatgaagaaatcatatcaagttcttagtacaagataatcatattgtcacaaacttgcacgttgtccgtataatgatttcaaatccatggttcaataagaccctcccccaagccaccctgttgtaacacagttgcacgtcgtcaattcgttgacttttggaagccaaactctctagatattacaaggcgtcattaactacatccatatctcatttctttggtcaaaatttaggcatcaatcatttatctcttccctatcgaaaatatgggtt

SEQ ID NO: 35147 - DNA, 2064 bp, Arabidopsis thaliana landsberg
ccaaaaaagagagaacaacaatgctatcacagtaaaaaatttgatttcgtcattacaagatacttttacaaattgttagaactattgactatgtttaagtataataacattgtcataaatcttatcttatcatcttagaactaaagaataagatttaatattttctaatatggaatgtgttctaagtatggtacactgaagatattttcccgaaaatattcttttttaatatatagtagatttgactgaaaaaatataggcaaaaactattatttaaataaataataagaatacaattcaacattttataccccaaacatttccaaaatttatcttcccatccaagttcatttgaagctcaaattgtaatgatgatatctttattcaaatatatgaattacttgtattttattcctttttttgttatccaaaataaatctataaatctgaaaaacttgaatttcactaactatggtttcatatcgcttatctcattgtgatgatgagatgatctatatacaattccgttggaatctgttggattcctgctctaccaattcttacacttgatcaccaattctttataagctaccattttgttttcaatgttatgcgattctaatgttttcaatcttccactattttactacgattttgtttttcctttattcacctgacatttccagtcgcaaacaataagccttagtgaaacacactgcacaaaactgcagcaaatgttgctctcaagacaaaagacattccgggggaaacaaataaaaaaactcaggagagttatttaagataagcaaaaaaagatacatcttaaactgatgccatttcgtttttcagtttcatgtagacacaaccttcttcaccacttttgtaacctcttccggggccttctctgccggtatgttcaccagattccccttcttcgcataatagtcaattacctgcaacaacaacaacaagaacaaatgtcaaattctctgatagtcctcaagttcatgtactataaggaaacataccggttgcgtctgcttgtggaatgcatctagccttgatctaaaaacatacgcattgtcattttaactatgaatcaacggatcttcagacacctaacacacaaccattttgatacagagatcagatcgcacgagagaactcgatctactagaatcgaatgagggatcagaaattggtgccttttcttacatcatcgactgctggaactttcggaggtgcgaatttagtatgaagcttcttccactgaagggtgaatccaccttcaagtaatctttcttcgagaaccgaatcatcgatcgcagaattaagcaccttatctatctgagctccccttctattaagcatctcatcaagctacaagatttataaacaaaaagagtcagaacatttacaagagcgagcagatacacaaacaactaaccacagaaaagaaccagaaaccttctctgcttgagtcacagtccgcgggaacccatcaagaatgaaacctttctgacatttgggtctgttcattgcttcatccatgataccaacaaccaagtcatcagaaacaagctctcccttatccattgcttcctttgccttcacaccaagaggagtcttagcagcaacagcagctctaagcatgtcaccagtagacaaatgacacaaacaaaactcatcctttatgaccggagactgtgtacctttccctgaaccaggtggacctgcaaattccaaatcatacatgaaccaaaactcaattcttcctttctattgaaccaaaaaacacaaattcacaatcccttcgctatgatcatcagataaagcattaacgataacagcaaaatgcaatttttacacactaaaacagataaaaatcggaactttcgctacacaattttcacagagatcaaacctaaagtaccgattgagtgaaagattcagaggtaacgaaagagatgattgtaccgatgaaaacgagacgtttgtcaggtttagaggcacatttcatacggcgaagaagctcagacatgagatcaacagtctgaatatctt

SEQ ID NO: 35148 - DNA, 737 bp, Arabidopsis thaliana landsberg
  unsure (1)..(737): unsure at all n locations
atacgaacttgcgggagcgattatgatgggttgcgtcttccacacgctacaatgcattctgtgaattctaccaaggatgtccttcagctgatggaggctggtgaagtgaatcgtgcagttagttccacgtacatgaacaatcgaagtagtcggtcacacaggtacataactcaaaacttcactttcagaattaaggaattactgctttgtgatctaatttttttttcttctttttttttgcagcatttttatggggcacgttcgtgggaaagatacatctgggggaacccttcgaagttgcttggatctggttgatcttgcaggaagcgagagagtggacaagtctgaggtgactggagacagactgaaggaggctcaacacatcaacaagtccctctcggctcttggagatgtcatctcctcgctttcccagaagacttctcatgtgccttacagaaacagtaaactcactcagctgctgcaggactccctcggtgaaattctcaaaaccctcttaacttattgcatttgggtatagccacgcacttgaatcttatacaacagttttccacattatcaggaggatcagccaagacacttatgtttgtccacataagtccagaacctgacactctcggagaaactattagtactctgaagtttgctgaacgagtgnggagtgttgagctaagcgctgctcgtgtgaacaaagataactcagaggttaaggagcttaa

SEQ ID NO: 35149 - DNA, 11039 bp, Arabidopsis thaliana landsberg
ctcgggattgttatttggctttaattcttacaagtaagcatctcccttcttcctgaaacaatatagttatcacacaaattgaagtcctgtctattaaatttggaaaatgtttctctagtcttactacccggaacgccttgcaaaatgctacattttgcatatgcccggattcttcgtgaccgtttggaaattcgtctgccgttttctagagaaagcaactcaggaaaaggtttgatctttaatctcctcttgatgtatctatctctaatggttcttgagcaacgaatcacataaattatgattttgctgttgcatagattgtgatagttacggatggagaagaacagagaaaattcgaggaggagatcggagcagatgctttaccggaagagtacggtggccgagctaagctcacagcaatccaagatgttcttctttctcaggctgctccagtaactctaacaaacaataatgtttagctctttatttttggaagcattaacctgaatatttgtaatggtcagaacataactagtggtccatctctaaatttccaaaagaagcaatgaaaacatgagaaagtaatgcgaatatattcaatctggtgactgagtgctcgctcttgcttatcttttcttattcacatcataagtaagctgtaaagcaggattgatcaacagaccagactaacttctagaaacttaatgtcctcttgttgtacgtgtaagattccaaagttagctatagatgtctttgagctaaaaaccagaatcacgagctcttaaatatgatccctaagccttgttatatgacaaaagacttttcaacaacttaatatttccaaaagaagaaatgatgaaacacatgagaaagttgtgtgaatatactcaatctggtgaatgagcagtttcaaacatcatgctgtttctgtatcttaaattaaacaatcttgctgttttgaattttgaagatgttggtcaattcactaacacactttaaagtcccaagcttttttctatcagccgcctccaaaatctctctatctctctgtctctcacttcttcttcctcacgggggcgacaatggcgacgttcactcatcaaaccccacaaacccatttcctctctcgccttcctctcagagctaaacctagacacttctccgcaagagtcaaaatgtctctccaagaatctgcgccttcactcgccgtcgttggcgttaccggagccgtcggacaagaattcctctccgtcttatccgatcgagacttcccttatagctccatcaagatgcttgcatcgaaacgctccgcagggaagcgtgttgccttcgatggccatgaatacacggtggaggagctcacggcggatagcttcaacggtgtagacatagctttgttcagtgctggtggatccataagcaaagagtttggtcctctggcggcggagaaaggaaccattgttgttgataatagctcggcttttagaatggttgatggagttccgcttgtgattcctgaagtgaatccagaagcaatgaaagggatcaaagttggaatgggcaaaggggctttgattgcaaaccctaattgctccaccattatctgtttgatggctgttacgcctcttcatcatcacgcaaaggttcgatttttattctgaaatctgcttagtccaaaattttgaagggtagttagagaatcaatggaagctttagactttagtgctctgaataatgtttgattggctataataggtgaagagaatggtggttagtacatatcaagcagctagtggtgctggtgctgcagctatggaagagcttgttcagcagactcgtgaggttttgtttctatttcagccttctttgattgaattgtttaatgattgtgctgagttgtgattctgcttcttcgtcttctttgcattggtgtgttttcttaggttttagagggtaaacctccgacttgtaacatcttcgggcagcaggtgagtgcttaatttgcttatagtttgtatttcgaatgtgctgattatgaaatccctttttgagtaatgtgatggttttgtatgttgttctgcagtatgcatttaacttgttttcacataatgctcctattcttgacaacggttacaacgaagaggaaatgaaacttgtgaaggagacaaggaagatctgggtgagtggttacttaagtgctattttgtgttcatttcactttgatcttttgttcaaaaattttagatatctcacaccaatttcttgcccttcacagaatgacacagaagtaaaagtaacagcaacgtgtatacgggggccagttatgcgtgctcatgcagagagtgtgaatcttcagtttgagaatcctcttgatgaggtaataacacacgtcgaacccgatttctactgattctgtgttgttgtgttaccttatgatttcactcactgatatgacaatttgaatcataatttgaagttttaaaccacattctatggttttaatttaactcaagccattgaaaaatgtggagcagcatgtaatcagcataagtaggcttggatagttcttgatgcacttgcagagttaaaccctgaagttgttctttggacttgctctggtagcatgtattgtgattcttgttgcgcaattaaaagaatcttatgatcaagttcttattcaggttataacggtttttcttactgtatcataacagaacacagcaagggagatactgaagaaagcacctggagtttatataatagatgaccgtgcttcaaatactttccctactccactcgatgtctctaacaaagacgatgtagcggttggtaggataaggcgagacgtgtctcaagatggcaatttcgggtaaagtctcactcttttctactgaatttgaagcaaatgtctttgcgatatgcctaaaaggatataactttgtgaattcaggctggacatattcgtttgtggagaccaaatacgcaaaggagctgctctgaatgctgttcagatcgctgagatgcttctctgaatttgaacccgctctcactttgcttcttatgaaattcttgacaaagagatcactgtattattagatttgagccaagaatttgtctcattttttgttctgtgagttttctattttgaccaattttgttactttgattcataaagttgtctcttaaatctgaactcatcatgcacacgcttgaacctcttggcaattttccggttcgaatctgtaccgacttggttgatctcaccgaagacaaccgggctccacaattatttgacacactgaagactgaaccagtgggggcccactttattgatagttatagcaaatatttacttgtttagtggatattatcaaatcctaaaatcactccttcgttactaagactagggaggagacccgcgttgtttttggttttgtttttggttttgttagtatgcactaaccacttcgattttttttactgatctttgattaaaaagggaatatctttgttatttgctaatcttatcttttgatttctacatttttgtaatctatgtatagttttacatttttttttcatgttgttaccggttatatgctagaatttataggataatagaccaaacttactatcttgtaagaatattttttagagttatatatatctaagcaatgcatttgttacattggtcttgtttttatatattttattttaaattaaaaatacaatggaaatctctctctctctcgcattaagcggttgctgcagaggatagcgaagaacagagactaacgacgaagttattttacacatcgttgccattgttaattttggcccaatatgaacccgcccatttgttttttctctttgtgtctctgttaaaatcttagaaactactctttggtttggggaagatttcacttttcaacgtctcttcgcgaattagccaaaaagagttggattataacaatattaacattgaaagtacgatatgcttagataattaattaaaagtttgattttattgtaaatataaatttccttacaacagcaaggaaagacacacattaaagcaaaagaaataagagtaataacttttactttgttttgagtctttgtgatagttaactgcctcaaacattatagggaattttttaaaaacagtttccaactctctacatgttttgtttaagttataccataaaaatgaacttaaacatttgtttgtaaaaaaaacatttctcacatgtgttgtccaaatctcttggatggcacacgtcggggggtttcatgttgcgaagtgatatcatgtacaatctttttctcgccactctaatcccatttagtcaagttttgatttgtttccaacacgtttcagccatggtggtgtctttagcccattcaagttggctcatataggttttctcctcttcagtccttcctctacataataatagcatgacatacatgtagattgcttctttctggcctccgttagctgttatgccaatatggtggagaccaacgtcacaatgatcaaggttaaagtaccatattataccttttatgtagtgagcttagtttttctataaatagagaggcatctcaaggaaaaaaggaggaagaaatccatattaaaacgtcttcaagctcctcagctcgttctctagctcctctgctcgtcctcaagcttctcagctcaccctcaagctcttcagctcgtcctcaagctactcagctcgtcctcaagatccttagctcgttctgaagctcctctgctcgtcctctagctcctatgctcgtcctcaagctactcagctcgtcttcaagctctccagctcgtcttcaagctctccaactcgtctttaagctcttcagctcgcctttaagctcttcaagctcctcagctcgtcctcaagctcctcagctcgtcctcaagctcctcagctcgtcttcaagctcttcccatcacagcgaccatctcctcgtctagctatcagctcatccctcgactgcgaaactcatctacctcctcgcctagcggcagttcgtccattgactacattgtccacctatctcgtcgtccagctcgtctagaccttcagcaaacaactcggtttgtccaactcgtctctcttaccacggttcatccagctcatcgcacatctgccggctcgtcacctacctgccgacctacctccaacgatggcctagctcacttattctaatatgaactacgtgtggcttgatcccatttttcgtacttgtgtgattcgtgcatcaacattttcgtacacataacttaaaacacaagagtagctaagttgtcccagttggccggtcaatacacaacttaaaatacaagagtagctaagttgacccagttggccggtcaatacacataacttaaaatacaagagtagataagttgtcccagttggtcggtcaatacacataacttaaaatacaagagtagctaagttgtcccagttggccggtcaatacacataacttaaaataggtaaatacatgtctaattaggttcaaatattacataaaatccagaaacataacatatttaggttcaaatgtcatacaccatcctcaataacataaaacacatcataatcaccatgtagaaagtaatgccctaagcctatcaatctcgacttctttggcgagtaacctttctttaagggtttcaatttcgccttgcatgagatgaatagtttcccggatggactccaaagcatgattgcatgctagttgtccatgtcttagtgcggaatcaagtttgtgatttaccttctcaagttcctcagttaccgcctgatcccaccactgaataaggtggtttcgggactcgtactcttcagcctgcgaaagagagaagacttcataaatataattcacttgtactttgttgttccaatgaaatgaaaacacaataacttactttaagcattgggcatttgtagactctgtcgccttgcctgtaaccagttttgcacacttcaagttttacaggcttaccacaaaaacatttttctggaaccccccaatttgcatcggcattcgcctctccactattccaactagcttcggacgtggatggttgagagtaactatagggcatctacagaacagagaaagaaagagatatgaatcatgaacgctataaaccctagatctactaattacggcggctagaaacccgtaagaaaccctagatctactaattacggcggctaaaaacccgtaagaagaagagagaagaacgagagagaggaagaactccagtgcatgtaataccttggttgtcgacagctaggcgaggagatggtcgctgtgatgggaagagcttgaagacgagctgaggagctttgaggacgatctgaggagagaagtgaagaagagagaagaacgagagaagtgaaatagaagagagagtgagaataaataggtagaaactttgtagtgtgaacgcaataatcgtagtgtgaacgcgacttcgtggggtctatttttaaaaaaaattatttattagaatattcagaatacacatagttgtatgtatatgtacagttggccggaatcacaaacagttgaactattctaaattttgtgtttttgaagttgaatctgaaaaaccaactcatttttttagttggtcccataagttttaacatatgaatggattttaataagttttgatagaatcatattaagtacatatctgttttcatacataacgtatgtacattggacaatcatgaactatatgttccttgttatacataggtgatttattaggaaaccagtttatgatcaagtttagtaataacaatgttgtaatatcatattttggatttattcaatgtttagatgttgatttattcaatgtttaaatattgagaattattttatcattttgttaatactaaaatacatatacatatatcagttgtctcaattgaacttaaaaaaatacattaaacttgcaaataattcaataaacttgcaaagaattcaatacaaatacgaaaacataaaacatagtacatcacacttacaaataatataatacaaataattgaacttagttgtgttggttgaccctttctccagttggccaggttcttccggttgaaccctttctgcatcagacttaatcttcctcaggctgcagccaagcctccaagtttattccaggttgcgattttctcttctttcgcgcttcaccagcggatggaatccgcttctcttgatttcgtcctggtccttttggtgtgtattccggcgaaaatgcaactaactctttaatatgggcaggaagaacccaaaccgactcatgtgggactacatacaacgtccggtaataggccaatgcccaactctctatcaagtaatacacagagcagagtccgtagatggttgtattcgcatttctcccttccttgcgggcgaggtgccttgctgcggccatagcatggacacacgggatcttgtctatatcaaaacatttgcatgaacaacttttcattttcaaatccacaagaaaacttaccgagttgagatcaatcacgttgtattcttggttgtaactgttaagctcaaacacagttaatttggctgcaactggacatctaatgtgcaatatgttctccacagtaggcacaacttgtgctgtgattggacaagaacctgaatcttgcctatgctcgttgaaccaattagaaaacttagaaatcatcacatcaatcattggtaacaagtgatatcttctcgcttttttaaacacaccattaattgactccgcagaattactagtgtcaatgttatacttgtctcctttaaaatggcacctcgaccatttctcaaaccctactttcacaagaaagtcagcagctttaggccataaacttgtaaaatgaccaaactctttctcgaactcactctcagtatatgcatgagcacaatccctgaacttgtcagcagctccatccttgtcaattgtcacacgatctctcatgttttgacacaaatgccatatacaagctgcatgaagcgcattcgggtacaccgtcttgacagccttctttatgctttgatgcctatcactaataaagaccaatccgggaacatccgaatatacagttttcagcttttctaagaaccaaatccaacttacatccttctcgctatcaatgattccaaacgcaagtggataatgatgatgattaggatcttgtgctgttgcaataaccaacatcccaccatacacagttttaagatgagttgcatccacaactatcactttccgcattgccctaaaaccttcaatgcaagcgcctaatgcaatgaagaggtacttgaactttttctctccttccaactccacataagttactgtccctggatttaccttctctaacatgtaaagataagaaaataacatcgtgtagcttctttccggagtccctcgcacatcactaacatgtagcattttgcctcttaaggcagtggagtatgaacaatgcaccccaagtcttcctcttacaatcgacataatattttttggagttggggtctctaaatttccgggatagtcacaatgcaaaaccgatgctattaatcttggtgtgcctcgctgtatactgttgcttgtagtctcaacactccgagagcatgtatgcatctttctatgcactctaacactccaaaaatgagatttcttagttctcgcaactcttagataccaagtacaccctttagaagcttggcggcatcgtagcataagtctcaacgggtctgacttaatagtatagactccaaaaacttctttctttgcagctctgttaaccaattcccacacagcctcccttgaacaaaattcttgaccaatttcaatacccgtaccatcatcccattctataacctgcggagtaacttctacacttcgtggaatatcgtgaatatcatcataatcaatcctatcatcctcatcttcttcctcaacagaattcaccggcctttccatcggcctttcgacagccacgatctccgtacctactacattctcacaatcattcacatcattatcatatccatcatgcaccatctcacatacttcatttaaaacatcatcttctcttacatttacaccaactgaacttcgacgctccggtacagaaatttcctctctcctctcaactcctataccatttaatttctccacatgcaaaacaggaatccgactctcttcatcagattctgttaaaaatataaagacatcctcatcatctacaatatatgtctctctcctaactttagacagattgtaactcagtttcaacttcacagaagcttcatcaatcgcaaccttcttcatgatcttgtcaactaacatcgaatatgttatcttctccaaactactcgtcttaaacgatatagcatatagtgaatttttaccaatccactcattcacttcagaatagtatcctccaaagttaaaatgtaccttagtgtggatcttcttcttcatcgctcctgaaaatacaaccagttcaactccaatcaaacattttaatagttataccacatgtactcttatcatacgttgaaatcaatctcttgtcgcactcgattctactgaacctaattcgttacctttcaattgatttttaatgttaatacatacctattcgttaaactaattggttaatctaaactttgcaaacacaaaccccccaaatctttaatatgaaatctcggaattcaaattcaactcacattcaacctacattcctttgctcatcacctcaaataacgtttcggcaacctctaatcgattactctttactttgcaaaccaatcatcaaactatcaaattgaatcgagctgggaattatatagaattcaaaatcccaatctaaaatcacaatgcaccaatgtcaaaggaaatatgagaagaaactgacctaattcgtggcttttacgccggatttcaagtcggcggcatgaggaaatcgatggtggccgacgaagaagatgaacgtcgaccaaagaagaagaacacgacgacgaagaggagcctccgaactcgattttctttatttagcttttgaatttctttttcatttttttaatcaactcattaagggtacaactggtatatcacattttcggtggcattcagattaactgatggcagtccagatcagttttttcaaaaaagtggcataagtgataaaagttcgtctcagtctccgcaaatcgcaaaaccctcttacaaggagatatatgcaaaccggtggagttctggtttagaactcattatcaaaccggtttactgcgattgaatttgaactggtcgttatgtgattatatgtcaaaggggatagtgctgtaactaaacttgttttttggtaataaaatattaaaatccatcgaaccaattatttccacattgattcaaaaccaacaatcgttaatcactttgttaaaaaaaaacttttgtcatcgatctaaaaaaaaaactttaagtacagtatcaaaccggtttaacaagcaagaaataagctttagtcaatttctctaatttcttcggtgagtaacaaaagcaagaattgtggagaagattagtgactgatggctattttttttacttacttttggtttctccaaatatgtattgccttgctaacaccactatgtccctctagagatatttgctaggagtaactctgtgtccgtggctttctggattgatataatacaagcaagactacaatcccaaaaaaaaaagatgaaaagattagaccttgcatagagcaaacatgagttgaatctgaaacttcaatgatctaaggttctctgactttgacaacaacacaagacaatctatttctgagaggattttgatcaccagggcacttttctctaaaattttgcgttttcgaccctcttatcgaatttgtatcttttatcttatgttgatgccagcaaatcattggctgttttgcctgcaactatgc

SEQ ID NO: 35150 - DNA, 3184 bp, Arabidopsis thaliana landsberg
gagtgttttatcaaaaaaaactatgtagtttatcgtttatcagatcagatacgtgtttcttgaatttcaattgttcaagaaaaagatatccatatgttatgtactagtaccatatataaatgagactaaataagtcagcatagtggttcgataaaatgaggaatcacagtccggatcgttcactgagttagataacttcaccaagtggcttggttaggaacagtaaaatctgctagacaacttttgtttttttctttttagatcaaaggtcacaaggtttgacttctttttttcttacttagccttttttagattataagtcttggttctttataatactcgtcttgcgaggaggaattctttgttggctgaagctgagagactaaattctaaaaatgagaagctcgagaggaagaggaaacccatttcaaaggtatttaaattctttttatgattgaatcatctttagtggcattatatgatcaacaattgttggccttcttttgttgataatgggtttcttagggattgtttagacttgatgaatttagaatctttgatctggcttgcgtgagtgatattattcatcttaatctcattgtgtattgtaggaagaggcattgcagatcaaatcagcaggaaaaacatggtaccagactatgatatcagatgatgactacaccgagtttgataacttcataaaggggctcggtgtcgaataataaaatctgcatcccttaggcaatttatttatttatatttatatttattttgtttcttgagatcaaagtcacaaactttgttactttatcagtagacgttttaccaagtttattttcattttaaatcaattcatttcccagtcttagattacctccaacataactctaccactgaaatttatttgctcgtctttaatagaaatgaaaggtcatatttttagttgctcaatacaagttaactattcttgcgataagaaaatcacaagtaaactgtataaacacaataaagtatgtttttagtttactttcattcaactagaactctattatgtttttacttttcgtcatatgtatacgtaacattttttcttataatatatgatgctaagtcatctcctacaaaacacgaaacccttaatacaaaaatatttttttttagaaattgccgcgaactttgaaatgcattggcgtcttatctctttaattgcttattaggatgaggtattaaaaattcagcaactatccaaatctttgctataaaagtgtgtaataccaagaaggcaataaccaagcatctatcaattaccacctaaaagaagataagaaaaatccccaaatgagtgcgaagattttcttctgcttcttgctcttcttcttattgtgcttggaaagcagcagaggacagaacaacggcaaaacccaagtcaacatcggtgttgtaacagatgtcggtacttcatacccggatgttgccatgctctgcatcaatatgtctcttgtcgatttctactcttctcgtccccaatttcagacaaggcttgtcgtcaacgttggtgactccaaaaatgatgttctaggtgcagcaactgcaggtaccttattttctcctttcgctttctctctctccaaatatatatatagatgtatgttaatttttctatatgtaaactttattcacgtttgacatactcaacccgaattttcttggttttaacattgtcacagctattgagctgataaagaacaagcaagtgaaagcgattttggggccatggacatctatgcaagctcgcttcctgattgagattggccaaaagtccatatttgagactctttcttggacaatattgcaacacttataaaatggttgaagaaccattcaacgttgatggattcggctttgtaagtttccataacaaaataaaatttctatgacagttacattataaggtgagaatatatataattcacatttttgtaggtttttccaattggatcacctttggtcgctgatgtagtgatgtttcaagggccatcttaaaagtagcaaagtcaccaaaagcaatggagcttgaaagttcatggttcaagcagaaagaagaaagttgtccaaactccctcccaattcccatccaaatccgtctacttcatctaggcagctctgcgtatatagtttttggcttctttttcttgttgcttttgttatatgtgttctaacccttggcaaatccacattctttttcctaaaaaaacctaatcctgttgatggctattggaaagagtatatgaaaccagacaatgattcgtacatcaaaaatgtcgagaaatgtccatgttctacatgccaactcatgcctgagaacaccactcaagaaacaaatcaaacagctgacggttgaggcacaagtaaccaaccattatgtttgaatctctcaagattatcattaagtgttttttatcaaaaaaaaactagaattttaaattttcttttcatgccggaacgggtttggcttgaccattaagatgtcatacttattttctttcaatacacgtaaactatgtgatcatgcacgacgtttgtttcgttgttacattttaatcaagtagtgcacagaatattaatatatttgacttcaacattaaatttaattctttgtcgaatatatacagaaatttattttaacacaatatcgaaagcttagttgtctcttaccaaacaagacgtacaatataggaataatttgattataaagaaatggccacaaactttgaatttgtatttgatgctattttcgagtatggtctaaagatgacgaatatgaatttaaaaaaactcagcatctgatcaaaacttaaccatatagatccaaaatcatctggaaacacattttgcacttaagagaaaccccaaaatgagaaacaagaaagttttcttcttcatcttactctttttattcttctcctttaagatcgaattcggcagaggacagcacaacgaaagaaccaaagtcaatgtgggtgttgtaacagatgttggaacctcatactcggacgctaccatgctctgcatcaacatgtctctagccgatttctactcttctcgtccccaattccggacaaggcttgtcgtcaacgttggcgactccaaagacgacgtcattggtgctgcaactgcaggtact

SEQ ID NO: 35151 - DNA, 1306 bp, Arabidopsis thaliana landsberg
aagttatctggttatcttaatttgtttacaaaatatggttattcagttaaatcaccctatactatattgtccctctacaaaaattaggtattttcttaaatcttgactttggggggagttggatattttcgacgaagaatatcaaaaatctaaaaagacatgttttggatatgtaaaacaaaatttagaaaagtatcttatatataaggtatgttatctccaaaaaaatgtaatagtagatttgcatttctagtcaatatgttgatattaaacaccaataaaatagtcaatgcactaattaagttgccattttcatgcatcaaaacacactatttaaatattgccatccaccataagattttaaaataaagaaaacattcaaaacatcacgttcttagaacttaaaactaaattgacaaacacaaaatttcaagctagggatatgtcggaatcaaaagcaacaatgctcattttgttcgctctctttctttcccggaagtcttgattcctctcatcttcttttatataaatgaaactgattagaaacatagctcgaatccagtcaaaaaatattttaaaaatgaacagacaaataggaggtgagcatacctagagctgaagcacagctgatagatacatgcaagacatcagaacaatgtaaatcgattcgtttttctatttgaagcgcacaatgtgtgaacaggcaatgccggtgtccaagcctcaaacagatttactcggtgacggatgtgtcgtgcaagacggtctctgattgtgttgcttctcatcaatgcccgactggtttatctgcttgtattgaaggaaaatgtatttgtttgccttagtatgttcaaattatattatttaatatatacctacaagttaatttttaaaaagtttagttttatagatattaatttgaattcgtttactatggggaactctatcgacataaaaaagaaatctaatcgtagtcaacaaggccagagtatatgttggtaacgtactctatttactttctaatattacacaatcgactactacgtgatataaaagagacatctctacaatgataatgtgaaatattcattgttgatactttacgaaaaaaccatagtttcgacatttatattaattatgtatatattcatcaaagttatgttaatcaacataaatttcagttacaatcaaattttttgttgtaatatctaaggctgggtaaaatacccggacccgaagatcccaaccaaagctagcttaaaatatctagatgaaaaacactaggccttttcttttgaaaaactaa

SEQ ID NO: 35152 - DNA, 3442 bp, Arabidopsis thaliana landsberg
cagttggagtttcatccactagatcctaccctatgttttttggaacttttggatggcgaggtggttgttctcaatcacgaaagtgggaaaattttccgttacatcccatctaatggatctcaaagtaccatcttgggactttgttggctcaagatatatccatctatggtaggattacaatttttcgggtaccaatgtttctttcagttatgttagttgtttatctcaaagtgttgttctatttccaggttatagctggctcagccaatggctcattgaagctgtacgacatccaaaaagcgtcatccacggttactactagcagtcattccacttctggttctgtcacttttgatgagtttgaccaattaacgtcggttcatgctaattcgacggaccaactatttcttgctagcggatactcgaaggatgttgctttgtatgacattggtaggggaacacgcctacaggtttttgctaatatgcatcaagagcatattaacgtggtgaaattttcgaaccattccccgtttctttttgcgacttcttctttcgataaagatgttaagctttgggatttgagacaagagccatcccgaccatgctacaccgcttctagtacgaaaggaaatgtaatggtttgcttttctccagatgatcgttatcttctagcatcagccgtagacaacgaggtactctaatggaccatttagttttacttatgaagctttttgcatcagattagccttttggatatatttggcgttgttctattgatttttaacaacccattgaccattttcccaggtgaggcagcttttgacagtagatggaaggcttcatctgaactttgagatagtcccaagagtaagctcgatgaactatactcgatcatactacatgaatggtaatgactacatcataagtggaagctgcgatgagaatgtgatccgtgtttgttgtgctcaaactggaagacgacttagggatgtaactctagaggtagattgtttcttctaaactataaaacatggaaacaatcgtataatgtataaccgtatgaatgtgactttacttatgtgatttgctttggctttgcagggaaacggctcggacttttccatgatgtatgttcagtctctacgcggtgaccccttcagggtaagttgacaaactttaccaatcaaatttccattgataagaaagttttatggcattttcaaaacttgtgtattgctaatctcttgcaggatttcaatatgagtgtattggctgcgtacgcacggtcaagctcactttctgaaatagtcaaggtagcgttattaaaaaaacagtgcttctgttgtatcagataaagttcccaattcttagtactgttgatgacaaaaatgttactgcaggtgaatttgttagcgtcaagagattctacagcagaagaatctcatggtctccgttcctacccttcaagtagcatgggaggctgatgataaaaccaaaagagaggcttcacaaaaaaaaacaagtgactcatgtattgttgtatttattgtactaatagaatacgatgaatattaaaaaatgaaaatgttatttttcggtgataaataaaaaaatagtttaggtcgaacgacgaattttgactatataagcaaaacttccgaggaaaaggataacacaaaacctctcgtcttctcaaatccactctcatacacagtcacaacaatggctctttcttctggaatcttctctactacttttctctgcgtcgatacggcgccgttgcgcagctcaatgttgtctccatcttcgctccgtttgtcccctaatcatccgactaacctgcgcatggttcgagctgtaacttccgcggcggcggctttctccgacccgacaaccacgaccaagactcgggagccacgtggcatcatgaagcctcgtccagtgtcccaggccacgcaagatgcccaatgctgacactgaaatccctcgcacacaagctctgaagcgtatttgggcttacatcaaagaacatgaccttcaggtacttctttctctctttttttactctctctgaaatgctttatgtgctctaatttggttttggttgtggaaattttttaagtctcttgtggtgatttctcattagggtaagttttttggtgtttcagagtagttgtggtttttggtagacaaaagtaaagtgggttgtttgaattgcttatgggtttagatggagagcttctaagaaatggataaggttgtcttgtggtgtcttgttatgcacagttgaatcttgtggagtttctttactgtttagtttagactgaaacaggttcttgtgattagtcgtcatgttacttaccgtatttgtttctttcatgtttgttataataaacttttgaaggattcaacggattgtgagattgaatttggggttttgaacttcttttgatatgactggttaattgcttcaaattattttatcattgttgtgatgataaactttagtggatatgttttggtaatgacttttgatgttctttgatcattgtacttgaccaatgtattacctatgcatttggcattatactagtccctgtgtaatgactctttgtgctgtgtaatggaaacaaatgtagacatgtccatactggggtttgaccttaagacgttagtttgtacttttttctcatgttgtaatctactcttacttgttctgtatagattcttaagtgttcattgtgctaaaatttcaacaaaagaaacatcttttatgacaatagtaatgtatatcttttatctatctgtgtggaatttgtgggctaactgaataatgtttcttctcccaggacccacaaaacaagagagaaatactgtgtgatgagaagctgaagaagatattcgaaggaagagatcgggttgggttcctagagattgcaaagctcatcggtcctcacttcctctgatggattgtttccgcggaattttatttggatgattgtctatgttttgttgttgaactcttacggccatgaaaagagaagggtatttgaagttgaggaagacttagattagtaaattagggtttttttttggttgtttcaatggatgttatgtagtcgttgcgtcctaatgttgtttgcgttttcgtttccatttcagattctatttttcttgttcgactaacggtaaacggcttttgacaacatgtttttccgtttatttagttttcgaaattcacacatgttagttacgtgttataatcatgtacatactccgttgagaagagattgaggtaagggtttggaagacatatctactaggctcagggatttgtggtatgatactaatgacgtatatacttagaaacggttgacaaaagagcgagaaaatttacatttttcacttcactcgctatattacgaattcatattacctcagg

SEQ ID NO: 35153 - DNA, 1186 bp, Arabidopsis thaliana landsberg
caggtacctcttcttgtgatgacattccacatatgtacacttcacctgtccaaaaaaaacaaacaacaaaccaaagcaaccacttctcattttttccattacttgtatcagaaaacgagattaagtcaaagtaaaatcacatgaaagaaccgaaattatacctgtgggacgagggtatacttcagggtccaaagcttcaccaccattgagcaggacgataagttaagagcagggcatgaggtgttatagcatttggttccttcggttccaagacaatgctatgagctttagtacaataaaccctaaaaatcgaagacaacagctcaaatttactcgaccatggacccatcgccagaaccaccacgtcagtgtctataactctcccaccttcaagcactacagagttaactctacctgattccactctcacctcttctaatttcccgatcacaacctcaacaccgtacttctccgtcgccgtcgataacagcttccgagtaaagagctgaggatgcacttgtgctgttgttttagttgtaccaatcgttgatgggcttttagctgggccgttgacccaatccggtaatcccaaaccgccgccacctggttttgattccgtcacggtaaggctaagagtcgtgagtggtctgtatccgtacgattcgaaaccgtttagctcctcagcgagcgatcgatggaggttaaagctcgcgcgtgctaaatgcgcaacaggacttccatcgcaccaatcgaaagcgagaaatccaccggctttaccggaagcagcgcacgcgacggctgatttctcgatgagagtgacagcgactcctttcttggccaggaaataagcagtgcaaacgccgattactccgccgccacatacaacgacccgcttcgaggtttctccatcgatttgtttttccgccgccattgatttcgatgagttggagcagatcgtgattgttcgtcgggttaacaccggagggaataataacgatgagatcaccgtcatcaccgagatgagatagatgatgactcaccgagtccacacgttagttagaaattatttattgggcttagtttctttttgggctgatcttgggatgcccatttattgtataatttgtgcggtattgggtgtccctggggatgatctgatattgatccgcgaggatgagctaactga

SEQ ID NO: 35154 - DNA, 910 bp, Arabidopsis thaliana landsberg
tgggaaaggggcggattcgaacccgagaactataaaaattaaccaaccttagtgttaccaccagaccaagtacaacatgcacgtaattttacgcaaatttattgtatataacaattaaaatacgtagtgttaaaatttaacaccattaaataattccgttacgttcattgacggctgttgagtattaagttcgaaattaccaaaatttaaaagacgatggttttaaaagacaacaaaaaataagttaggtatttttattccaaatttaaaactacaggtattaaatggccaaattaaaaatagacgacggttttttcggcttttttccccttttttttcatagtttagatatgtgagcttttaaagtagtagatttcattcatgtaaaaataaaggaaatctgcgattacaaaattcttattgctgcaggtgaaaaaggtaggtgaataatacaaaataaaacaatatgtaattttaccaaatttcaattttgggaacaaaaatgattaatttagtaaactctgtatctgcaagaatttgtatgttatagcatggtcaagatacatatggttttaatttatgtcaaaccgaaaacccatacaaaccaaatcgtaatcaatacgaattatatacggtggttttatttttttataaaataaataatcaaattgaaactaaactaaactaaaccaaaaaaattgaacacacatctctacataacaagtaaagattagtattatgtataaaatgattaaaattgtactataaaatagacaacaatccaactttaaataaatatttaaaattaaaatttgatccgtgttgcaccaatacgagttatgatctagttaataatcaaagtcctaattcgaatggaactatactagcgttaatccacaaatgtccctgt

SEQ ID NO: 35155 - DNA, 10190 bp, Arabidopsis thaliana landsberg
  unsure (1)..(10190): unsure at all n locations
gaaggatcaaactgaagagctatgctacattcagaaccaaggagggttcaactagggctacaacaactacaatcccaacccgaacctctcctacagaagcactaatgtagctaacccccaacatcaagtgtatccacctcaacagaatcagtccaagccttttgttcagtacaaccaagattaggtccttaaacaacagttcaatggaggtttccaacagcagaatccaccaccagggttcactcaacaaccacaacaagccccatcagctccagatcctgaaattaagtaactcattcaacagatcatccaaggacaagctactggagccatggcttttgaaaagaagatagttgaatcacataacatgatcgattgttcttacaacgatcaaaatgtcaagttcgaagctctgaattcaaaaatcaaatatgtggagagtcaatttgtatcaacctcgactccgaagcatcctcagcaaattccagagaaagcagttaagaatcctaaggactatgctactgctaatgctatcaccatccaacaagaagatgagtctacaccaagtcattagactcccaatactgaggacaatatgattcaagaaggggggggattcaactcaaattgctgcacctgccatccagcaattcagctggactatagagcacacacctttgatggatactcaccattctgagaagaatttcaaagtagaaaaacccaagtaggatcagaatcatgagatgattagtagtttcatcactcaagaaacttacaagaagaaagtcatccaagaaaagctatatgatcctggttcattcactctgccatcctccctaggaccattgacattcaatgggtgcctttgtgatttgggaccatctggtagccttatgcctctctctacagctaaaaggctagggatcatggaattcaagttttgcaactcagccttactcttagctgacggttctgatgcacatcctcatggtctaatagaaaatatgcctatcaagattggaaatgttgagatacctacagactttgtggtattggacatagatgaagaaggcaagatcccctgatcctaggtagaccattcttagcttcagctggagaagtcatagatgtcaggaatggaaaaattaatctgaaccttgaaaaaggcatcaagatgaagtttgacatcagagaagcttcaaagaactcaacaacaggaggtcagagttttggaattcaagatatggatgttgataaagaaacagaagctgaaacttcaccaaaagttaactatacttctcaacttagcaagctgaagagaacttttgaccacaaaaagagagcaacagaaaggctatctcagatgagaaaaaaaaataaatggcaaagaagagtcatagaaggattatcttcaagggtgatgaagctgaaagatcaactatggatctttgaaaaaagagttaaaaagttttcaaatggtattgacctagagaagatggaaactgcactagccatcaaggagcacgaaaatttcacaacagaatggtttgcaccagaagatcagaaaggagttcacttagaggaaagaagcctagagagcaagttgttgagcgaggaggaaactcctattatgacttattctctaggagtgcctaaacagcctaccaacccctctgctgaagaagaacacttgacacttgattctgttattgaagaacttctggaactcaggatagaatacaaagctcaagaggataccattggggagctaacttacaaaatggaaggactgaaccatgcaatcttggaacttcaagaaatgattaaaggctacctaagttttgaatttaaggattggtcaaaggagtctggttcagaagaagaagactactctgctgatcagaaagaagcttattttgaagaaaaatcaaatgagtacccatcctaccatatctcaagagaggatgcagagtatgatccaagcattgaagattcaaccactgaagatgaggacttctctgttcctctctttaaccttttttctaactaagctctgtaagggttaagcttagtgacttaaaacaagctcacttgggaggaagtcccatgtctatccatgtatataactttctatttttcttgttatttttgatgtttttgtttaagtgtttcaggtttgttttagtgaccctaagggagtcaacggtcgagtaaattcaaaccaagtcaagaaaaatctaaaccgttgatcgagtaaaatgaggaggagtatctttagccattgatttggatgaccaaatgagaggagcattaccaccgtttgatagagtgattttttgcgattcattctggtccgtttgatcgagtgattgaggatggaggatttctcaccgtccgatcaagtgaagaaaccaaagagaccctattcgtaaacaccgacgcctcgtgaccgcctccattgaaacgctgttgtccctttgtcttcttgacaatctctattttgtaattaataatggtagatcttcgacatgtttgataaaacagtatgttggatgcgcaaattcggaatgaatatccagaactctctgatgatgaggttgcgtcgaaaagagatgaagattttcatatatggattcgccaatatgtaatcaaatactaccgatcatctctctgatatcctacaaattaaaagtgtacgtttacttctttattttatgatttatcagatttttatgtaggtggaagcaacgcgaagtcatcaaagttttcctccatgggtttatgaaatagtagaaggtcctgaaaataaagtcaagtcttggcccatgtattttacaagagcgtatatgtttcacacgcaggatcatgggcgtaccaataaaataatgaattatggggtatgtgttcgaggccaaaattattctgaagcatctcatgaagaagatgtttatgggatcgttgaaactataatcaagctcgagtatccaggatttgttaacttaaagatcacacttttnnnnnnnnnnnnnnnnnnnnnnnaagttgggaaaaggaattcgtatgagaaatagaggggttgtagacgtgctagaatcagggagataccctaattacgaacaatttatattaggtaactttaatttctttagtaagtatttgtaagagaattcatatttcatttaaaattttggcattttacagggtgtcaagctgatcaggtttgttatctttcttactcgaacatcacacgacctcgaaaatcgtggcttttagtttgcaaagtcaatccaaggaatgttgtccaagggaagtttaccttaaatgatgtagctgtattgcaacaatctttggatgaaagaaacccgagcatgattgaagaagttatcattgagagcttagttgacacaaaccgtcatgatgaacctattgattttgatattgaagatgctgaagaaggagatgaatttcactgtaatgaatccacatctgaggatgcagatgaagaagaggaagatgatgaaaaatctgaataattatagtagatataatttttatgtgtatttgtaacatatataaataaaacttttgtttgaatgttattttcaatgtcttttaaaatacctttcttcgcaattactaaccaaatttgtaccaactcggtaaaatgtttgtaaaatgtttccaaaatgtttttgcgacgacaacagagcacagacgcaccgttgcaacgtttgtgtaactgttttgtgactaaattgcgacgattgtgcaacgtttaaaattttgttaaatttattaagtgtttctcgagtaaatattgtgcgaccgaatagggactaacgagcattttcatttgtaaaatgtttcaaaaatgtcacaaaacagtcgctaggtgcaacatttttgcgacgacaacaaaacacagtcgcactttgcaaccaattagctacttattaccaacgctcgagttttgaatttcgaaattttaaagttctggtacgtttatatgttttcttatacgtggacactttaatttggtcgatattatatataaaaacataaccaaacacttcaaatctgaatattacaaaccaaacattcaaaaaaacctaatctatatgataaggttcatgtgaattcattttcatgattgatcttttcaaacaagttcttaaataagtttgaaaccaatcatttgtatacctaaagttctttatgtactaaaatggttgtttttcagtaatgtttatctatagaatggatcaaactatgtggatttcaaaagtttgtcttgtgacctattccaaaatgtcacaaaacagtcgctttgtgcaacttttttgcgacgacagcagaacacagttgcactttgcaacgtgtgtgtaactgttttgtgactaaattgcgacgattgtgcaacgttttaaaattttgttaaatttattaagtgtttctcgagtaaatattgtgcgaccgaaaagggactaacgagcatttttatttgtaaaatgtttcaaaaatgtcacaaaacagtcgctaggtgcaacgtttttgcgacgacaacagaacacagtcgcacttttcaaccaattagctacttattaccaacgctcgagttttgaattttgaaattttaaagtttttgtacgtttagatgttttcttatacgttgacactttaatttggtcgatattatatataaaaacataaccaaacacttcaaatctgaatattacaaaccaacatttcaaaaaaacttaatctacatgataaggttcatgtgaatccattttcatgattgatcttttcaaacaagttctcaaataagtttgaaaccaatcatttgtatatctacagttctttatgtaataaaatggttgtttttcagtaatgtttatctatagaatggatcaaactatgtggatttcaaaagtttgtcttgtgatctattccaaaatgtcacaaaacagtcgctttgtgcaacttttttgcgacgacaacagagcacagacgcaccgttgcaacgtttgtgtaactgttttgtgactaaattgcgacgattgtgcaacgtttaaaattttgttaaatttattaagtgtttctcgagtaaatattgtgcgaccgaatagggactaacgagcatttttatttgtaaaatgtttcaaaaatgacacaaaacaatcgctaggtgcaacgtttttgcgacgacaacagaacacagtcgcattatgcaaccaataagctacttattaccaacgctagagttttgaatttcgaaatttttaagttcttgtatgtttatatgttttcttatacgttgaaactttaatatgatcgatattatatataaaaacataaccaaacacttcaaatctcaatattacaaaccaaacattcaaaaaaacctaatctacatgataaggttaatgtgaattcattttcatgattgatcttttcaaacaagttctcaaataagtttgaaaccaatcatttgtatacctaaagttctttatgtactaaaatggttgtttttcagtaatgtttatctatagaatggatcaaactatgtggatttcaaaagtttgtcttgtgacctattccaaaatgtcacaaaacagtcgctttctgcaatttttttgcgacgacaccagaacacagtcgcacgttgcaacgtttttgtaactgttttgtgactaaattgcgacgattttgcaacgttttaaaattttgtaaaatttattaagtgtttctcgagtaaatattgtgcgaccgaatagggactaacgagcatctttatttgtaaaatgtttcaaaaatgtcacaaaacagtcgctaggtgcaacttttttgcgacgacaacagaacactgtcgcacttttcaaccaattagctacttattaccaacgctcgagttttgaatttcgaaatttttaagttctggtatatttatatgttttcttatacgttgacactttaatttggtcgatattatatataaaaacataaccaaacacttcaactctgaatattacaaaccaaacattcaaaaaaacctaatctacatgataaggtgcatgtgaatttattttcatgattgatcttttcaaacaagttctcaaataagtttgaaacaaatcatttgtatacctaaagttttttatgtactaaaatggttgtttttcagtaatgtttatctatagaatggatcaaactatgtggatttcaaaagtttgtcttgtgacctattccaaaatgtcacaaaacagtcgctttgtgcaatttttttgcgacgacaccagaacacagtcgcacgttgcaacgtttttgtaactgttttgtgactaaattgcgacgattttgcaacgttttaaaattttgtttaatttattaagtgtttctcgagtaaatattgtgcgaccgaatagggactaacgagcatttttatttgtaaaatgtttcaaaaatgtcacaaaacagtcgctaggtgcaacgtttttgcgacgacaacagaacacagtcgcactttgcaaccaattagctacttattaccaacgctcgagttttgaatttcgaaatttttaagttctggtacgtttatatgttttcttatacgtggacactttaatttggtcgatattatatataaaaacataaccaaacacttcaaatctgaatattacaaaccaaacattcaaaaaaacctaatctacatgataaggttcatgtgaattcattttcatgattgatcttttcaaacaagttctcaaataagtttgaaaccaatcatttgtatacctaaagttctttatgtactaaaatggttgtttttcagtaatgtttatctatagaatggatcaaactatgtggatttcaaaagtttgtcttgtgacctattccaaaatgtcacaaaacagtcgctttgtgcaacttttttgcgacgacagcagaacacagtcgcacgttgcagcgtgtgtgtaactgttttgtgactaaattgcgacgattgtgcaacgttttaaaattttgttaaatttattaagtgtttctcgagtaaatattgtgcgaccgaatagggactaacgagcatttttatttgtcaaatgtttcaaaaatgtcacaaaacagtcgctaggtgcaacgtttttgcgacgacaacagaacacagtcgtactttgcaaccaattagctacttattaccaacgctcgagttttgaatttcgaaatttttaagttctggtacgtttatatgtattcttatacgttgacactttaatttggtcgatattatatataaaaacataaccaaacacttcaaatctgaatattacaaaccaaacattcaaaaaaacctaatctacatgataaggttcatgtgaattcattttcaggattgatcttttcaaacaagttctcaaataagtttgaaaccaatcatttgtatacctaaagttctttatgtactaaaatggttgtttttcagtaatgtttatcaatagaatggatcaaactatgtggatttcaaaagtttgtcttgtgacctattccaaaatgtcacaaaacattcgctttgtgcaacttttttgcgacgacagcagaacacagtcgcacggtgcaacgtttatgtaactgttttgtgactaaattgcgatgatcgtgcaacgttttaaaattttgttaaatttattaagtgtttctcgagtaaatattgtgcgaccgaacagggactaacgagcatttttatttgtaaaatgtttcaaaaatgtcacaaaacagtcgctaggtgcaacgtttttgcgacgacaacagaacacagtcgcactttgcaaccaattagctacttattaccaacgctcgagttttaaatttcgaaatttttaagttctggtatgtttatatgttttcttatacgttgacactttaatttggtcgatattatatataaaaacataaccaaacacttcaaatctgaatattacaaaccaaacattcaaaaaaacctaatctacatgataaggttcatgtgaattcattttcatgattgatcttttcaaacaagttctcaaataagtttgaaaccaatcatttgtatacctaaagttctttatgtactaaaatggttgtttttcaataatgtttatctatagaatggatcgaactatgtggatttcaaaagtttgtcttgtgacctattccaaaatgtcacaaaacagtcgctttgtgcaacttttttgcgacgacagcagaacacagtcgcacgttgcaacgtatgtgtaactgttttgtgactaaattgcgacgattgtgcaacgttttaaaattttgttaaatttattaagtgtttctcgagtaaatattgtgcgaccgaatagggactaacgagcatttttatttgtaaaatgtttcaaaaatgtcacaaaacagtcgctaggtgcaacgtttttgcgacgacaacagaacacagtcgcactttgcaaccaattagctacttattaccaacgctcgagttttgaatttcgaaatttttaagttttggtatgtttatatgttttcttatacgttgacactttaatttggtcgatattatatataaaaacataaccaaacacttcaaatctgaatattacaaaccaaacattccaaaaaacttaatctacatgataaggttcatgtgaattcattttcatgattgatcttttcaaacaagttctcaaataagtttgaaaccaatcatttgtatacctaaagttcttgatgtactaaaatggttgtttttcagtaatgtttatctatagaatggatcgaactatgtggatttcaaaagtttgtcttgtgacctattccaaaatgtcataaaacagtcgctttgtgcaacttttttgcgacgacagcagaacacagtcgcacgttgcaacgtttgtgtaactgttttgtgactaaattgcgacgattgtgcaacgttttaaaattgtgttaaatttattaagtgtttctcgagtaaatattgtgcgaccgaatagggactaacgagcatttttatttgtaaaatgtttcataaatgtcacaaaacagtcgctaggtgcaacgtttttgcgacgacaacagaacacagtcgcactttgcaaccaattagctacttattaccaacgctcgagttttgaatttcgaaatttttaagttctggtatgtttatatgttttcttatacgttgacactttaatttggtcgatattatatataaaaacataaccaaacacttcaaatctgaatattacaaaccaaacattcaaaaaaaactaatctacatgataaggttcacgtgaattcattttcatgattgatcttttcaaacaagttctcaaataagtttgaaaccaatcatttgtatacgtaaagttctttatgtactaaaattgttgtttttcagtaatgtttatctatagaatggatcaaactatgtggattttaaaagtttgtcttgtgacctattccaaaatgtcacaaaacagtcgctttgtgcaacttttttgcgacgacagcagaacacattcgcacgttgcaaagtttgtgtaactgttttgtgactaaattgcgacgattgtgcaacgttttaagattttgttaaatttgttaagtgtttttcgagtaaatattgtacgaccgaatagggattaacgagcgactcatatccttcttcctttcaatcctcttgacgagcgactgctttcattttatcgtttcctttaaaccaatctagggttttcacagtcgctctcatatccttcttcctttcaatcctcttgagttctccttcttccgttcaatcccctgtaattctcttaaaccctctccctagtcaaattctagatctagggcttgtagatctagaaatcagggtttggaattctttctttctaaactcgaatttcaacgatggctggtggtggtaaaggcaaatcatcaagaggtcgaggtcgcggtagggaatcgacgccgaaggcaaaggctttccacgataaaaatcctattgaccgtgggagagaagtcggaggttcttctcagtcatcaaaccctaattcagcgatgctctccgttacacagtcaaatagaagccttccttcccaatatcctttggcgacacgagcccagaaatcaccaacccaagcaacacaaaccccgactcctgctcg

SEQ ID NO: 35156 - DNA, 678 bp, Arabidopsis thaliana landsberg
aggcactgtttctgtcaatgtctgttcaattactctcttacccgactgtgcaaattatgtttttggcacagatataaagagatccctcaacataccaaaactagctgtgactccaccggttgtacgagatgcacgacttgaggtatggaagaacttggcacttgattggtaattacataacaccgaggaaatttttgccattgaatcaaacttaagcttccttgttgcattcgagctcctgcggaagaacacactaaaataagaggtaaacattgattggctgcatactcggtccatcgagttattttttcttctactacggatcccatgctaccccccatataccgaaaatatcataaccccaagggctaccgtaataccgtttagttgacctgtacatgtttgaacagcgtcatgtcaatcctgtagttttgtgcgcagaggtctaagaggatttgtataggttcctctttagcatgtaatttgataggatccgcatagaccttgtcttcatctataggattacaaggatccggatctatcgaaagctggattctttctggacaagtcgttcccaaataatgtccacattgttcacggacattcataaagactttcgagtcctctatcaacaaccaacctagccatccgcctgtcgggcttatgtagttctagtta

SEQ ID NO: 35157 - DNA, 4790 bp, Arabidopsis thaliana landsberg
ctgatgaaaaggtgtgtatatataaatacaactgatttgaagataacattaacttgatcagtccagctgatataaagtaacatgaacttgatgattgctcagggtatggaataactccgatattgaatcctagaatcagattacaagtcattgcggtccatgttgattagtttatctaaggaatagaaaagccaagtttcactttccatcaaattattagatgtttcgtgattacaatttattggtttttttttgtgtcagggtcaaattctaccaacagtcaaccaacttgctaataaaacggatttcaagccccctttatctaagggtgaaaagaacacaagggttcagcccgacagagcaacagatgtgaaaacgaaggagatcagagacaaaattattcaagctaaagcctacctgaatttcgctccacctggaagtaactctcaagttgtgaaggagttgagaggtcggctgaaagagctggaacggtctgttggtgatgcaacaaaggacaaggacttatcaaaggggtaagcacaactgcttgattcaaaaggagaacataccataattgcattcagaaatttgctgttacaactacaaccttttagtgccaaaagtcgtgctgtttaagaatattattttagtaacctctgacatgattgtttctttcagcgctctccgcagggtgaagcccatggaaaatgtgttatataaggctagtcgtgtctttaacaattgccctgccatcgctaccaaactccgtgccatgaattataacacagaagaacaagttcaggcgcagaaaaatcaagcagcgtatctaatgcagcttgcagcaaggaccaccccaaaagggcttcactgtctctcaatgcggctgacatcagaatacttttcactggatcctgaaaaaaggcagatgcctaaccagcaaaattattttgacgctaatttcaatcattatgttgtcttctctgacaatgttttggcttcttcagtcgttgttaactctacgatatcttcatcaaaggtatcatgcatttcttatacaaatttctacttgggtatcattatatgttatacctaattttagagtgtcttacactatatcttctcatttacttccgccacttattaatgtggcttctgattgctgtttgcaggagccagaaagcatagtcttccatgtcgtgactgattcacttaattacccagcaatctcaatgtggtttctgctaaacattcaaagtaaagctactatccaaatcctaaacattgatgatatggatgtcctgcctagagattatgatcaattactgatgaagcaaaactctaatgacccaagaatcatttcagcgctcaaccatgcacgcttctatctcccagatatcttcccaggtctaaacaagatcgtactcttcgatcatgatgtagtagtgcaaagggatctaactagactgtggagccttgatatgacggggaaagttgttggagctgtagagacttgtcttgaaggtgatccttcatatcgttcgatggactcattcattaatttctcagatgcatgggtttctcagaaatttgatcccaaggcttgcacttgggcattcgggatgaatctatttgatctcgaagaatggagaagacaggagttgacttctgtatacctgaaatacttcgacctggtacaacattttatcaccttttagttctctgcatcaaaaattcacactgttaccttgatgagttttgaattcaaaatggtttatgtggcttatgtccgtcaatagaacatcttacatatgtgtatgttgtgaaattgttgttttggttgcagggagtaaaaggacatctgtggaaagcagggggattgccagtaggttggttgacttttttcgggcaaacgtttccgttggaaaagagatggaacgtgggtgggttaggtcacgaatcaggactcagggcaagcgacatcgaacaagcagcggttatacactacgacgggatcatgaaaccatggctggacatcggtatagacaagtacaagtgctactggaacatacatgtaccttaccatcaccctcacttacaacggtgcaacattcacgattgattttttgaaacaagttaccacaaaacttagattcaattcgattcttttcttctttccaaaatgttataattagcttcattctttaaacgatttcttgtgtaaatctttgttctttttgacacaacacacaaaattctcagagcagaatatcagatatagttcacagcaacataggtgttgttcgttctttgggttgttatatattgcaatctggatgcagtttattatgatgtatcagtagagaagagagaaaaagattgtgttggagggaaagagatgaaatatgacacgtggagggcgtcgattggtggagtatggatagaagcatatccaagttagatggcttgtgttggttcgaacagattttttatccaccacatatttatgtttgatccaaaagccaacacaagcaaagaaattaaaagtgttcttgttgctgtagaacacaaacagaacaaacaaaaaattaattgaagaatctctcagtcgttaggggaagcaaatagagaaatggctagctttactgcctccgcttccaccgtctccgccgctcgtccggctctccttctcaagcctaccgtcgccatctctgctcctgttcttggtaaaaaagccttccttgatctttctcagatctcatcttttagtagaaattcattctggttatgtgcaaagtgaagaagatctttgtttgcttatatttgttgagtggttttgaaaacatgtatagagataagtctagtttggtggtgaatcaacaagaagtcaagaaacaattttgatctaaaggtttgattgtagtcagaaccaaacattaataatagaagtattgtgtaaatgagagtgtgattttagaccaaactttagtttagtggagaatcaacaataaacaaatgttgattgtaaccagtttaactattgtttgctcaggtttgcctccaatgggtaagaagaagggaggagtgagatgttcaatggagacaaagcaaggaaacgtctcagtcatgggggctggagtttcagctgcagcaacagctgctttgacggcggtgatgagcaatcccgcgatggctttggttgatgagaggatgtcaacagaaggaacaggattaccctttggtctaagcaacaacctcttgggttggattctgtttggagtctttggtttgatctggactttcttcttcgtctacacttcatctctcgaggaggatgaagaatctggtctttcactctgaaggaagaatcaatctttcgtcttctcatttccattttcatgtgagaacatgaatcaaaagtgttcacccttctagtttcttgtaattgttaagtaaagactaaaaactattttcatgtgtgtttactttcccccattctctttatcttgtcataacattgataaggaggagattatgtgattattaaatatcatgcatgacatgttcatcaaaaccaaacaattgaaatggatgtattcaaaagcccatccataatggtcagtgagaaccaaattgataaattaatcttacatttacatttcaatcactgattattacacaagttttagagtctcttgatgaatacacatatagttaacatggggtaagacaataaagcaaattatcatttattcattcattacataatatatttggtagtaaaccatcttcactccattctccatagatgatcaataaagaccaaactcactttttaccatgcaaattatcaaagtaacctttaggatcactctcaaagttatctcttgaaatgtaagaagatccattgctccctggtgctaccatgtagccacctccgcccccaccaccaccgcttttccctcctccaccgcaaccacctttcgctcctccaccgccgccgccgcctcttcctcctccactgccaccaccaccaccaccttttcctcctccaccgctaccgctaccgccttttcctcccattctttgaaatagtagttcttagtttcactctttagaagtttttaagattttgtgtgaatgagaaacgaaagtgaaaaggatggggtatatataataggtgaaaatttcaaatgcaagatcaaaaccaatctttcccaatgaaaatacttaatttagtcgttgcatttgattaacccaagtaaccaacccaatcgcctcgtaaacgtaataagttttattaatagggaacgtacgttgaccaaagcatgcaagtgagatgattgtgacattttattttcaaaagatggatgcgtcatttacaaattagggaaaatgtgtatattatatatatgtgcgtgtgattatcaagaatgatcaaggcggagctgagacagatggtggtggatatcaggagaatgatgatcctcaaaacggagtcgttcggcttgaatccaaagacgttcactgttccgaaccattcccttattcgcgtcatgacgccaaaacggtggaatttgtaaatgctctttcaaaaagtctgacgctttgttcactagcgcatggtctctcccactatactagcacaaatctctctccttttccgtgaaacctaaaaatttcaaaaatatataaagcagctgtcaatagtgtttgattagttgcatcaaatgactaaatcgactgttagtttcacgtgttattcggttcaatcatatcgcaaagactaatta

SEQ ID NO: 35158 - DNA, 4105 bp, Arabidopsis thaliana landsberg
agtctcagagtttttgaacgtggtcaggatgctaatggatctttctcctttcacaaaacctggtgtgcaagggattcgagctcatacatctcttcgggagtaagtttcactgataaagctccaatgttctggttgaagttttcaatcttagtggttcctgggatggggcaaacatcatctccctggtgatgaacccatgcaagggctagttgtgcgggagtgcatcctttcttctcagacattgcagaaaccttctcaaagagaatcttgttgtggtctaagttttcccgttggaatcttggtagagtctgcaataagaaacagaattgaacagataaacagtgagtggattaccaacagttcatcaatcaaacaagtcatataaaggctgtgtacttgcctttctgaagtcattattgtctaggttctcaacaagcttgggtcctgaagcaaagaaacctcgtcccagagaactgtaagcaacaattccaatcccaagttccctgaagaaagagagagagaagatgttacatatttgatagatagtgcatcaaaaaaggaggatgaaatgaaatcttgatacctgcaggtaggaatgatatcttcttccacgtctctcgaccataaggaccattctatttgcacagcggttatcgggtgaacagcatgtgctcttctgatagttgaagctgatgcttctgacaaaccaatatactttattttaccttcttccactagcttcttcagttctccaatctttgaaattgacaaacaaaagaaattgctaagttcagcaaaaggtgctggctttctataaaggtcatgaagtgtggcaaaccaattagagctcagagccaaacctaaaagagtctattcaaacgaaaaattcttaagggatgataagatcatatcaccagacaacggttcttcatgaataagctagcaatttcagagagagtgacccaagcagaaaacatagttctgaaagtgaaagctaaacttttggactctatattatacccaacatgtccctagccaaaggtgtgaaggtcacggagaagaactatataacttccatttcatttgaaagttgcaaaaccatgaagtaggaatggcaagaagagggcttacagtgatttcgatagggacacgagtatcgacacgatgctgataatagagatcgatgcaggcaacatctagcctctttaaacttgcctcacaagcagcccttacatactcaggatctcctctgacctctctcttcccctctgcataactgattccaaatttggtcgcaagttccactttttctctcactccatccttgagagcctaacaaaaatccaaactttttcaacatcgaaatcatctcaacagctatgaagagaacaatctttgaaaatcaaccatcttatagcgtggaatctaagaaagcccaagatcaaatcgaagatttggaataatcaaaatcgaacctttccgaggagaacttcattggtctcagggccgtagatatcggaggtgtcaaggagagtaacgccggagtgaatagcgtggtggatgagagcgatggcttcattttccggcttgggagcaccgtagaaagcggagaggcccatgcaaccaaggccttgcgcagatacctcaaggccttggcttcccagcttcatccttctcactccgcaagcttccgccatgaatctctctgtcacaactatctctgtctcttcacttctctatgaggtgactcttgtagagctgtgaattttttagtggagttgttgttgttggtggtgatggtgcgtgtgaatgtgatgatgaagaaaaagccgcgtggtcgcttttgtctggttggtacagcttttcacataaattaaatttggtaaccaaatagagtaatggaattttcacaagtcatactcattttccatgtagtaggatatatatacagtactctaacatgtctcacatgtgatttggtcgaaaaaaaaaaaaacatgtctcacttgtgacttgtgagaaactataaacctccaaaaaaaaataaaaaaattgttacttcaaagttaaaatgcagaagaagaaaccaagaacgaaggcgatggaatggaaccgatacaattagtcgcacatatccttcatagagttgggtgacgatatatagagttgggttatttaagtttgtaccagaagtcagaacataactttctttatagagtttggtcacaatgtatgaaatgtaaattgaagttttcacttggggaactctatacattatttattcttcgaggcattatcccttgatagttttggctttccctgggaatgaacctaccataatccactctcgaagacacagcacttttattaccttgatctagctgacataacttagaccacttaaatgtcatgaacccccaccacaatcagagaaacttcagccggttttaagcggctttccaagcagacaatggcggagtctcagcgtttttgaaagttggtatcatgttactgtatctatctcctttcacaaaacctggttgggcaatggcctcaagctcatacatctcttgcggagtgagtttcactgctaaagctccaatgttctgtttgaggttctcgatcttagtggttcctgggatagggcaaacatcatctccctggtgatgaacccatgccagggctagttgtccaggagtgcaccctttcttctccgatattgcacaaactttttcataaacaatcttgttgtggtctaagttttcctcttggaatcttggtagagcctgaaataagtgggtttatataaagccatttgattaatccacagcttatctaaggctcatcaacaaacaagtcatataaaggctgtgtacttgcctttctgaagtcattcttctctaggttctcaacaagcttgggtccagatgcgaagaaacctcgtcctagaggactgtatgcaacaatcccaatcccaagttccctgaagaaagagagagagaagatgttacatatttgatagatagtgcatcaaaaaaggaggatgaaatgaaatcttgatacctgcaggtaggaatgatatcttcttccacgtctctcgaccataaggaccattctatttgcacagcggttatcgggtgaacagcatgtgctcttctgatagttgaagctgatgcttctgacaaaccaatatactttattttaccttcttccactagcttcttcagttctccaatctttgaaattgacaaacaaaagaaattgctaagttcagcaaaaggtgctggctttctataaaggtcatgaagtgtggcaaaccaattagagctcagagccaaacctaaaagagtctattcaaacgaaaaattcttaagggatgataagatcatatcaccagacaacggttcttcatgaataagctagcaatttcagagagagtgacccaagcagaaaacatagttctgaaagtgaaagctaaacttttggactctatattatacccaacatgtccctagccaaaggtgtgaaggtcacggagaagaactatataacttccatttcatttgaaagttgcaaaaccatgaaggaagattgacaagaagagggcttacagtgatttcgatagggacacgagtatcaattcgatgctgataatagagatcaatgcaggcaacatctagtcgcattaaactagcctcacaagcagctcttacataagcaggatctcccttaaactctactttcccctctgcatacctgattccatatttggtcgcaagttccactttttctctcaccccatccttgagagcctgacaaaaatccaaactttcaacatccaaatcatttatgaagctcagcgaatcaagtccagttcccatatctaattcacgaactcaaatattcaacaatatcaaaaggggagttatcaaaatcgaaccttgctgaggagaagctcgttggtctcaggaccgtagatatcggaggtgtcaaggaaagtgacgccggagtgcatggcgtggtggatgagagtgatggcttcggattccggcttgggagtaccgtagaaagcagagagacccatgcaaccaagagcttgtgccga

SEQ ID NO: 35159 - DNA, 2064 bp, Arabidopsis thaliana landsberg
ccaccattcagcacttttagccagaaaaaaaaaagaagaaagatagagttaaagtaaagcccaaacccaagaaaaaaaaaattgtccagcccttttaaatagggtgaagttttcatgaatgcaagacaagaaagaagcatcccgccaatggctgtgaaaaagtggctgacaaatataagtgcaagcccctctgtaggcccattgataaccgaaagaataagtgtgttggtgaaatagctagagaaaggtaaagaaaagtataagaaaatcgctaaaacatttatggatgttttaggtaataaaagcagtacttactgttcccatgtagctccataaaatggaatagctgaaataacccagaaccagaaagtatctcttccacacattgcagtgcttccaaatgccatggcttcaaactgtttttagggtaaaaccttcataatcgactccaagacgagtactgaattaaaaaagaaagattaaaggattgataatagcataccgcacaagcaagcgcgtcacaacctgcaatattggaacacatgtcagaaaaatctagaaacaaactgaaaacagataatcaaaggaggaacatgggaaaaataaatcaccatgatcgaagagctctcctagggggctagaggaatttgtccttcttgcttgcttcccatcaaccgcatcaaatgtctaataaaagctaaaaaggtgtaagataaaaaagacttcaaaacaccttcaccagcacatataacagaaagttaaacttttgaagaaaaagagagacgcaaacctgatacaagaagagaagtaaaccatgtgcgaagtgaacccatcgtggaggaggagaatccaactgaggtgaatatatctgagacagataaagaaaattgtcttcaaaatcaaatccatatgcagaaagcaggcatatttaccaacaagaaagtaaccaaatacttcaagaaactatagaacaagaaatcaaagaatcgaaactcacatagcctagcagggaggaagtgactagaaacataaaccccataagcgttatctgcgaaacaaaaacacaaagccaaaagttactaactcaaacttaaagaagagaccacacatagcacaatagcaaataggaattacttataccatgtttggtctggaatggtccaaagagaaacatgaaatgacaaacagagttaaaaaaacatcagtctgattagcctcagcaagtaaaagttattatacatgcaacgaaacagtatgaaagagataccacacttacggcatccatagagggaagactttgacaaatcgagtccaaaaaggttggaggacgtatttggcaagataagagtgatccactccactgtatttgtgtttctcaagagcagctacaccatgagctcctatgtaacccattctctaacaatccaaattgggtctctctcaaatcaacctgttcaaagatcaaaaccacaaacagaccaagaatgtcattaaaggttcaatcttttgttcaaagacgacgacttttcaaatccccctaagcaataaacacgaaatcgacatggacccatctgataaagacaagacttttattttttacaaaaatgaatgaatccttcagattcatccacatacacgaacttggagaagcgattggaggagtataacgaaactcgactttttaaagatgttagattccagtaaaggaggagcagattcgatctaagattctcaagggcaaagaggttagagaagaagagaacttacgacgcttcggcgagatgctacaaagccgaagacgacgtcgaggaggcaagagtcagcgaagaatcagcagaggagagagagagagagagagagagagctattggttattgttgcttacgagtctctctcttcttctctgtctcttggttgcgccctaaaagaggcgaagcgggacgagagtggaatggagtgctttgcgtatctgtaacgatcttttattttattgtttcccatttttcagtgccacgtccatagacattctacttctgtgtaaaaaaagcatatagttaaataaat

SEQ ID NO: 35160 - DNA, 1002 bp, Arabidopsis thaliana landsberg
ggttccatttcataagagaggtggtgcgtgcaagagttttttatgtgttgaagattcacacctcaaggaagcgtgcagatgcattaacaaaatgcattccagtaaacaagtttgagtcagctttggatgctctgaagctgatcaagtgggaatgattaagttcagcccctgctggaggttatggccaagtatagtgattcactggtacgaagaagaggaatgaggatcaaggtggagattgttaagaagtgatcctaattctggtttagttgcagaaacctgaagtcgacttggttaaaggactgaattggatttggattggtattggagccggttaagctctaatgttcggttattggaagaagacttggtttgactctggtttacaaggagaaacagaagactcttgttggcctagagggtttactaataagacttgtatataaggtctctgtagtcgtctttcttattcattccgttagataaacagactctgtaatcttcttcttcctcttgaagctccattgttgtgagctgagagaaacacttctttgatagtgaattgctggtcagaatccagccgagacgtaggcttgctcacatcgagtaagctgaacttttaaacctcgccgtgttgttctttgcttgtttctcatcttctttctttgttctttaagtcaaatcgaagagcgtaagagagagagcttgagagatcgattgttccgtgtgttgggtcttcgatcggattgatttcgaggttggttttagtacatcaagcttaaatggggaatggaatacaaaggtaattttcctactctctgttgaaattttgcattttgataactaaagcttataacttcttattgtcactttcacaggttttttcgcttctggtggctcctacatgaatttgcaggtatgggcttagctttttttgttcaacctaggggattgctaaatgtgaatatccagggtccttgggcatttgattttctttaaaac

SEQ ID NO: 35161 - DNA, 2588 bp, Arabidopsis thaliana landsberg
ctagttttaaacctatacttaacctatacttcgatacatcaatatattagaaccacgtatctctccaaattatttttttaaaatcaattcatatattaataaattaataattatagaaattaatcgaatatcataagaaaatttgtttcttgttacacattgcaaattttttaatttctcatttctataaaattgattgctattccatctcattctcctaaaatataatatataaattatataatagcaatgatattgattgagtgacaacgaacattgcaagtgctaacttttttttttttttgcaagttctaactttatatagctgttaatagcgtcacgcaccatggcccatggtctacggtccatggtacactattaaagtcttcatatctatctttttagccatgtcaaacgtttcaactacctctaatttcggcacgaaaacatttaaattacgttaaacaattacgcttacattttttgaatacatgttaagtttcttggttttcgagatgctgaatttcgaattcttacatataaaaaataaccaattattcgttgggttacttcgtaatgtcgtacgtattagttagagctttgatcctaaatgtcccaaaaaaaataacaaaataagtcattcttgaacagttgaacttatatatacatccattgtgaatcttgtcatatgtttataaaattttgattgaaacttacatatgtaaacagcgacatgaactcatctggttgagtaaatatttcttttcggtagatgtaatttttcatttcaaaattcgatttgttagtagagtaaaatagtcatattcaagatcaaagaatagaattatatttgttaaatgtatctccaaaaaatgtgattatgaaattcaatttttccactacctatataatataacacggtctttaaagaaaacaaaagtcgaaaaattaatcaacattttgaaaatagtaaaatgttgagatcgagatctacctcgaattcaaagaagtgaaacaagaatatctacttgggaacttgaattacgttgtgtactacagattcaatcaaaagtacaacattaaactctttctcaacttgctattgtagtattattcagtagtactattgtactaataaggataaatttgtccgctaaaccctctctgtaatctcgggtggttaccaaactaaacgcaagaatttataggccttggcccattttaaagcccacttcttgatttcttttttcccaagtctccttcccgcttataaaacctaattttaggttctcattgcgtcggttaccactttctgtcttcaaacaaatcttcgccgttgggttccagaaacaaggtatgatcatcgataatctttctcagacgttgcgcttcttaggttcttttttgcgtcaactttcgattgttgctgtcaatttggctcgactttgatttaggcttctttgtggaatttatcgattttggttttcgtgacacataatctttgaacttctcaatgttagtttttgaatttgagaacgatacaactgttagtttcatattgaactgtatctaatatctccaagtatagtaagttggatttaatttgggttttcgatatttatctttcagctatctataatcatggttcttggagatgccaataccaatcagaaccaatctgttagaagtaatccgttcttgttatacgatgctgatcagcccggtcaaagccttgtaggagacgaggttcttactagttctaattaccatatttggctccctctaatgacattatttttaagagtcaagaacaagattggttttgttgatggaacgcttccaaaaccacctgccaataatcaaacatctgctatgtggtcttgttgtaatagcatggtgatgtcgtggattacgagttctgtatctgacgatatcagaaagagtataatctaccataacactgctcaagcaatgtggtcagcgcttaaagataggtaccacatgctttagaatttatcagatcaagacacagttatggaacttgaagcagcaagatatggatatcaatatatatttcacaaggttcattacattgtggaacgagttaaagtattattaacctcctatggtgtgtaattgatgaggcgctaatgaagctttggaaaaatactaacaagaggagggccttacgcaggatttacacggtgtgaagcaatctgataggcaaacaatccatatgattttgacgaaggagcctttgcctgatgtatattgggctttgaaatgcctagagtgtgaggaatctcgaagaccaattgatgactaccggacgttatttatggagaggaggatgttctagggtttacaaaaacagaactttcttctatcgacagaccaaccgactgttcttggagtgacagactgtctttacatactgcaatgtgctttagcgatcacagactcaatgaaccctacattacttgaactatacattactttctgacattatgaatacgttgtgtcattgttatctaccattctaattatcagacggtgactaaaacatgatatctagatggtttattaac

SEQ ID NO: 35162 - DNA, 2352 bp, Arabidopsis thaliana landsberg
  unsure (1)..(2352): unsure at all n locations
aagatgctgcctatgttttatcattgattggtgtttgctttatcaaaatagacaaaaacaaaatttttaaaaatacacaaaatgtgtttgtgtttgtagtcattatgataagttcaaatgtcatttcatttactaattagtttcataaaaattcaccagatttttttttgtcgatatctcgaaactaaacgacatcgtttttggtgtctcagacacagacatatgcacctaccatatgagacagagacccattacttacaattttatataatacaacttgatttcttgaagttgtaaaaattgcattttataaaaacaatagcatttacttgtgaaggcaattaactaagcttttgtttagtaactttctcaatctccagacttagtttgattctgatgctcgtgtagatacatttcagctaaggcagcaaacgttgctgatccaatgggaagtacattctcgtcgaggaagaaataaggcgaatgaaccgaacgcacagaaccgatttcttcgtttcttataccgattcctaggtagtaaccgggtattttttgttgatagaaagcaaaatcctcacccgccattaccttgttacccggtttcaccttctcgggtccaagcaagagtttcaaaaccttttcagtgaattcgtgtagcttgtgatcgttcactgttgctggatacataggatgatcgtcttcatgcatatctatatccgctttgcatctatgtacttctgcttgtccttcaacaacctgtcagcaacaataaaggttagcnnnnnnnnnnnnnnnnnnnnnaatattagattacatttgaacattagtggttgtatatcatggaaagagagcttgtggatatatcaatggtttgttgtcccatgaaagatttactagaacagagtaacaagagatacaggtattagaacagatacaataaattacttcaaggttaaacttgatcatcagggtttagatgagataagattcataagatattgaaaaccaaagttcggtttcttctctgcatcgaatacttaaaggttgttttgaaacacgcgtacatacctctttcaaccgctgtatcaaccagttcatgccattggttgtaagactcctcaaagttcccccaaattctacatatgccggaatcacatcaaactcagaaccgccacttttcataaatgtaacagagagcacctaaaaccaaaaacaggaacttttagcatcagaagacttaagctttggtcttacaaatagtaagatctatatgcataaacaaccgtaagattttatggatgggaaaagtatacaacgtacatggcttaagagaggatctacttctctggagataataagttgcaatgctaagatggtagatgatgcagccaacaccggatcaacacaagaatacgtctccgaagaagcgggtgatttaccactcatgcttacactgaaaatgcttgtggatgccaaagcaggacccgagattgttgctaattctcctgtaggtaagccagtatgaacatgcatcccaaatattgcttcagaatcgcccaaagcaccttcttttatcatatgaaaagcacctgcaccaccttcttctgctggttggaaaagaagcctcactgttccctaagcaaagagtaatcttttcattcacaaaaaaaaattctcaatgtcataaaaaagactaaaccttacgtacattctccaactacaactacaacagtgctccaaatcaaaccaaaacaatgaaagatttatacttttgtacataaagacaatacaagattcatccttcttgcttttgctaagctaatcccacaaattcaaaacacatttacttcacccaaaacttacattgagcatatgtttgcgtttgctaagcaatttagcagcaccaagaagcatagtcacatgtgcgtcatgaccacacgcatgcattttgcctgcaactttgcttttatgttcccattcaactgcttcctattttgcattaccacaactaatattattatgtcaatatagtaaataaaaataatcctaacaaatctctatcccttatctgtataaaccatatcacctcaaccacacaatctatcattatcatcatatctggtatatcatgtgcacacagctagcctctctgtcagtgagtaactacaaatataagtacaaaatctttccaaaaatagaacatttcacatggtcacatggaacaaagaatataatgaaactagtttaagcattgttatgtgccaatataattggtaacacaaaatattgtacatttaacgtataaacaatttgcattattaatgatcattttggcttttctttcataaaact

SEQ ID NO: 35163 - DNA, 4129 bp, Arabidopsis thaliana landsberg
ataactagagatagcataaaacctaacaactatcatgctctgagataattttagaaacccaacaaacagaaacgaggatatataagcatacacacatgtcttcaatgtaaaacaacaagcaaatctccaccagaaaagtaaacgaaccaaagaagacaatgaagattcaaatagtattgttcgctttggttttaatcgccgtggaagctaatgcagcgacgcaaggaaaaaacacaacaatcccagcactaatagtttttggagattcaataatggatacaggaaataacaataatcttcccactcttctaaagtgtaactttcctccatatggaaaagattatcctggaggcttcgctactggaagattttctgatggaagagttccttctgatcttattggtaaccagttgaattgttattacatttttctaaattatgaatcatatctatttatatatattctgataagtatgtttaaaaatatttcagcggaaaagttgggattggctaagacattaccagcatatatgaatccgtatttgaagccagagaatcttcttaaaggtgtaacatttgcatctggaggaactggttatgatccattgacagcaaaaattatggtacaatatatcttatgttttccatcatgatccttagttttttatgggtaattcatttttcttacatttatgtttatttttatagtcagtgatatcggtgtgggatcaactcatatatttcaaagaatatatatcaaagatcaagaggcatttcggaaaagaaaaagccaaagatatcttggaacatagtttctttcttgtggtgtctagtagcaatgaccttgctcacacttatttagctcaagctcatagatatgatcgtacctcttatgccaatttcttggctgactctgttgtctatttcgtgagagtgagtactttattgtaaatatatagaataatacagaaactaatcaataatatattgttatatccactaactactttatcttatctataattgataattagaaattacataagcttggatctcggaaaataggagtgtttagtgcagttcccgtcggttgtgttccactccaaagaacagtttttggaggtttttttacaagaggatgtaatcaacctctaaacaacatggcaaaacaatttaacgcaagactttctccagctttagattctttagataaagagctagatggtgttatcctttacattaatgtttatgatactcttttcgacatgatccaacaccctaaaaaatacggtaaattcatctaacatatttatctacatagaaattatttatattttagttttattatatattttaaactaaatgttattcaaatgatctcattttgtttcaggttttgaggtagctgatagaggatgttgcggtaaaggactgcttgcaatatcctatttgtgtaactcattgaacccatttacgtgttctaactcttcagcgtacatattttgggatagctatcatccatctgaaagagcttatcaagttattgtcgacaatttacttgacaaatatttgagcaaagtatattgatgttgaacatctcaatattgttttttcttctttttcttctcattctcttatgtatacattcattactcaattttttaatgtactatactatatttttacccatcaaattattaactttcagactcactaattaaaaaattctcactactccctttaaagccaacacgttagatgttaagtggttgcattcgccctcataaccaattggaaagtggcccaaataagagaatatgatgcgacactaaaaagcaaaagaaatttttagccatttgagagatgatacaatgagatccagcgttaaaatgtatgacctattgattactgagaacaaacgaattattgtatttgtttatgatctttgagttcacaatcacaatggtttgcattctaattgtctaacaaatgttttgagaatttggttcacaagataagcaaaccagttacactcaatttgcataaagtctctaattagtaaaacaatacgcacataattcttaagatcacaagataggcaaaccaatcccactcagtttgcaattgcatatcacgtactatattgggtgtgattgaataagttattttactgggccgggcttcttggtttgtatctcaacaattatatcaacatttggcccacaagttcagactttcgaaaaccctaatcttatactcacctatataaactaaacttgtgtatccgctagggtttacttcatcgaaaatggcggaaagaggaggagaaagcggcgcagagcgtggcggtgaccgtggtgacttcggacgtggattcggcggtggacgtggaggtggccgtggccgtgatcgtggtccaagaggccgtggacgacgtggaggccgtgcctcggaagaaacgaaatgggttccagtgaccaaactaggtcgtctagtggcttacaataataataacgaagctagagcagatctatcttcattctctcccagtaaaggagtaccaaatcatagatcatcttgttggacctacgttgaaagacgaggttatgaagatcatgcctgttcagaaacaaacgagagctggtcaacgaactagattcaaggcttttgttgttgttggtgatggtaatggtcatgttggtttgggtgtcaagtgttctaaagaagttgctactgccattagaggagctattattcttgctaagctctctgttgttccggtgaggagaggttactgggggaataagattgggaagccacacactgtgccttgtaaggttactgggaagtgtggttctgttactgtgagaatggttcctgctccgagaggttctggtattgttgctgctagggttcctaagaaggttcttcagttcgctggtattgatgatgtctttacttcttccagaggatctaccaaaacccttggaaactttgtcaaggtatgtactttaacaatgactgtttttgtttgatgaactctgaactaggcagtcaataagtaatcattatcaatttagtgaattaatatcgaagattaggattttagttgaattttattggtttgagcatgtgagtttggtttaagtactaatctgatgaacactctttgtattcaaagatagtttagcgtgtaagattattaatccaaatgctcttaagtttgtacgattacgctaaattctgactaatggaatgcaattgttgtttgtggtcaggcaacatttgactgcttacagaagacatatgggttccttacaccggaattctggaaagagactagattctccagatcgccctaccaagagcacactgatttcttgtcgactaaggctgtttctgcaaccaaggttatcacggagggtgaagaccaagcttaagactttcatgagataagttttggttgttcttaatactaattcctactttgaaaaagagtagttttttttcttgattatctataagttttgtaattggtggtttcgaaactgttttggattttgttagatgtttgcgttaatgcaaatttcaataaaatagcttttgcaatagattctagtgttactggtaacaacatactacacgtgacctgagctgctcgctgatatcagagacatattcattctaaactgaccaatgaataagacttgtcacgtatgattgtgcaaattaacaagaacttctcttatggtaccaaacttggaatgtttcgcttccatgtcatctgcgcttttgcttggtctggatactgaaatcaagctgaagtgaaagtaaaattgaaaaaccgttctgattcggaactgaaatgaaagaaacgagttgaaatgcagctgaaccgaacatcaattgaagaatcaagttagtttttgtgatcaccaaaataataagagagtttgatacaatgagtgttgagatggctgatcatcagtagtcaaacaagcaaacgtaaaaaagcaaattgtgatatgaagcgctaaaagtagtttcgttcttcagataatgatactccaacataaatcgttatttctgattatacaacaaaggacgtcaaaaaacaatgcagagagtt

SEQ ID NO: 35164 - DNA, 4606 bp, Arabidopsis thaliana landsberg
aaaatattatatagcaccaaaaatagcgctgcatataaaaaccacatctacctaagactccatgtagtgtagtcgcatataagacgattataaattaataatgtaattttttatttctttttggatttggtttctttgttttcggtttaagttttttttcttgggggtataatgattttagttaagttttgtttaagtttcctcaatgacaaaggtacaatttaggcgttacgtctagtctaaaataatctattaacaaaagaatgtatttgcttaattagtcaatactctactcagtagatatggatatcgtttcagttttgtatgtggatttttttttttttaatcttgcaaaaattctattcaatttcaataaaaaatttctgaggatagtcaatgaaaaccaagaaagtcataataataattataaagtatatatcaaaacgctcatataatattccacatacatttactgtataatcagaaaactaaatagtatagttatcaagggtccctcttaataaaaccaatattattcaactagatataatttatgtattcggagataaatttatttactcagcaccatctaaaatactaatgacgcaattcttattttgtttatgtgataaataaagaaatataaaaagagagaaaacaaaaagagtgagtgatagtgattacaaaggtaagccaaaatttgaatatttaatggataccaccagataagaagaactttgcttcaaagcggcaaagcttaagcttttttctcgcgcccgcctctctctctctctctctcttctcctctaaccaaatttcccgatgtgaaaaaaacaagtttcccatcaactcaaaccaccgccaccacttcttctctccgacatggctccgtcgttaaggaatttcaacttctttcaccgcttctccaccttcctcgtcttctctctgttctccgtcgtttcttccgacgatctccaagccttactcaaactcaaatcatcattcgccgattccaatctcgccgtcttcgattcctggaagctacactccggtaccggtccatgtagcttcaccggagtaacttgtaattctagaggcaacgttacagagattgatctctctcgtcgaggtttatctgggaattttccattcgatccggtttgtgagattcagagtctcgagaaactctctctcggattcaattcactatctggaataatccccagcgatttgaaaaactgcacgagtttgaagtatttggatctcggcaacaatttgttctccggtactttccctgagttctcatctttaaatcagttacagtttctgtatctcaacaacagcgctttttccggcgtctttccgtggaaatcgctccgaaacgcaacgagtctcgtcgttttgagcctaggcgataatccgtttaatgcgacggttgatttcccggtggaggtttgtttctctgaagaaactctcgtggctttacttgtcgaattgcagtatcgccggaaaaattccaccgccgatcggagatttgacggagcttcggaatttggagatttccgatagcggattaaccggagagattccgtcggagatttcgaaacttactaatctctggcagttagagctttacaacaactccttaaccggaaaacttcctaccggattcggaaacttgaagaatctgacttacttggacgcttcaacaaatcttctacaaggcgatttatcggagcttaggtctctgactaatctcgtttcactacaaatgttcgaaaacgaattctccggtgagattccgctggagtttggtgaattcaaggatctcgtgaatctctctctgtatacaaacaagttaaccggttctctgcctcaaggactcggttcacttgctgattttgatttcatcgacgcatcagagaatctcttaaccggaccaatccctccagatatgtgcaagaaggggaagatgaaagctctgcttctcctccaaaacaatctcactggctccatccctgagtcctacggtaactgtttgactctgcaacggttcagagttagcgagaactcgctcaacggaacagttcccgccggactttggggcttaccgaagctcgagatcatcgatatagagatgaataacttcgaaggtccaatcaccgcggatataaagaacggtaaaatgctcggagcgttgtatctagggttcaacaagttgtctgatgagctgcctgaagagataggtgacactgaatctttgactaaggttgagcttaacaataatcggttttccgggaagattccgagctccattgggaaactgaagggacttagcagtctaaagatgcagagcaatggcttctctggcgagataccggactcgattggatcgtgttcgatgctcagcgatgtgaacatggctcaaaactcgatatccggtgaaatcccgcacacgcttggatctcttccgacgctcaatgctttgaatctttcagataataagctctctgggataatcccagagagtttgtcgtctctaaggcttagccttcttgatctgtctaacaacagattatccggtcgtatccctctgagtttgtcatcatataatggtagcttcaatggcaatcctggactctgcagcatgacgatcaaatcgtttaaccggtgcataaatccttcgagatcgcatggagacactcgcgtgttcgtgttgtgtatagttgtcgggttactgatcttgctagcgtctcttgtgtttttcttgtacctgaagaaaacagagaagaaggagggacgttcgcttaaacacgaatcttggagtataaagtcattccgaaagatgagtttcactgaagatgatatcattgattcaatcaaagaagagaatttgattggtagaggaggttgtggggatgtgtacagagtagtacttggtgatggtaaagaagttgcggtcaaacacattcgttgtagtagtactcagaaaaatttcagcagtgcaatgccgattctcactgaacgggaaggaagatcgaaagagtttgaaacagaggtgcaaacgcttagttcgatacgacacttaaacgtggtgaaactctattgtagtattacgagcgatgactcgagcttgctggtgtacgagtacttgcctaatggaagcttatgggacatgcttcactcttgcaagaagtctaatctcggttgggaaacacggtatgatatagctcttggtgcagcaaaagggcttgagtacttgcatcatgggtatgagagaccggtgattcaccgtgatgttaagtcgagtaacatattgctagatgagttcttgaaacctagaattgcggattttggtcttgccaagattcttcaggccagcaatggcggtccagagtccacgcatgtcgttgcgggaacctatggctacatagctccaggtatataaagagacttaactcttatatcatcagcttgttatggccttacattttgaaattacaatttgacattaaaaattattgttgcagagtatggatatgcgtcaaaagtgactgagaaatgcgatgtatatagcttcggggtcgtgttgatggagctagtcacagggaaaaaaccgatagaggcagagtttggagagagcaaagacatagtgaattgggtgagtaacaatctgaagagcaaagagagtgtgatggagattgtggacaagaagataggagaaatgtatagagaagacgcggtcaagatgctgaggattgcgatcatctgcaccgcaagacttcctggactaagaccgacgatgaggagcgtggtgcagatgatcgaggacgcggaaccttgcagattgatggggattgtgatcagcaaagagagtgatgtcaaggtcaaagaaataagttgatgattgagggaccaagtcactcttttggggtctgttttgttcacaatgaaacttagggagatcgagtaaagtggatcatctaaatctattaagacgtacgtcagagtttagatgcagagtgttgtcataaaaaaactccgggatgagccatcataggtgttgtaacgatctcattgtaaactattttcttgtaattgtagaattttaaggttttcaaatgttcatgaaggtcaactactaaatgaaatttatggtccttatatgcacctatactattactttgctaagaagtgtatattcgactgggtaaaacaatgtctataaaacttgcaatcaatcagtttttaatcagagttatatttatttctgcgtgaggatggttttataatattatttgattcagaaaattctcaaaacgaaaccaaattcaaattggattcttggtgtgatgacatagaccaattattattatgatatcctctcgtgtgatttctaaaagttagtcaaatctacgtatgctcaaaaacttttgtagttgcccactttgaccaacttaataaaagaaagatgaagaaatttagacacctcatggccttttggctccactaataagagattcaaagctttcttttgttgagaatgcattttatgttaaaactttcatctactgatatttactgatttagcaaaaaaaaaaagatc

SEQ ID NO: 35165 - DNA, 4894 bp, Arabidopsis thaliana landsberg
ctacaacatcttaaaatcatcccggtcgcatatgtcaatagatttggacttcttcctactaaggaatctgccaacaacacaaatgataacacacaaacacggttactaagaaaagagattataagggaaagtagtaagggaatatagcaaactcactgttttgaaatctcttcttttcttctgcgaattttctccaagacagatgaaatcggctttcggacaagaggggctgcttcaaaggcagcatctctcgtttctatcatgaaaagaaaaacacaaacaattttcagttccctgcaaaacgttgaaatgagcactgaagagtgttttgagagtatcatacctcgcaagagtctctggttttctgcacgaagctgatcaagatattcccttctttcctacagacgaacgaagaacagtaacaccaattaaacacaggagaaggaaacacacaaacgaataatgttaactcaaaatgaaactagtaagaaatagagagagctaccttcttagtcatgttcatggaagcagtagagactggcagctcatcaaagtcatcactcttcttcttcctcttcttatctctctttctctcctttccctctccatcacgtgtctccacaattggtcgcttctttccagcttccttcgtttccggaaccctaatttcctcttcgtcttcacctttctcacccaattcctccattggggaatcaaattcatgcacactcgtctcgaaatccggatcctccttttcagattccgtcgtttcagaaaccctaatttcatctcttgtttccgaatcagagatttcgcttccacttttctcgcccagatcttcgatcgtctgattaaactcaggcacataatcaaaatcaagtaccttcctcgcggtaactccatcctctacacccaaaccgtcgagatcagatggaaccccatcttcttcctcaatcccatcgcaacccttcgcagactgcaattcagacttacccagatcctcgccgtcggggttttcggaatcgaaggtttcagatccagaacatgaatcggagatcaatttagctttcttcaatcgtcttagcatcctgttaggaactgggacactcgattctccaataggagaaagctgatcatcgttcatcatcttcgattgtaatcgccggacaaaattggagagaatcttacggtgcccaatgtttctgttcgtttggaagaagacaagtcagtgccaaaagggtgaaaatgaataatttgcttgaggatttacgcgccaaacaattcgaattttggcgcctctattttacgttgaataaaaaaggtgagctttcttcgctatgcaattccgtcaaaaacaaaaattagaaactaagattaaaaatatatatatgcaatatgataggggataattgtttcgttaatttacaattttgtaaaaatatcgtaaaatgattatttataccattatgattcaaatataaaagctaaagccattttgaataaatcataatttcgaacacggataattgatgatataataacaaatttagcacatattactaatatcgtttgatttatagcacataaaaatttaaacttgtataatatgtgttgctgactataaacaaaaaaacaataacaactagagctaattgcgtaggagactcggttacacatttggtctcccacctaaccactccgattgtatatattagatatgattcctcgagtactactactataagtgttccacgtatatatgtagtacacgaccacaatgtaacgtatccaaatattcgtatgcaaattaatatacatattttgtcaacgttttatagatatttctaagtgtaaatccatgattatgtcacatcagtatatataagattatataaattacacatagagagatgagatagattagatggatcctcctgaaatcgtgttctcacgatagctacgagcaaggagcaccctagttaataagagccggctaacagaaaattgagaagaaaaaaacaagaatagtttttttttttcgtagttaatcctcatgattctctaaaatctatcgatctctctcccgtaataaaatttcggagaaagaggaaaaccctaatcccctctttctctcggatcatcaacaagaaaaaaaaaaaaattataaatgaaaatgaggaagctttgtccaaatttggacagagaagacgggttagagacggtgttagaggttccggtgccggaagaaatgtttacaaagatgggaagcaacgcccaagggcggtggaggaatatgcacgctctcatgaaggcacacgccgttgtgaccgcggtggcgactgatgtaagaacgccggcgtcatcgtcatcgatgagtaatgtcaacatgcatttgcagtcaaaatcagacaacgagtttgtggccttgttgaaaatcgtaggaagtcctcttattccttttcatgtcccgctcgagttttgtctatcccgaccaatcaacgacacttccatcgtacgtatcttatcattaattcaatctattgatttttgtttaaccttttgatgaagtggggttataggttagaattcaagtctttcacttgcagttttaattttggttcgttattcttaatgttttgaatggcacaattttcaatgattctataaaccatgggaggattagaagactactaaaattttccaatttcaaaaagagaaaaatgtatagagatggaatgtgtagcgattattagccctcaatttctttatgagataacaaatagttcttttttttttgatcaaaacaaatagttcaaaaataaaaaaagttttataggataaacattttatcttcttttttttgttcgtatgaaacaagttatcatacaatttacgttcgtctaagtagaaagcaaacctattatgtggaatgttgatagtagtggtgtatttgaaggaggcgtcgacggctaaatacatagtgcaacagtacgtggcagcgtgcggaggtccagcggctttgaacgcagtgaaaagcatgtacgcggtggggcaagtaaggatgcaaggctccgagatggttgctggagaggacgaagggacgggtacgccggtgcgacttggtaaaggcagtttcgaggtcggaggttttgttttatggcaaaagaatccaaatctttggttcttggagctagtggtttccggtttcaagattagcgctggtagtgacggcaaagtggcttggaaccaatcctctactcaaccttctcaggcccaccgtggtcctcctcgtcctctccgccgtttttttcaggtgcccatgcatttttaacctttcaatgcatattatcgactattttacgattaaacttaacaaaaatgacaaaatttgtagtatagtggttttgatcgccctatcatattccatgttcaaacatgggagcactcttgtgagttataaacttataaagtactaatttagtagtaaattagaactaagccagagaggaaaccagtcaaaatgttcataacaccattaaaaaaataaatcctagcaatgatatacaccaagaaatacaaaattttgattgttagcaaattttaattgttacaaacttgttattagcaaattttgattaacattgttacaaaatctcgattgctaataaatcctatctcatattattagcaatttttgccttaaaaaaatataaacttaccatgactaaagattgaccttttgacatttttcatctgttgaatgacgtggcagggactagacccgagatgcacagcgagtttgttcttagacgccgtttgcatcggtgaacaacccgttaacggtgaagactgtttcgtcttaaaagtagaaacaccgtcagatattctcaaagcacaatgctcaccaaacacggaggtgatcaaccacacggtatggggttacttcagccaacgaaccggacttctcgtaaagttcggtgacacaaaactcgtgagagtcaaatccggaagaggcaaaaacgacggcgttttttgggagacaagtatggagtccatcatcgacgattacatattcgttgacgcagtcaacatagctcacggtggtcagactgtgaccacactctaccgctacggtggagctgttaatcaccggagaagaatagaggagaaatggcgtatcgaggaggtggatttcaatatttgtggattgtgtttggagagctttttaccaccgtcggatatcaacaatgatcattaggcacgatggagaaatcgttacaatagtctatctttttcttctagatgttttttttttttgttgaggtttaaataggtctcttatacacacctaccgtggatttgtaacaaaaggagtaaatatgtaattttgagatggtggtgtaatgtaaactaatgttttcatagtcaacaaaatatatttcaattgtcattagcactttcgttattatttatttttgtgactcaattgaaaatttccataatgattttatgagtttcattagttcaattttttttttgaaaaaataatcccaatggaccaaccgaaaatgggccaatcatttcactacatagcccactaagataataccgacgtaagtccgttaagagggaaaccctagattgcgagataacaaaaacatgctccgctatataaatcctgacaaatctcaattcataaacaacaaccgatctattcctccgcagttattcttcttcgtttgcatcgcctctggtatctagaatttgttcgaatatcgattgaatcttgtagtttgttatgctctgttttggttttgatttcgattttgattgggtttagtagatgcatctgtttgatttacccactcctctattacttgtagacccaaactca

SEQ ID NO: 35166 - DNA, 5496 bp, Arabidopsis thaliana landsberg
cgatatactggatatagatttttatattaatagaggggggactcaaaccttcaagagaaatatatatgatgccaacgaaggggaacattaaataaaaaaataagataaacaaattgagtatatacatgtgatgcataaaatgacatattcatctgcatatacactaacacatctaacacacgtataattaacggataaatattacaacgtaccgatatgaagatattagtcgcagagactcaaaatatgttactcttttttaacactgctgttctacatattctctatatataccatgcgtagatagatatgtactgaccatttgtgataattatgttaaacagagttaggttaaaagaacgaaaagaattgaccggtagatttggtctctcaagtctcacttgtgtcttcaatagaaagtttgatctttctttttggagataatcaatcaataaagattatggaacatgttaggtaccaactaatactcttcagtttaattatctcatctgtaatcgcttttctctagaagttatggcctactattcttgtttcaaaacaaaatgctcttgttttcttataaaagaaacaattcctcagttatattcagaccatatatgatctttggttttcgagtccttgacgaaaagatttgacactaaattgtataaccttcaataaattggagttgttgaggattggtcctacctcacattgttgcctattatctgagcaaacaattttcttggccatctaacattgtggttccacttttatgaatgtacattgatgaccattaactaaccaaagaactaggtgtatttataatacatcagttgtcttttcctcgtattgaagatctcacttggcaaatcgcaatgtccattctttggctacctcgtcatgcttttctctatctgtcaagtagagccgtgcaatcaccggtaaagctggactatctggtcgatgaagaagaagcaaaaagaataagaacaatagagatttactatggaagttaaatacagtagttagatgcggacatctattatgtttgttggccaaaactcatcacaaacttttttttaaaaacgttctcttaggtagatctgacatgagctggtcatttcatcagaggacttgaaatggtctgatctgaagcctgagagtagaatagaaacttacagggttcaggttttaagaagatagatctgatggcttgtaagactttagtgattgtaagggctggactccaactatctcttagaatgttcacacttaaatctcccgcagtatcaacattgcaatggtaaatccgagtcttgaacaccaactgcaaatcaacctcaccaacttaaccaaaaagacagatgtaataaaagtgcaagctctagattagtacctatagcttgactatcactagacccaaaacttcaagaaatttgctacaaaatgtatcctaagactatgttgaaagcaataaaactacataatatgctagacactgagagtctgagacactagatgatctctgtttcaatgtgatgcagttgaagactcattgatattcactaaatagttcttcctaaagagatcatcattagaaatcaaaacttctaaaccttaaatcattaccagctaaatcagtaaagctcccaaaatgtgttaaccaaagaatccatgatcataccttaggtggcttgaatggataatcagatgggaaaattatatccaggaaaaagatccctccttcatagggagttcctgcaaaagttccataaacaccaaattcaaagacttgaaaacctaacaaattttcaatcggattatctacaaatattcaaagagagtatcagaattaaacccgaaggaccaatgatggtggcgatccaatggtagagattatctccttttggaccagctgagcaatcaggaggtggatcaatgttaagctcagccatctccctctgtatcctcttccctgacgcagaaactgaagtcttcgctacccaagacgacgccgttcctgaatatccggcgtacatcgccgtcggtaacggtctcaacctcccgcttccgccaggtgtcatcatctcccgtcgtcgtcgtcttccgatactctctgcttatccaatccaccacttgatcgtttcgctcgcactccatcgggaaaagatttcgaaacgccgcgtttttgtccgatcaattaaacaaataaagtaatcgctgacgtggagattaattttgtaacatgtatttttttttttttttttctctcactaatcactattaataaatttgtaatcattttgacaaccaaatttatttaagttgaattatcgaatattcttgtccttttgtgtaatgtgatcatgttataaccacgtgaatccttaataatttgataaatgattattcaaagttcttgaaaaaggcacacattttggaaagaaaattgaaattatccaaaatcaatttaatttttgtttaaacataatcaaatttactctgtcaatttttatgaataacatgatttacgtaaactctcctacaatgcactgattcatttgaatatgaaatttaaatcactctaattcgaatattttagttcaaagatgaagacaaaaaaaagaatgggaacttgtgagccctctttagtctctagttacacttacactaaaaacaaagtacacagtaactaccggtaaccgtaagaaatccaatccaagccacaggtagacttccccggttactacaaacccgctttttggcaaacgttctacaaaaggcggtcatgctgaagcaacagttgtagtagagtgagagctaacggtgccaatatgggaagatggtagctaaagatgatacgtgcgtttgcgtttcctcccaatggacttgcgggccctaacgcatccggaggaaagtttccattagtagcgtttgcgtttaagctgagataaatggaaaatgatttcaaagagttaggagcagatttcattttcaaaacttaacaagacataaatttagtatcgttaccttcccgtatatgcacatgttctatagcctgcgaacacacaagccatcgaatttgagatttactctgaggaaacaacttgaaaacatagaattattgcaacacatagatcagaggaaatgagaaaaacttactaggatctctagtcgtagtgatagccgtaccatcaaagtcacaagttccacctgcacttttcatcttctggtaatagtcattgaaagcaaaagaagcatggctcttaacatcgttagggaggtagcaaggttggcccggttgaatggcagcgcagttagctcggccttgaccacacgcccaattcaaaccgtcaaccaacttatcatcatcagcatctgctttagccacgcagaacatcgatgaaccgtttagagctgcggagctagagccaccactcaaactcagagggtaaaccgaggtcccatttggaaacaaaatcccccagtttctttcagagactggtcctgaccgcttgtcttcattgtacagctcgtagatgtaagtgtttatcggtatgtctggttgactaggaggacctgagttgttcagcactctcttgatcaagttagtgttgaatgtctccgcattagcgactgttgcagccgcttcatcgcctccaccagacgaaggccagcctgtttccgtgactacaacaggaatcttggagaaattcaaagcttccatggagtagtaagcagcatcaaccatagcatcaaacatgctgttgtaatgtaaaagcgtgttgggatcaacaatctgcttcaccggagaaagctgcttgaacaaagcgtaatcaagcgggaaaatcccattagcggttgtgtaaccgtagtaaggatacgcgtttaacatgaaaaaggaaccagtgttcttcaaaaactgaagaagctggtaaaccgtggtgttccagacgggctaaaggtagatgtagatggaggaaacggtttaggcattatatccatagacatagggctggagactttgaccttaaagttgagattggaagccacaagagccttgtgaatgttgttaagagcagaggcgagaatcggcgccacgtgaggaatcgtggtgagaacctcactaccaatagcaatggcggttatattagttgaaggaatataagcagcgacgtttttgttaacccaagcagctgcagctgaaggaaaccgtccgattttgaggatttcttcattggttacaccgaccataacttcgatgctagtgttggcaaatgctttgagcatatggctattagcatcatagagacggacgtgtgtgatttgttgtgatttgagaagtgttacaatgtctgaaggcggtggcatgttggtgagatcagtgccaatgtttacaccgataaatgcagctgtataaagaatcagattaacattgagagtctatgaacttcaccaagtaataaaaaagtaaacttagagatagatataacatgtgaaatttaccgtttgaacaggcaagaattgaaagtaggagcaacaacgcttctgcaaaccatctcggaagcagcattggaaacagagtgcttgaaaaccttaaacctacaaaaactctgaaaaggttcaaaattgagccatatgctaatgattttaacagaaatttgaaacctaatataacaatggattgtagatttctcactctgaagtcagaaaaaactgttgttttttttaaatcttttcaggagagttataattggtcaaatatggtaagaaccctaaaaataagtaagcaactttttttttttggtgaattcaagaaagcaattttagataactatctcatggctattaagaaaacagaggatttccgacagaagtaaactaatggggtctggaaactaagcaacgttctgagaacagaaggggagaaacagtaaacaaactcatcgagcattcgaaaagacacaatttttaatctttaactcttttgtcgttttcgttctttcagacatgtgctctagaaactggatttgcagagcaaggaagaatgtggaagatacaatgaaaagctagcgaagacagcaatgtgagacaatgaaacacccagatgcaaaatcaagaaattatatacaaaagtacctaattggagcttgcctggttctagattcactcggcgagaattcagatcagagagaagaaattgagagaatgaaagaaaaagaagcctcgaggttttgctgctgagagacagagaacaggttcagagatgttactagtgtagtgaacccaccgaagaggaacccaaaaagtaaacacttttttttcttgtctttcggcgaatattatttgtcgaaattgaaaggaaatggaaaagaaaaaacaaaaacaaattaagagattgatttgctctcagtaaactttggtttcatctttccttatatataatgcgtgggaaaccagaaaggtgtgtttgtggaatagggggttagcgga

SEQ ID NO: 35167 - DNA, 2319 bp, Arabidopsis thaliana landsberg
tgaatttaaagcattgactattgactagttgaaaagagaaaacttttggaatgcttttgcgaatttatgatgaagaaatcgaaaaatattgggaaagaaaaaaagagtattatatatctcttcagagaaggaggaacaaagttgacttaagacttgagaggcttttctagttttttttaaaaattattatgttagttgagaagatggaccgtttaaattgtaagctcaattataattgattttacacaactaattcttatggatcacacaatagacggcccatagacaaaataaaaccctaacgaatcttctctttcattttgtctgttgaagtttttcagtttcttgtcttttgggataaacattagctgtggaaaagctgacaaatggtaaagaaacttctgttccgagttagatctcttgttttaattgtatacttcattcgttagtccattgtttgttcactctgtttcttcttctcaagttgtgtagctaataacagtgaattgtgttagtctgatctttaagtttttttgcgtgtgtggtttggttaaaaacttaaaatgcataattgaagttggccttgtgtgttccattgtatagctaacttaggtttctcttagaggaattgattggtactagttctttacttcaatctaagagtatgtgtaagaatattgtacatgtgatataattcatgcgatataattcatgcttgcttcaaaaccgtgtaacataaatcattaatcaattgcggttgcgagagtttgcggaaacaggcggttgcggtttcaagcattatcaagcgttttgaacgactggttgagcgtttgataatgggtgcgtttacgggagttttatgactggtaaatcagcgagtgcgatagtaattaaataaaaaataaccaaaataaatataatatattaattttaaaagaaaaaatacaatatattactatgataaattgataatattagaaaattaaacatgcttaataattaaaaccataaataaaacattaaattcaaaaaataataaattttgtaagaaaaatcttagtactttatgcatttggtacatcaccaaaaattgcatcaagtagtgtaataaactgtaaataacgttgaactcgcgggttttccggattgcctctatacatatgataaagtttcttcaagatatccaaacgacttttaacacatctccaactcaaattttttccaaacgttaatattctttagaatattttctttttgaacatcacttagaaatctgattttggggtctttggattcttccgtttatttctccacaataacccgttaaagtaacgcaaatgtggtctcgtctgaccaaatgattttctaatcgagaaaacaaatcaaaacatgtattcaatcaaaaaactaaaaaaaaaacaaaaaaaaaacaacaacgatgccatgaaatattccgagaattacactagctaatgaatggatgaaatgatagatcatacttacgtttgattcttgattttgactttgattttcgtcagtttgggtggataccataattgagagaatagggtttcattgattagggttttctgataagaataagtatagggtttgggtggaagacataattattttaattaattttttttttttaacctaaccgttaccgtccgcaaccgcaaacgcttgcgggaaggagcttttgaaatctagcgatttcgagcggtccaaagcggtatctaccggtttctatgattggtgccaaccgctaataaccgctaccacccgcaaacgcagcgcttgcgggtggcagagggaaaactaatcaagcccttagtttaaagatggtccgcagttagtccactgcgggttttttgtgtgtttttggatccgcactattacagactataatttgtgaatagtaaataaaaagctgtccaatctgtagacggttttgtccgctgggaccgctgtaaccattcatagccctaactgagattgagaaccaaaggattattagaacaaacgttaatattcattggggaaccaaatccttattgaaatgtgcgttcgcatgattcaaaaaggccataaaatccatttccaaacaaatgggaataagataacgtgaacaaaaaccattccgttgctaagtttcagaaaaagaatagctgatttcaaaactcagagaaaataaaagagtaatatagaacgctcttctttgttattgaacatgtttcaaagaagctgaagcattcactatagtcccaaatatttatgccttgtcagcttctacattttgtttcagtgaatcacctg

SEQ ID NO: 35168 - DNA, 404 bp, Arabidopsis thaliana landsberg
gcatagttgacgttgaatctaaaggatctaccggtggatagatacctttggcagctaatcctcttgatagtacggtagtcgcatctaaatgtgcaaatgtggtggccggtgcagagtcagtcacatcatctgcacgtacatagactgcttgaatagaggtgatggacccctgtttcgtcgaacaaaactagttggaaggacgctttcgaactaacaggtgggttgataacccacagtagatggcatgctagcccgtggggaggatacctcatatcctgattgcacgaatcggtagctcttgcctatacacagaagtacgtcgcgtgcatgaccataagtgacatatcctgccatctttaaggcaggcagacacactctcatacgatctctacggcacgtcattc

SEQ ID NO: 35169 - DNA, 3159 bp, Arabidopsis thaliana landsberg
atgaaaactgataatgtatgttgcatttgtttgtaagcatgaagacagatttaaaacattgaaatattattgatattttgcaatgagaaaaataaaataaaataataataactattataaacaaataaaaaattcaagataatagaccaaaacgaaagataaagtagaatagacaacagatgaaaacattgcagccaagaattatattttataaaaataattttgtaaaaacaaaatcttgcaagtctgaagaaagtatatatgtaaaaaaaaaaaaaaagatataaacgatcacgaaatgtaacgaggaaggtttaagtgtgcagataatcgatcaaaatcgaccaaaagtgcccaacttctcctctccactaatttcatttttgcaataccaaactcataagaaaccacaaatcaaaacaataattctaataattatttcttcctttacacaaaataaaacattagtccacttgtaaaccacaacgtagcatctaaaacttgtggacacgttgctccagaaatatacgttactctgactctggtcgtatcataaactaaaagttgttttgaccaaccatatattgacacatcatgctttctagagactgtaatataaagagtacaggctcgtcaaaacgaaaaaaaataccacgtcaccatactcaacgaacttacgttagatacgttccattgccaggtcacacgccagttgatatttcaatcacgtttctcaattgttgtaatcttgaaaacttcacatattcagatattctacacatttctctcttattggtttctttttagacctttataaaaatagtagtatcaaatcaaatcgaaacgggttacatttggttatccacctcaaaaagaaatccacgtgtgtacacaagaacataattacgttgttatattcataatttaaattttagcgttggtagataaaactcgatgttaccaaaagtatacactatctaatttcacaaccaaaaaaaaaacaaaatcgttcacccttatataaagcttctgttgaataagcagagtggaaaaaagcaaaatcaaacaaacatacaaaaaaaaaacagttctttttataactcttctctagtcttctccaaatggaatggactagaggaagaatcctaggccgaggctctacagccaccgtatacgccgccgcaggtcacaattcagatgaaatcctcgccgttaaatcatctgaggttcaccgctcagagttcttgcaaagagaagccaagattctctcttcgttaagttctccttacgtgatcggatacagaggatcagaaaccaagagagagtcaaacggtgtcgttatgtataatcttttgatggagtacgcaccgtatggaacgttgaccgatgcggcggcgaaagacgggggaagagtcgacgagactcgggtagtgaagtacacgcgcgatatactaaaaggattggagtatatacactcgaaaggaatcgtgcattgtgatgtaaagggtagtaacgtgttggtcggagagaacggagaagccaagatcgctgatttcgggtgtgcgaaatgggttgaaccggaaataaccgaaccggttagaggaacgccggcgttcatggctccagaagcggcgcgtggagagagacaagggaaagagagtgatatatgggcggtgggttgtacggtgatagagatggttaccgggtctcagccgtggattggggcggattttaccgacccggttttggttctttatcgggtcgggtattcgagtgaaactccggagcttccttgtttgcttgcggaagaagcaaaagattttttggaaaagtgtttgaagagggaagcaaatgaaagatggacagcgacacaactcctaaaccatccttttttgacaactaaaccagacattgaaccagttctggttcccggtttgatttcaaactcaccgacaagtgtgacagatcaaacgttttggagatcagtagaggaagaggaagaagaagaaacagaggaaatacagaaggattcgagagatcttgatcgtttaagcttgtggggttgttactcggagaggatcggacggctgaagtgtgttggtggtttggatgggaccagatgtgatatggagggtggggattggattatggtgagagcgaggtgtgaaggaacaatgattagtgggtcacaaaaggaattgattattagtgaaaatgtattggtgggggaattgtaaatttgatttggggtcattttgggtgaattgtagaaagtttaggggttgaaattagtgaagatctccaatttaggggagatcaatgtagctttattagtctccgaatcttcgattgatcacatgtatattattataatcacgatatttataaaccaaacccaattttttaagcttggacaagagtcgaatacttgaattatatggagtttcaacgtttgttggcctgttatagagaaaatagttgaactattacattcgaatcttagtattccatgtattcgcatgtagagagcgtgcgtgaaatattcattgtttctatcaccgatacaacctgtgcgagtaaaaaacaaacagatagagactggttttataaacacacacagagactttctatctagattgggagcaagaatatgtaagcactcaccaacagatatagcaacaatgcctctcatttggtattgagttgtgtaaagatagtcaagcatatctttttctacttcctcagataaaccatcttttgctttgagtaaacacacatgctccactactttcctaaggaacatcattgatacatagattataaaactttcatcagaaaacataatgtggagtcataaacctatatgcaaagttcgaaactttttcatgaatctcagcttttaaacacacacattaacataagctatcacaaaggagctaatttcttaaaaactgaaccttgtcttgttcgacttggaacttggctattctatcatgagcagcgcaaaatgtaaccctaggggtttttgttcgacattgatggacaaacataccgccaccattagacacaaattcctgtcaatttaaaaagaagaatctttaggtcacaaacaatgttaccgcattactgaaacagaagccaattttcaaaacgatgtgt

SEQ ID NO: 35170 - DNA, 1524 bp, Arabidopsis thaliana landsberg
atgaaaatgagcaatcctaaatgcaatcacactatatacaatcataaaatgatatgcaatctacatgacactctatttttgtgaaataattttctgaaattttttcaaatttttatggtttttctatccttagatgatgcaaaatttgaaataagaaaagagaacaccatgttaaacatgtcttgaaccctcctccaaacttcaattacacaatcccttgtgtaataaaaatctgaaagagaattcaagaccaaaacaaacaacacaaaaggaaaataaaaagctaatggtatgtacaatggttgaggtggtgttacctcagttgtccaaggtattttcctgtgcgctgatgcggtagtaaggatcccaattcattctcgagggcagcccgttttgagcccactgatcttgctcgacactctgctcgttctgagcccagggatcgtgctcgacactcagctcgatatcacgtcgaggcaccttggtcgagtgatctcctgctagtcataaaaaggtctttgctccttggtcaaaccactcttgtttttcttcttcttttctgctctcagtgctcataagatgaatgtcttgcaggagattgaggggcgacttacctctcgttgctcatatgcagactgcctagacggtgaaactttgtgccttcttgtaaccacttcttgtggtcagttttctcttatcatggtggcgtctgaagaaaaacagctcagtacagcatgaattgcggcgatggcgttaccacatttttccaacattttgtcttgaaacttattccaagcactcatcgaaccaatgttcttatgcgcaacagtcagactcttactcactcttggtggtggtttgtgttcttcaaaatggaacctactagcattgtagttctcccaatccatctcctctggttcttcattctcagctcattcttcactctcaaccctttcttcaatgtctgaagcctctctcgtcgggggtgctcgttccatgaagaagagttcttcattaggcgggttgaaatcgatgttacccctcattgtgatggttgtgagctcttggttgggtaggagaaacctcccatccatttccgctctatgctgaaacttgagaatatgcatcccctcatgactctgatgatcaataaacaaagcccatctcaccatctaggggcaaagggagtcgactgaagtggcactccacaagccattagtgtaggtgttatcacccctcctatagaaatggttctcttctgcttatttgctagtgcccatttcctgaaaccacaaagatgattcaataaacgcattgatggtgaagcatcgtaggtgtcacccttcataggcactttgttcttggtgtcgactaggatatcttttagggtaatatccaacagctctatctcaccattgttaatcggtccggtcttctcccttgcgtagaggacgttagccattgctttctggaagtaccgaatgcaggggtttggattgcgttgctcttggcccatgaggatga

SEQ ID NO: 35171 - DNA, 899 bp, Arabidopsis thaliana landsberg
aataatcaattaattgttggagcttaataaatcaagtgaacaagaagaagactcttgggtcgtatatgcatcgggtttagtaggcctgggcattatatctgaactcgcagacccgaaccgaatctgacctgaaagatctgaaatccgcctacttcggttccaactaattacctgatcggattctgttttcaaataattgtgggtatcgggtattacccgaacagaacccgatatccgtgagtattttttatactcgaacatatatatacacatgacgacatatatacattgattggattatggaacaagctcaaaataaggtttacatcttgtttcatgttattatcttaaagaaaaacttgttataattcaggtcttttgggttttacggatacttttatgtatatttggatatatttggataaagtttgggtaagtagtattcaatccgaaatagttttggttatttatcgagtttttcaacaaatacccgaattattcagacctgaagtaaatccgaaccgaatccaacccgaaagacatgacccaaacgcgacccgaatacccaaatgcccagagctattggtatcgaatttagtcggtttagtattcagtttagattgtaaaacgactaaaacattagtatgatctaaaccgacgtttgtggattatgaggattggaactatgatttgagatataagttatgaacgaacaaaaacagacgaaggcattttattacatgacaagtgaaacgaactttggtttctgtgtcatgcatgatattggcgttaaaaacacacgaaggtgatgtcaggttacgctacgttccgacttactgtagtccccaactcccaaaaggaatttttataagcaacatatcagttgaataacaagtgag

SEQ ID NO: 35172 - DNA, 1352 bp, Arabidopsis thaliana landsberg
  unsure (1)..(1352): unsure at all n locations
atggctttagctggtgaactccctttgggattgaaggttctaggctctgctttgcgggggaagtccaagccagagtgggaaagaacactaccaaggttaagaactagcctcgacggaaaaatcgggagcattatacagttcagtttcgatgccttatgtgacgaagataaatatctatttctttatatagcttgccttttcaactttcaatcagttcatagagtggaagaggttcttgcaaacaagttctcgcatgtgaggcatggtcttgacgttttagatgagaaatctctcatatctattaaaaacggaagaatattcatgcatactgtgctaaaacaatttggaatagaaacttcccgtaagcaattcgttcatggctttgcgaaacctcaatttttggttgatgcaagagatatatgtgaagttctcaatgacgatacaatagtaagttttgctatttgcattcctcccacccctctactgagtttatatgatgactaaccctacttatagttttttttttgttccttttcaggatagtaggcgttttcaggatagtaggcgttttatagggattatactgaggaagaattgagtataagtgagaaagcacttgagagaatgcatgattttcaattcgttagaatcaacgcctttgctcatccagagagacttcactcactccttcatcattctcaaaagattagattactgcattggagttatttgaaggatatatgtttgccttgtacttttaatccggagtttctcgtcgaactaggtatgtatgccagcaagcttcacaagctatgggagggaactaaagtaagtaattttgatgaaaattttcaatttttttttaaatctataatttgtttccgtaaatgtttattagccaattgtatcaacatgatcttctttgtcaaatgcagcnnnnnnnnnnnnnnnnnnnnnnnnnnnnnnnntattctagttatctgaaagagcttcccaatctttcaactgcaactaatctagaagaattaaagcttagaaattgctcaagtttagtggagctcccctcctctattgaaaaactcatcagtctccagagattagatctctgtgattgctcaagtcttgtgaagctcccaccatctatcaatgccaataatctctgggaattgtctctaataaattgttcacgtgttgtggagctccccgctatcgagaatgcgactaatctctgggaattgaatctgcaaaattgctcaagtttaatagagctccctctttctattggaactgccagaaatctatttttgaaggaattgaatattagcggatgctcaagtctcgtgaaactccca

SEQ ID NO: 35173 - DNA, 2790 bp, Arabidopsis thaliana landsberg
tttctttcttgtttcatgtatgtgttgttgaaagattctctttgaatttacccaataatttccccaaaaaagtccttttaagaaaagagaatttaattaactatttttgcgtgtgtggtcgatcaattgtttgagatttcctgattattctatatgtcccccacagacacagaaactcatatacagagacataataaaactgaattggcatcccttttctttggatggatttaatacaaaatttgacccaaatctatatagttgatgttctgcataccattcctgtgacgcatacatgtgaagtgtttaattgtaatctctttgctttctggtttccatgaagagaagacagaagagttttgagatgagacaaagtgagatgattaaagatgatatataagagaagtaaaagggttacttctagtgttgtatgaagcaatagattattcaatgtaatgctagtacaatgatgacaaaagaaagctttgtataccattagggcacgggttcgagacttgggaagctcttgaataaattttccaaaaccactcagcctaactctacgcttaacttccaccatcgccggccactcgctcgtttctgcttctcaccactgccatagaaaaacctattcagagaatgaaagcatatattcaaatgtcataactgtcgtcaagattcatggtgattttgcacaagtaccatgatattctgaatttctgatagaaggaaacatgaaacctacagatggactctggagcatcccatactctactcagaatacttgacccccttaaacaactgatgcatcttctttttatacttttcacagacactatctagcttgctgatgtttcaattgatctattcttaagcttattcaaatgccattctaattgaattagagaagagattgattgctaacacaattccagttcaagtacaatttataatcttcaaagaaatatctaatattagcatagagcagaaattgtctgtgcccaaagaaaacagtatcaaaaatattgaataatagtagctatattagttaaggtaataagaacttaccttttgaaaatgccagcaacaggcactacggaagacatactcagttgcagtaaccatcctatgctctctctcccttatcatcactaagtgcagctgctttctcaagtctagagatatcgtcatcatacataggttattaagcaaagtagtcgtcaatgagtctttcgtttccagctacatgatctctcttgatgtattttcttttgttacgacgtggataatcttcttcaattttgttgcgacgctctctaaaccggtttatgatatatttctcttcaatttgagattgtcttttgtaagcttcaatatcgaaaggaaattctgatggatccattggattttttttagtaagatgatgtttgttatattatttgatcaatagaaaaatgagtttccatttataaaaaaatcgagtggttgaaagagaatgataagataaggatttgatgaaaagatcatgtggttgagatccaacagataaggatcatgtggtaaactaaaagataaggattagattctaagtttctaacataaaaagccaaaattgatggattatattgtcggaaaataatggaatactgacaaacaaatattattgcataaaatgacaaacaacaattatagcataaaatgataaaatgcacacatacatatgacaaacataaacattaaagtagaaagtgacaaagtgtacacatacacttcaaacccactaatttccaaatagttcgtggttcaacttctctaacaactttttgctccaatcattgagatgctcattctcagatagcttcataaccatctccatcttcttcaatttgtttgcctcttctgtctcttggcaatttttttccaagttttctaactctttctctttcaattgcttgaaatcattccactcttcattaacgacttccaagcatgcatcacccttacctttttttaactttctttttagacgcatccctcccatgggacgagcactagatcatacagagtttgagtcacttgcattagtattgtgagctctcttagatccactgcttccagaccccgttttttctcctacctgactattatagcgtggttgatcatgaacagcgagtcactctaacattaaattaaaatacacattcttaccatttgaatatagttcatgtgcttttgcgaatacatcaatctctaaccatccgctttgttacatacacttagcattatcgtaagcgccaatccatttgcccaatattttattcacgtagttgaaatgatttctgcacgtaactccatcatacggaggatcaaatgagcattgttgattacaatattcagcaattttaccccagtatgattcactcttttggtttctttcaacaatgctatatgttccatatttaattcatccactcaaaaacaccaaattttgcttagttgtccatttggggattttttgtcgagtagaagttgaatcttcattgtttggaatgtcttcatcaacaccagtcatccttccaagagtcatttgtgtagaaaattcaggaaattcagaaggtggttgagatgaatatgacatcatcgatccataatatggatgatagtgtgaaacagatgatggcactggaaaatttggtggaaatccataatttgagatattttgagattagttgaaagatggattttgatattgataaattacttggaattttggggtatgggaaaaaagga

SEQ ID NO: 35174 - DNA, 3337 bp, Arabidopsis thaliana landsberg
tgtatgtccactctatgtggttgttgccctcttttagaatgtgtttactgtctatgttgtgcacgttggggttataaacgttgtctttatactgctggtcacgacagtgaagattggggacttgcaacaactgatgaattcgaaccggttcctcggttttgtcgttatattttagctgtttacgaggatgatattcgaaatcctttgtgggagcctccagaaggatatgggattaaccctgattggttgcttctaaagaagacttatgaagacactcagggtcgtgctccagcttatatactgtatcttgatcatgttcatcaagatatagttgttgcaatccgggggttgaatttggctaaggagagtgattatgcaatgcttttggataataagcttggtgaaaggaagtttgatggtggttatgtgcacaacgggcttgtgaagtctgctggttatgtgttagatgaggaatgtaaagttttgaaagagttggtgaaaaagtatccgagttatactctgacttttgctggacattcacttgggtctggtgtagctacaatgttggctttgttagtggttcgacatccggaaagattggggaatattgatagaaagagagttaggtgtttcgctattgcgcctgcgaggtgtatgtcgttgaatttggctgttagatatgcagatgtgattaactctgtcatacttcaggtgtgtctaactttatgatacaagtttttggctattgtatatgtggaatctaaagtatttgtttatttctgtttgctttaggatgatttcttgcctaggacagctacacctctagaagacatattcaagtctgtattctggtaaagctatctcactaatcactgtgacacatgtctcaaagaatcatctgtgtttttggacagttatactatccagagggttcagagtatgttattttcaaaactttcagcaataacacacgacattctccggtctactaagtatagtatagtagaaaaaaatcgaaacatctgtcctttatatgttttgaatgctcttatggcacatttcacagctgttagtatacatagctttggttagttcactttgttttgtagaacaccttccataactctgcttatttgtaatgggttttgtttttttgtctgtggacagtttgccatgtttgctatgcataaggtgcatgaaggatacatgtgttccagagcaaaagatgctcaaagatcctagacggctttatgctcctggtcgcatgtatcacatcgtcgaaagaaagccttgcaggtacataacacacaaatctatagatttacacatattacttaagggaccatggttctaaagcaacccacaatctcacttagttgcaatatcaaatgtcttatgtgccattacattgaagacaaatcatagttttgctctgtgatcatcgtgtgatagagctaaatctgttgtgaagatgacgttttggtaattggttcttgcagattaggaagatatcctccggttgtgaagacagcagtgccggtagatgggagatttgagcagattgttctctcctgtaatgcaacagcggatcatgccatcatctggattgaaagggaatcacagagagctctcgatgtgagtattcaccaacctcactagacgctaaatccttaccggtaaactattacactaatttgcttctgcggatctctacagctaatgatggagaatgagaagaaaatggagatcccggagaagcaaaggatggagaggcaagaatcattagccagagagcacaacttggagtacagagcagcgttaagacgagcagtaacgttagatgtacctcacgcagagtcaatggcctctgagtacggaacattcgacaaaactcaagaagacgaaaccgaagaagaagaagtagaaacagaggaagaagaagaagacacagactcgattgcaccaatggtgggtgaatcatcatcatcatcttctgttaaaccaacttacaggataagacgaaaccgtagagttagttgggacgaactaatcgaacatctctttgaacgagacgagtctggtaacttgacattcgagaaatcagatttacctcaatgatcaagattcatgttctctactcaatctatatatgtgaatgatattgtattgtgtaaaaaaaacagttgttcattacaatcatcatacaacagaccacattggtctgagttttattacagaggaattctcataaacttccaaatcgaattttagggtttatttcttgttgggttgaggaagagcacaagaagatctaaaagcttctacctgagacttacactttgaatgatctcctttgttttcttctaagcatttcttcaacgcttccacatcgcacgatgaagctatcttctttgttgtcactgtaacgttttcttgtttcttctcttctttcattgtcgtcgcagtcgtctttgttcgtggacttgtgtctggccgccgaagaagaagaaaacactttctagtttctgcttcgctaaaacgacaccgtttgattaagtagaacgtgtaacgttgaaggcttcttgtacagcgtgaggcccatctgagatctgacgaagagactttctaatttatgaaaacgacaacgtctgtgtttccacaaacgccgataaatcaagcttctttagttcttacttcgtaaacacgccacagcctacatttcctcataatgtaaccaagatttagcatcctattgaaattcagttttgtcttgaacccagaataaaacagacctgctaacgattagaagctgacccgtcatcgttatggcgtaaaatcgtctctaagcttttagtcggattcgtgtgatatagcctgcgtttgtgtttggagcactgagaaggcatcttagcaaattgttgctttgagtcgttcatgtccttttttgttttactttcaggtactttgttgatctatattacataaattgcattgttttcagctctctatatccgacaaaggaattccgatcgaccaaatatggagtaaacccaaatgtgttcctgaatgtttgttgttgcatcttgagacatttgtgtggataggatacgaatggcaacgaagagatgagaaagaagtggccacatacatcctaagaaacacaagacggttgaagaaagcaactttctcacaaaacccatcggatctgaaaagctcgagaagttgggaaagagacgtgagatgcttaacgagttggctacttcaggccagccctttcaaatttcaggtaacctcgtggttcgaattccgagttaccctattggaacctttttttatt

SEQ ID NO: 35175 - DNA, 2062 bp, Arabidopsis thaliana landsberg
ttcaattcaaaatatccgatctttacccgctctccatatttcggatccgggtattattaacagaattaggctaattactaaagcccaaaagcccatcttatttaaccacccctacccaataggccaatattattatgggaaacaaattgtgtcacacaatagaaaataaatttgtaacaagcccagagatataattgtcactaaaatcataaccaaaaataaattcaaaatcagaagccacaaaagaagatcaaacttgcctatcaatctaactctaagtacacacaatcaagttatttaactctttcttggtcttaattattatcattactgttgactagaatgaacagggaatctctcgagaacttgcaaagcctctttgatattgggccttctctgtggtattggagacgcacaagctaggcccattttcaaacatgccaacacagcttcttctttgccttctaactcagcccgtatagcagagtccgccatccgaattgcccgctcaccgtcatcaatcacaagcccattaacctgtccaagctcgtcgaccaccacgatctttcccgttagtaactcaagcagaataactccgaacgagtacacatcccatttcgaatctcggctggagtacgtggaagagattctggagcattgtagggtaacccgactgaacttggacttgggcttggactcggcccaaactcaagagacgttgtggatctcttgcttccgaatattggagccgatccaccggttctataactcatgtccccaatcaaaagcttctcaagaccgaaatccgcaactttaggctccatatctaagcccaaaaggatattgctaggcttgaggttaccatgcacgtactttttgtcgtgtacgtatgttagcccgcgagctatgccttttgctatcttgagccgagcgtcccaaggtaaatgacaaggagaggagcccactttccctgcaattaaaagaaaacaaaacacaggaccgtttattaggtgaaatcgaacatgtacacgttagcaaatccctcactgttacttaacaatacaaaaagacaaatgtaaagcaaaggacttgcatctatcaataacaaaaatacaaaacctctatatatggggctcaacagagagatttcactgaaacagaactgtcactatcttgcgcctgagataagcttacgaagttacgataagataataaaaaaaaaaaacagtttttgagacttgccgttgactctcgtccgatcattaactgacatacttttttagttggaaccaactctctgactccgaaaccgacacttttcactcttctgcttatgttagccaactattacattaccctactaacgtaagcgtgttgattaaaaatcaaagggaacggaaaaaggacttacggtaacgggcgttagcgaggctgccgttagggacaaaatcgtaaatgacaagtttctcgtcggatccccaatagaaaccgcgaattcgtaccaggtttggatgtattaacttagccacggctcgaacctgagcttcgaaatctctaaaccggtctaaaccgcattcagctattcgtcgaaccgccacagctgttccgtcttgaagcaccgctttatacattatgctcgaaccggtggctcccaaaatataagctgatgctttgagaagcgtttcgatttcaagctctttctctgaatcgagattcactaacgttccctttttttcttgatcgtctaatcctgaccgtcgatttggtccgaccgggttctcttcgtcggattcggattccgatgtctcagattcctctactgcgtcatcgcagtctacgtcaacgtaaacgggtttgcgtaaacagtaccattttgagactttggaatctgttgaaggcgtgggaccaatttggcgttagcgttacggtcttccggtttcccgactgggaaatgtaggaaaacaccatccccgcggattgctaaaacggcctagtcatcggccacaatgcgctatgatcagcaccggtttatgatcccattttgaattcgcgccggttttgg

SEQ ID NO: 35176 - DNA, 2044 bp, Arabidopsis thaliana landsberg
tgactcccactaatgtttttgttatcatttctaaagcattgatatttatgttcaaataagcttattaagagaaacataaaatggaaatgagatagctcattaagagctttattactcaaagaaactaaaagaggaaagattactttgttgtcacaaagaacacgatgattcaattactactttcataaagatgagaaagggagttgttttgagacaactcttaaagttatcatcaaagttctcatcacataactatatatatgagtgatgagtcactatcttgttaatcctatttatatggaccactacatgagcttttaggttactcatgagacattatattgggctttatatggatcctctaatagttttgctagattaatgtgaatacctctttaggaatgactagatcatgagcacgagataatcgtcaccgcttgcactaatatagtataagagtagagctgtcaattgggcttgaccatgaccaaatggtcttgtccagttgcacatttttttttctgttgacaaaaatgaccaagcccaaagtgaccaagcccaagagtgaccaagtccaagagtgaccaagaccaattaaatatgtccatggacatcaaaaaaaagtttaacatcataataataatctaaaatgaccatgataaacattgtaattagatatcataaaaacattttaagacaacattcttaagacaatatccataaagttcaacatgaccatcattcttcaatcttctcttctttctccttctcgttctcctctttgttctcttctaaatctgcagttacaaccattaaacaagagagtaaacaaatctctaaagcttaaaacaactatacaaacaagaacttgtttcatttaccttaagcttcttctttctcttcttctttctcttcttctttctcttcttctacttcctcttcttctccctcttttggaaagcctcgcagccaattccttgtgcagattaatgcttggacattttcaggaagaagagatcatacctcatcgaagaaatcatccattgtagacgattcttaaatccagatcttaaaatcggcgaaggtcaatttggtaatgtctactggggtcaagctcacgaatgttcttgaggtttgaatgtagaagcgacgattgtgttttcccccaattcaattttcagaaaatgccctaatgttttaattggtgggcttgtccaatgaccaactggtcaaacccgtttctaaccgcggatctatttaggcgtagtccattaaaaccatggtttagttgggctagaatttaattgtccacaacaatattggttgggctaagcccatagtccttttgaccaattgacagctctagtcttactacctcctctagttcatagtaaaaacacaacactaggcagcaaacgcattgcaacgctaatacctcaactcacaacaatatcaacatcaaggcaaaaccaaaacatatcagtgagctaaagaaataccaccaatgccaataactgatgatttggaggcttgaaaagccaccactagaagctgcaataactccaaatcaacatcatcgtcaccacgaattgccaagaaaaaaatatctcaaaacaaaaacaacttttcagttgtgtagcagtgtagagaaccaaaattttgaaatttaataaaatgttatcttaaaatatggtttcaaaacattcacatatgcatcacaatatcttgcaattaccaaaactgtcataaacacattctccataaccttgacaaattgtatacaacaataaataatatccaaaaaattgggaaaaaaatattatacgaataatttaatatttaaattttacaaagataatgtctagtttctaaagatttttttttggattagtcggttaatttaaagcgccgcttaggtttattactatataaagtcttaatatagaagaatgttgaaatattcaaacctgaagcaaaagcagaagcgagacaatcgccaagagctctcactaactattgaattcatcgaagaagcgctctcggg

SEQ ID NO: 35177 - DNA, 1504 bp, Arabidopsis thaliana landsberg
atccagccacgtcctgcttacgtttctctaagttatatttaaaagtgttgcattagttgtataaaatcctataagggtttgagtttaatattacataattataattatatagtttccttatttataagtttaaatttaatatttgttagatcccttttttattttaaattttaaaatatgcagtaattaccattttaaaaaatgttaattaattagacactaaatatgttaattattgatgtggcagcttccgattgtttttttttcaaaaatgttaactattatatgctaaatatgttaattattgatgtggcagctgccgattggtcgtttgaaagcttaggttgacggttttagtagcaaatagcttcaacttttatatagtatagattaatataaataattagttaattaaaatgaataaagaaaaataaattttctcgccaaaaaaattaccactaaatatttcccgccaaaaacttccgtaaaagatttttcgccaaaaaaatttctgtcaaatttttcccgccaaaaaaagttccgtaatatttttcccgctcaaacaattcacgaaggcaactacgaaattcaaaggatttcacgtgattcaggaacgttttcacaaataaaaatttcatgaacccttcttgaatttagtaaaatccttcctaaatttcagaaaatgattatttgaaggattcacgaaatttaggaaagtttccaaaaattcaggtaagaattcatgaaattcgggcagggttacacaaaataatttattttaaattttgtgaaacccttcctgaattgcttagaatccttcctaaattttgtaaaatccttcctgaatttttttttcttaaaaatattttggcgggaaactttagacggattttttttggagggaaaatattatcaagaatttttagtaatgaatttgtacttttttgaatcccccaaatagtttgaataattaaatattaaataattatttgaatgctatttttatctaaaaaactttttattgttatttggggattgacacaaatagcactaaaaactttattattccaaaaatatcactattttttgaaacttccaaaaatagcatttaaagtttttaatcctctataaattaattaaatactaaagtatttttattaccatttctatcaatcctccaaataaagatgagagcaaacactaatctaatattaaattgaatcaaaaaacttttaaatagtggaaatatatatcctaaattggaaataaaaaaacccaaatataatactaaaaactaattttaaaataaaaaatctcttttaaatagtgaaaatatatattctaaattggaaataggaaacccaaatataataccataaattaatattaaaatgaatcaaaattttctttaaatagttgaaatatataccctaataagaaatagataacccaaatataatattttaaatttatttctaatttattttggttgaatgattttaga

SEQ ID NO: 35178 - DNA, 3674 bp, Arabidopsis thaliana landsberg
agttcgtgacttttttgacatttttccctttaatttttattttttgtgaagaaatgcttgaatgtaccaacatcataagtcaaagagtctgataatgtttttaatctgttagacaattagcaaattttgaaaataaattgtaaggtaaaagaaaaaagtagaagtagaagataagaaaataggctagtttgtgtagaaggatagtcatagttttaggtgtaaagaacatgatcaaataaaaatttaatgtcaagctaactgagacagaatttgaagaaaacccaagagaaatatatactctttccctcaacctaatccaataacggcctgactatatgattatagtgaatgagtgtatcatttcctactagtacttcatactttttgttgaatacctaattactaggaaatcggtttttcatacccgtacaattgtattatgttaaatttacatttaaacataatggtgtgctagctataacatacctcgagtaatgaaacatttgaatttcatatttacactttaggttttgtgcacaatcatgcataaaccctaaatcttgattatgtggaatccacatgtgaaacctcattgctttgttggaagttaataccagcgtatgaaacgagttaattcaggaatttcaattttgtgttataatctcttcactacttggcaatggcggagccaaaatttttgtttataggagtcataataaatttaaaattttgaatttaaaatgtttcatattcaacattttagttgtatcatcaagtattttttatcaacaaaactttttttgttaatatatataatatatattgtggagattgattagttgttgtcttatcttgattcatgacttaatttaagaaaacaaattataaactatttgaaaaatgtaaaaaatgaaacaggatctgtctaaaaagaagaaaaaatttgatttgttacgaaaaattactgttttttactaatcaaaaatttcttttaaattttaaccaaacaaaaaaagcccaagggtactaagattaaatgtcaaaataattattcatggggtcaaagccaagaatagatcacataacatgggggtcattgtgaatactttaacccaaaatatataattatcttaagagaattaacttataattaaaaaaaaactataaatgtctgtctgagatagttcaaactgacccctcctacttaaatgttgcctccgccactgctacttgggccaatgtctgtctgagatagttcaaatccatgtgagtatttacctgaatttttttgagagttattgagtcatatcaattatgtaggcacaacatgtactatacgcaacacaaatattcacctatttttgaaaacgaaagtgatgactagtttgaatgtccacatatccaaatgtaaacataatttagttgcataatgcatatgcaacgttgaacactctacactatgtcgaataagatttggctttttatatttaaaacagacatttctaattagcattttcacatcattcttgtgtacattttattggtaacactacatgcatattttcaggtgtagagtttcaaatatgttatatagatgcaagcatgagatatgaggcgtgttaaacaatactctctaaagggtttggcttccgctgcaactgcttacgtacaatgccagtctcaaaagtgactaattgactctttctcttttgcccatcttcaccttgcatgtattttatgtaatataagtgagaaaaccaggaatagaaaaacaaacgaaagtacctctatatcaattcttaattgttgtctaatataaactatatatcctaaccaaaaaaaatttagtcattgatagcaaaacatatagttaaaaaactcgagcaaattgaaacaaatatcaactaagaaatacatgtataaaggtcgacaaaatttattaattaaaaaaaacataataagatagttgaacaaaagaacaaaatcagaagaatcaaatgaaaagagatcataaaatgaaaatattacaatcatgtttcctgttaatgaaacaattcaaattcgatagtatggcatctagtagacatatggtggtgggggagacttgtaagtgactttagaagaaggagagtagtatggtgtgggtggtgagctgtagacatatggtggtgggggagatttgtagtcgacatttggagaaggggagtagtacggtggaggtggggagctgtagacatatggtggtggtggagacttgtagtcaacctttggagaaggagagtagtacggtggtggtggggaactgtagacgtacggtggtggtggggacttgtagtataccttaggagaaggagagtagtacggtggtggtggggagctgtagacgtatggtggaggtggagacttgtagtaaacctttggagaaggagagtagtacggtggtggtggagaactgtagacgtacggtggtggtggggacttgtagtatacctttggagatggagagtagtacggtgggggtggggagctgtagacgtatggtggaggtggggacttgtagtaaacctttggagaaggagaatagtacggtggtggtggggaactgtaaacgtatggtggtggtggggacttgtagtaaacctttggtgaaggagagtagtacggtgtaggtggagaattatagacgtatggtggtggtggagatttatagtttacctttggtgatggagtatagtatggtggtggtggagaactgtaaacatatggtttcggatgtggtgcgtactttgggcctttgtgttcatagctgggagaatcgtaagctggggtatgaggagatgagtaagggtatgatgtcactgtagccgcaatagcacttaggaccacaacataaaccatgcaattcattaatcccattgttcttgaggatctcatcacactcttttatttctttgtttttggttatgttagacttgaacatgaacaccctttatatagtctttctttgtgttctaacttgcgttcgtgtgtggcacttctaagtacattagaggacgtgctaagttgtttgtttgaaaattcgtgattcgtgaagaatatgtaattatactagattcttgcaactctcaatttttaagggttcgaagttgaagaagacttatatgggacaagctggttcttctttggttaaagcaactgcatgcgaattgatcgtgtgagcaacgtttggttcacaaccatgtactttcctcatgggcgaccactttcatgatccattataataaaacaaatatgacaaagacaaatcaacataatatatcgtccatgttgcagtttgttatggagagtaacattaatgaatctgtttttaacaagatcgtacttcgagaagaaaagcaaaatccaaacacaaaaaaaaagtaatcacgcagatgacgaaacaaagatgtgacaccacgcagtttaccatctaactacattaatttgagggatccacctgaaaacttgcactatatgttaattcatatgcatggatgatttattttactttttggtcttgtggttagtattacctactcacaaatgaggatttgattagatgaggcaacatacaatttgattaactacttcaaaacatggtttgtcctaaaactgaccataaagaaaaaaaaaaa

SEQ ID NO: 35179 - DNA, 4575 bp, Arabidopsis thaliana landsberg
gtaacagagatacacaatttgtaagccgatcaatctgacggatccctaaatccgagagatgatttctcatgtagcaatattctaatcaagtaacatagaaacgcaattcgtataatccgatcagaattgctccgacggaactgaccttagaatcgatcaccttggccggactgagagaacacgtaagagaactcgctccggtactcaagacaatttgcgaaaaggagaatttagggtttcaaacggccatgaagtggaatcagatcaaaattacgcattataaattgtataattcaggagaaatcaacacaatttagaagaaggattaaatacctagccgaagagatttgagtggttgttcgttgattgtcgaatccgatcaggggaagcgggtcgggtcacagattacgttgttgaaattgaagaattcaggagtaatcgacagaaataagaggaaggattttgttgaacccagcgaagagatttgacttgagagattggtttgatgagtcattgaagaagaagaagacgagagatcaatagaaagaatcatttgaaattccaaaatcacactctcgttcatatagccgttataacttatagctagaattactaaagtacccctacctctaataagatttcttactgattaccggttaccgagattagagagtcgaatctaaaaattttttgatacccgggcacggcttctacttgtagttgttacacccgtggttgcataaaaaaaaaaagttgttatactcgttacaatttttgatacgaacattaggaattgtatagtttttaaaggttttttttttcatcttcaaaaaatatttatagtttcattttcgaatagatgcaaaaatatttatatgtgataaaataagtggatgttcgtttttccatttagataattcatctgaacggaaatgaataatgatgttcgtttgtaacaatataaaaatgagatgaaccatgattttatattaaacttatccaaaaactgatagtaatccggctgagactgatcggagcagttaactagaggtgattcagatcaaaatacgaaatatcataaatactcctgtttaatttagagaagggttttgtgtaaaaaaaacctcgaagtcgctattttttgcaactttattctttacctctaaaaaatgcagaataatcttatgaagtttcactttccttctatttaggatggatttttaagtttacctcctactgtggttgtctcttattatattgatgcagctttgactgcaaactcggaagaatgcggcatggggtggatcttccaaactcagaacaatcgggttttccaccaagggaccgcaactcgcacccacgcgccctcggctctagcttctgaagccttggcactgaaatcagcattgtctgcagcgtctcgaacggaattgacttccatcaaagttttctccgactctcaagtccttatatctctgttaaatacagagacttcaacgaacgagctgcaagggattctccatgatattgcctttcttagtcgttatttccttttatctcaaattctcgtttgtaccacgcaaggctaacctgttagccgatgctttggccaagtctgcacttctttctttgattgtaacaacctcctagtcttacttttgatcaatataatagtttgcccaaaaaaagaaaaattataaagttctaaataatacttttgaaagctcaaatactgtttctttaacttaatccatgcaccgaaaataaggtagtcctcggtcctcctaccatttgtattatcgacacacatttattactttattagcatggtatgaaaaaatgattttgtacatagaaacgttgacaacattttatgttagattgactttattaacctctcgtggattcattattcaatgactccaactttcttcttcttagttctcattactgtgcatcttaacgaagaatctgacaattcaattatgatggtcgtgaggtcgttccaaaacaatatcattcgaagaaaccatttgcatatgcactacaaaacaagataacatgacgtatatactcgtaatctgggcctaagattgtgttgtgtcaaatttggactggggaagaagtatttattttgtctctcgattattcacatgattcgtcaattccacaaaacccattataaattgactcctcttcacctgccagtaagccaaatatatatcacataaattaactcctctctacacatgccattaaacacgtaaatagttgatactacatcgtcaaaactcaacttatattgaccacgtttatatgtacggtgatactcttttgaagactactggtccggtccgtgatgactagttacatttcaatctgaaaacacgaaaacatagtatagttagggattctcaaaaagaagaagagtagatacaacttgttagtcttgagatgagtgagcacaggatatggagttccaataatttgtaagcacaattcatctgacaaatacaaacgacaagtgaattaataataataataataataaaattagttttaatttattgctctaaatacgagagaggtctgacgtggcaaggcgacaaaaaaggcgtttagggtttttcttgcttcgcttgcaagtatgacgccgtcggcggcttctccgagccgccggaggggaagtctgtcaccgggaaatggtttggtgtctcccgtactttcaggttctcagggcgatgagtttccagttctgatgatgaaggtgaagggagtgattccagagagttctttggaggaaataaggaaaatgaggtcagtcaatcaagaggatcgaaatcaggaagcttcgtcttctgttcaaactgttggggtgcagaaggcaaagagatcttttctccaagcagcgcaaaagcgtgttttttctcagcaaaagtttgtagtttcagaagtggatggatgtgaaaaagttattgttccgaaagaggtgttcatcggagcaaaactgatttggtaggatttcgtgattgggaaatttttaaacgcaaagtcacctcatgtggggaagatccacatgatcgtcaacaaaatatggagattgggagaccgctcttctctaattgacgtttttgaggttaacgaatctacggtgaaatttcgcattcgaaatgaaggaatgagacacagaattttaaacagaggaatatggaatataatggatattcccatgatagtctctaaatggactccatacgcaaaggaagctcagcctgcgatgaaatccatacctctatggatcactttaactaatgtaccaccaactatgtttactgacaagggactggaatttcttactagtgtagttggtaaaccgattaggctgcaccctaaaacagaggcgtgtgttagttttgatgaagctcagattctagttgaagcggatttgactaaagaactaccaaaggaatttgttcttacgggtgaggaggagggagaactcgattctattgtcaagtactattttccatggcttcccccgcgatgcagccaatgtaagaaatggggtcatttacacacctcttgcatctctgttactataaataaggatttggagtcccaaaaaccagagtcaatacctgaagcttcaaaaattgctatcgactctactgagaaagaaactgtttctgatttagtcatagtttcagtggttaaggacacagacgttgttgagcatcaggaagtcgtaaaggaacagactgttgacacggctgggggttggagctctcctatcacaggccgtacaagtccaattaacaatcaaaaacgtttacaatatggtgaggtgtccattttgtctaatgcttattctgttctggcaacagaagatgatggtgttgaaaaaacagaggaagagaaaacagaggatgtaaggcctgtatcagaagctgcggattcagggcggattcaggggacctttcggatgagaccattcgggctattgggtttacaggaaaaactcgtccaccaaggaaggagattccaccgcgtcaatccttgccaagagggtccaaaacagcccataagactgtatctcaaccttctgcgcattcgactagagacccctctagagatcagagtaagcaggctctctccaaacatcataactgtcaagttttttctgaatgttcgaggactaaacaaaacttcaaaacattccgttattaagaagtgggttgaagagagtaatttccagtatggttgtttattggaaaccagagtgagagaaaagcattttcagattttaagtcgccagttgttctcgaactggtctgttttgccaaactatggacacaatccaaggggacggatatgggttctgtggaagaatgatgtgagattgacccctttttttaagagtggtcagttaatcacatgttcagttaaattggcaacccaaggagaagagtttttttgttcttttgtgtacgcttccaactttgtggagcatagaaaaggtttatggcaagaattaaaggatccctataactccccgattatcaacacaaagccgtg

SEQ ID NO: 35180 - DNA, 2225 bp, Arabidopsis thaliana landsberg
acacagattatccacaaatttgtggttggtattctgggggacagaaaccgctcccacatgagagcttttttaattatcttttgttgtgacattaaggattttgaattttataatcaaaaacggttatatggtggtcaacaattaaccataccgaaaagttttgctcgaatacttaaacgatccgtatgtttagcttttttcaatattgataccatgagaaataatttaaaagtgactaaaacctatgacttttttaattttctttggtcaaacaaacatttagttttagagtttttcaaagaaaaaaaaatgtatgcatattcaaatgcttgtgggttgtgcctataatttgtcaacgttcatacaagggtagtgaaataccctttcccactttgttgcacgatttgttgggctttattttcaagaatataaacaatcatagcacactctcaataatacatgcataaatatatcatcaaagttgctctttagaaataatttattttttgaattgagaaaatattataaaaattcaaaaaaatcaagacaggcaaataggtttatggttctaatcttttttattttgttcataaactgcgtcatccttggaatcttctacttctcactcatgatcaaaatttaggatagagaatggtatacggtttagtctattttgaaataaaagtttagtttagagaaaaagtggacgtgccggagtggttatcgggcatgactagaaatcatgtgggctttgcccgcgcaggttcgaatcctgccgttcacgtttttattttgagtgttggtaagtttttaaaattacttattgtgttttatggatcgtttttgaatttggacggttttctttcatgttaccgttttcagtaaaatttagtattgataaaaaactttaaaaaaacaagacagcatgaaagatatgaagtcaactttctttctactcctcttcttgataagtttaaatttgattaaaaagcttctcttgaatcatcaacatgcataaagtgttataatacaaaaccgaccttagctcagttggtagagcggaggactgtagttgacgcagataatccttaggtcactggttcgaatccggtaggtcggatcattaaagttgaaatctttttttttttccatttcgtttcaaagtgcttagacaagagtataagtacaaactcgtttttctatgagaaattggtttaagagaattgcatagctattgactgtattatcagaaacgagtgggaaatctcgaagtaattttcactgtattttaaaccgtttaagggtaaatcctcattttcgtatatttacgagatttaggcaagatattaagtgtttttctgatataatgtttttataaattcaaactttgtttacaaatttgtaatagagattcactatgagtatgctaacttaatacaaatcattgtgttcatagaatatttagatcagtacacatgcatgaaatagattacaatccgaccttagctcagttggtagagcggaggactgtagtagacgcagattatccttaggtcactggttcgaatccggtaggtcggaatttgctcccacatgagagctttttattttcttctgttgtgacattaaggtttttgaattttataataaacggttatatggtggtcgataattaaacataccaaaaagttttgctcgaattcttaaacgatccgtacgtttagcttttttcaatactgatactatgagaaatgatttaaaagtgactaaaaattatgagttttctaattttctatggtcaaacaaacatttagttttagattttttaaaagaacaaaaaatgtatgcataattatattcaaatgcttgtgggttgtgcctataagttgtcaacgttcatacaagggtagtgaaataccctttcccactttgttgcacgatttgtttggctttattttcaagaatataaacaatcatagcacgctctcaataatacatgcataaatatatcatcaaagttgctctttagaaataatttattttttgaattgagaaaatattataaaaattcaaaaaaatcaagacaggcaaataggtttatggttctaatcttttttattttgttcataaactgcgtcatccttggaatcttctacttctcactcatgatcaaaatttaggatagagaatggtatacggtttagtctattttgaaataaaagttt

SEQ ID NO: 35181 - DNA, 1513 bp, Arabidopsis thaliana landsberg
agcacaggtacctaatgtaatgtataaatataagaaaaataaaaatttacggattcctgttgttgtcacaaggttacgtgttgacgttatgcggtactaagcctctgtaccttgacctaaaataattttccgatttgcttatatcacccgatatcgacaataattttaattttgtaattatcttaatacaaacattaaatgtaatgtacattttccaggtaaacaaaaagaaaatcattgaataatacttgcagaagacgattggtatttccacgtaactcaacatgaaacgacaaataccgaatcgtggcaggatccgcaagtaagatatagtagttgaaacaagggtaaaatgggaaattcacacactcaataattcaaacttacgatcacaatataaatagctccaaccatgaccaatccaaagatcatacacacgagacctcaagtcctcaaggttcaatttttcaaatccaatgcccaacttatcaggagctatccctgaaaatgacagaaatgcccccgtacgttgtcgaaacccccctcttcgagccttacaagcccaagaaacaatacaaattgtactcttcgatgcttaccatcttcttaccgatcttcacatacattatgatctttcacgttttcgaagtatcactatcttcggtctttaaagacacaaaggtcttgttcttcatctccaatactctcatcctcataatagccgccgattatggttccttctctgataaagagagtcaagacttttacggtgaatacactgtcgcagcggcaacgatgcgaaaccgaactgataactactctccgattcccgtcttgacataccgagaaaacactaaagatggagaaatcaagaaccctaaagatgtcgaattcaggaaccctgaagaagaagacgaaccgatggtgacagatatcatttgcgtttctcctcccgagaaaatagtacgagtggtgagtgaggagaaacagacagatgatgtagctatggaagaatacaaaccagttacagaacaaactcttgctagcgaagaagcttgcaacacaagaaaccatgtgaaccctaataaaccgtacgggcgaagtaaatcagataagccacggagaaagaggctcagcgtagatacagagacgaccaaacgtaaaagttatggtcgaaagaaatcagattgctcgagatgcatggttattccgcagaagtgggaatatgttaaagaagaatctgaagagttttcaaagttgtccaacgaggagttgaacaaacgagtcgaagaattcatccaacggttcaatagacagatcagatcacaatcaccgcgagtttcgtctacttgattcgaattgctcctagtagtataaaattaatttagacaggactttttaaagttttgttagtagtagagatactagagtcttgttttcaaaacttggtgatgagatgacttttttttgcagtcatcagtgtcaattaatataagcaatgtgaaaaggtaac

SEQ ID NO: 35182 - DNA, 2142 bp, Arabidopsis thaliana landsberg
cttggtgtctaaaactacaaggagggcaactaaactatatggatataaatgtgtttgcttttgttcatagtatacaaatgtgattacgtaccgggaaagtgaaactagtacagacatcaaataattgaagtaatggcacagagtagtaaattgtaaatgttgatagcgaaataagataaagaatggacaagtgatatgatggcatgtggccactcaacttatatacatcactctgaatgcccaacaggccatctaaacagcctagctgtcctgtttttagacaattctataatatgtatacacattttggcaaaacaggagataaaagagttagtgtgtcagtatccatatatagatagtatcggtaatatttgttgaggacaaggacgtgtgcgtggcatcaagcaacagctgaacgcatctctttactcaatataccattctctctaatctgttagggtgaaaatattaatgaagtagaaatattcgagtgtgcttgcatgagaaaagagtgatatacatatatagtagtatggtaaggaacgtgagaccatgtgctatgtttaataggttttcaaaagtcttgcgtcacacaatcttaaagagggcctgagagcctatttttaataatacttaaccaaacgagtggcttgattctaactagatcccggtatgtagtatggatacgacaagctactgatggagacagatatatagtccccctcaagtcaagccttctatattcattttctgtcattgtatgtactcttcttgcaaccttttcatatgtatcactataatttgtttttttcctcttgaagacttgaacaatctggtggagcaccagaagattcactaacagccaagtatttttttgatatcattcataagttttagggtaatggagtgaaattagctagaggaatttagtctaaagctcaaactgcgaccacccgatggagttgttttggtagagcagaaaaataagttgaaatgtaagaaagagaattagttacaactgtaagttacaagtaattacacaattgtaatgcagaggtcaacgacgactgacatacttataagtgcactccattccaacatggagtagcattcgaattggttttggactgacaaaattgagtaactacaacaaataataataataataataaaagtctgtgaaggaaaaataaaagtcaaaagaccttaaatgcgtagttgatggaggttggtagggagtgtctttaatttattgttttacatattttgaaacttgaaaagtgctcctctcctctttgatttatccctacttgctaattattttacccatccacgttaccatatcaatgtaatgacactcggtatatgattggccatcgacatgcatatatacatatttcaatcggaaaaaatgtcaaaaacaagtttcacctatcaaagttggataagaaaaaaccccgtttaacaggctcgatgcactacaatatcaagtgatttaacgacatggctcagttggtttagtcaaatgaaacttcgttattacattgacaagtcaacgaaaatttaagattttaggttctgagccgaaagttggtatttgtattttattttaaccgactttgaaaggtaatctttttttttttttgatatttttcccataactttaagaatcagtatatattttacacataattgatatagtataacttaaatcataagcacatttgggcaaatttaaattaaataaaaattcgaaataacttgaaatctaacacatattaaataattgaatacaaatatttgaaaaaaatattctcaatgaaaacattattgagtagtaaacatatttacttgtatgaaagataggcctcagtaaattgggccattgtttttttgtgtgggctatatagtccacacaaaactttacttgtttaagaggcaaacaaagtggacacttgtaagtggtaaggttgtggcaaaatttgtattaaaggatattattgcatcatctagtattttaatataccatgtcagttagaagtgtactagattgaaaatttatgactgttaataaactatcgatcccatgttatattaactaaaagtttatgatactctgataggatgtacctaaatgtgttc

SEQ ID NO: 35183 - DNA, 8561 bp, Arabidopsis thaliana landsberg
  unsure (1)..(8561): unsure at all n locations
tccaaattagccatggatttgagatgatttccactcatggcgtgcatcccaagcctatcaccttccttcaacggaccgtcttgccataaatgattgacaacggttgtgttagacggccacaccatagtggcaaatatagtcatctctctattgagatattcagcggatagttgcgttacacgaaagctcagagggccttcttgaagcataggtgtgtagccatttattgaggaagtatatgcacgcataaaaccggacgtggagttacggtaagccaaaagtgtttgagcacctatcatgcctttgctcgtcgggtttatgccccaagcaatccaactagaagactcgatgttggtatgacgatatgcaacttcaagcactccggtttctcgaacgtaactgtagtgtagaaacgaatctaacacaggaaggtcaacacatgaacggaagtgtttgccattgttgaagttgtgagagtcgcagctaacttgaacttcattggttgttgctctagtaaagcatggagccaaaacgaacagaaaacacaaacccacaaaaatagttctcgaagacagaaacatgatgatggattttccgagagaacacttaggtttaatctttcgaagtcagagtatcttgcttttgaagaaattcgattaatgaattttttcgttgttagctagtggtctatatttataaagaatacacgattccaattccaagtgtagttgtgaatcgttatttttcctttttttttcgtgaatcgttctttttccttgccgacaaatctatttaaattttttgtccccccaaatttcaatttatctaatttctaccacatttcaatttcgtaaaagcgatttattttcgttgtttaaactttttaaaccaaaggagttagccacacaatctaataaataaaactcaagcataaaatgttaggagtacaaatttcgatacaagacctaagtaaaagataaaaagtaaaaaagtattgggttggctcaaaacatgccaagacaaactactactgacaagctccttaccaaaaaaaaaaaaaactactactgacaagctcagtacttaactggcgcaagaatatcgagctgtgctccgagcttctcttcaacgaccttctcggccttaactctaagtttgttaagttgcttctttcgctcgtaaaccacgtgggctctctccttcctctttgtctccagctcctgcttattgcacatcaaacaccataaagtacccacacaacctcatagctaaagatctttctttctatgtaatatttctttgtgcacaaactatatttctttttgtcatcacatcaactagtacaagcgatcaaagtggatcaggatcaatggagacaagaaggccaaaaatatttccttcttctatcaatcataactttatgaacaaagctagacacattctctttctttctatcattacaaaagctcacatccactagtacaagcgttcaaagtggttcaggagcaatgaagacgaaaaggctaaatatctatcacttctttctgaacaaaaactagaaaactagatattcaagtagctaaatattatcctttctaccatcacaaggccattcatcaactagcaatacaagcaatcaaagtagttacagagcaacgtaggcaagtagaacacaacacataccttgatggtgtcgtaatggttcacccaacttcagaagaaagacggcccaatagacagtatttgtgaccagcttgaagcctcaacaccctgaagaagagccacaatgataatcatcaatgcccgaagtagaacagttacggatccaaaagagaagaacaaaaatggtaaaaggaacaaacttgagagcatcagggatgaccatcctcttgatcttgtcatatggagtaggaacaccttcatataccttcagacgtgctaatgcagcagctccacgcttcgtcttgtgtggaatcatacttcacaaatcaaaacacataacaactatgaatcactctgctatctaaatcatcatttcaaaagcattgaattgaaatcaaccacaaatgattcactcataagtatcaaacacaaacttaatccatacagagcaagaaccatcaatttctcgaaacctcatctaattggagagataagagagattgatatacgaacccgcgaacagtacgccagaagattttggaaggagcacggaagtgaataggtccatgagaaggtttagtgttcatacgtttgcgaagaaacctcatgtacttcattttctgacgaacgagtccgccggagaggcaaatctcttcgcaccggacaatgacaactttctggccattgagaagctctttagcggtgatcgacgcaagacggccaagcatgtggtggcgcgcgtcgacgacaacgcgcttcgagcatatccctgatcctgacaccattttcgcttctcaaactgtggtgagagcttgagcggctgatgatatttctcgtgttcttttgaattagggttttgggggtatttacgtcactttaataagttgttttttttatgatgggccgaatcaattaggccttatccgtaatcgcatgggttcagagaaactaaattcaatatacacaagaccaacagaacggaatcgccgaatcggtgatgacgggagagcagtgaatcccagtgatgttgagtttaaaaaagaaaaataattttggaaactttttcggtgagcttgagaggatggatgcacaaaacagatttgctatgattttccctggatttatagacgacgaaattccccgctcaccgaccaacatcgattccagacgcatttgcagagatttcaagttaagagaaagcgatcgcatgcctgcagatggtaaaccaaaaatccacagttattctcataaaaattggaagagaaacagcctgatcatgggcgatcgatgaggaaaatatacatggggagatgaagcatcggtcatttgtttttattttgaaagaaatctatgatttggtcgtcgttcttatccttcaaattgtcaacatatctgttttcctttttttggataggtttccgcagtttatgtcgtagtttcgatcatcctcttcagttttgagtactactcgaactccgtatgatattattctgcccggtgtagactgaaactcctctgaaattacaagttttggctcaaggctaaactcgttgaagtctacgttacttggaacgtggaagatgaacatgtgatgtgctgagaatgcctctttgtcattgctgctacgagtactctccggtgggagaacgaaatcgggcttgaggtcaattcggtaggactggttatcttcctgtttacagctataagaagatgacgagagctttatgtgataaggactctgacaagcaattatgatacaggcatcaaaacccacaaactcagaggcatgccatattgggggtatgctgatttctctggaatattccctgctttgatagtcgaagtagatgggcactctacttccagataagcaagcaaaacgctgaggcacctattaagatcaaatataaaagaaaagatatggaactggaatcgatgtatgaattgagcaagggagaaacacaagggaagaaagttcacctcttcctttcgtccacatctcagaaatcgatccatcagattcgcaacttcattcaatttggggcagtagctaagatcaacgtgttttatggaatgatccaagggaaggtgaataatttccagggaagtgcagccacgtgcatagagagatgtaaggtttggtggaagctgtaccattgacttgagtttcttgcagtcattgaggcagagagtattcaacagcctaaggaatctgatagttacaggcatcgtcaccatatcatttccgctgaggtctaagtatgttaaattggtgcaatgactaaacgtatatgacaattcaaaaacatcattgcagttgtcaagccaaagctcagctaagcggtatccacgctcatcttttctggcagctgaatgtcctagtggactttggagaagtatacagttagaaagtttgagtgtctccagttgaggtagttttggtagtgtttgaagtttgaggcagttgcaaagcctgagagatttcatactagaaagattttccatatctgtgggtaggcatgtgaaatcatttccgctgaggtccagtttttgtaggacctgcaaaaggccaatgtcatctgggatgctttctatgtttaggtttatgagatttaactcggttaaccagaggaaatctgaaaagctataacactggaaagaggcactgtctttacggtagatgaactgcatgatgtcgagtgatttaaatccgtaaaactcagacatgagcttaggcgtcttttgtacttgcttcagaaatttgttaggggtccattgctcggaactaaagcagaggtggtctgcctttcctcggagatgtgacaaccaaaaatttaatttgccatggatggctagactcgtaagagagttcagtgtaactacagcatctgggaaactcaatgaagcttgccgaaaaagccctgggctacgtttttgaagggcaggcaattctcctataatcatctgaagattgatgaggcgatcacagtgggatacatcaagtttcttcagtgaaggtaagctaccaattgtttccgggatttgctccaacctcgtgcaacctttagcaatcagctcctcaagctttgttgcccttgaaagatctggaagtttggtcagattcttagatccagtgacatctagcatccttaactccaagagcgactgaatatcatacaacagaaaggacagtttggatggcgttggtgacattctaaatttgtaaacgctgagagttgaaaactgaaaagcaaactacaagtttcgtttatagcttaccatttttccatcccacaggttctccagattgctgtaacgcagatgaagttcaacaagacgactcagaggaaatgtgggaagcaaggttgttaatggatatgcgtcccaatgcaatagcctaaggctgcgtggaagtaccatacgattctttgaattgatattcagcttggactctctatcatttaagtgtttgaagaatttgagaaatatgagattttccatctgctcaaaagcactcccatctatggatgctgctcggggcaattcacacatatgtagtgtcatgccttggattctctctgtcccctgatgattgaatgtcagatttacttagcatacacaaataaaagcacaagaagaaaccatataagacaagtcctatggaagaataaaaaacatgtcgttcctagaatacttactgttttgctttccagtacgccataactgttatgaggatcccacaaaattctttgttgtcgaggtatgtacaatgattcttctaaaacaatttctctagccatttgttttatcaaggaatgtatgtcaatatatccatcatttgatatatggatgagagacttttcagctacacgtttaatccttcttttagtttcagagagaagggtagatccacgggagactggttctccattgaaaagacatgcgaccctaatgaaaatggtcttgtctcgtaggtccagattggtatagctacttcttaaaatatccatgatattctggtgaggagctgtttcaagcgtgtctattgcatcttcccactcgtctatagaggtcgctccacggagaaatgaaccgaaagctaccagggctaaaggaagaccttgagcgagctgagatgctcgaatcgcaaaacgttcatatccatcaagtgtaggaactccgcctgcaaaagcaatatttttaacaatctttaacgagtcctcattttgcaagcatttaacctcgtacttgttggtcactctgcaggaatctagcaatcttctgtcacgtgtggttataatgattcggctccctggaccaaaccagctagcctcctttgccaaggcatgtaactgctccactttatcaacaccatcaagcacaaagagaaccttgagggttccaagccttgaccgaataaggtttgcaccgttttggatgctcatcaaggccactcgttttgtacttagaatatcgcagagaagttgttgttgtatacattttagatcaactttcttacagatttggccgacatcttcaatgaaagaatgagctggaaattggcttgcaagctgttcatatagatacttagcaatggtagtttttccgatgccccccattccccatattccaaccatacaaacctcggcatcaaagtctttcttcaagagaggtcttatgttttccatgtgagcttccataccaactaaatcttcaaaagaagttgcttgcatagaagctaaccggcttgagatgacttcaacaatttcttcaagcatcatagcctcgtccgcactgcaatgacatggtagtaataaatgaatatatagactaccttttcttctccaggagaaaatataagaaacacttaccaatatctggaaaccatgcctgagagattggctaccatgcacagagctactctccacctttgcacaatatccgcgaattctggaccctggtacctttctaaaccaaaacttcctcgctggtgtctcttgtctgagggatcaacttcatagaacaagggagggactttgagtttaccaaggttgtacaattccattattaattgcagttccatcaagcaccaccttgacgttgtgtatctttcagagagaaccacatcagcgaactttgaaccttctatggctctgcggaggtggctaaaaatatgatcacctacctcaagatcttgatcgtctttgaaagtaatgattccctttgcaccaagtgctgcgtacaaatggctgacaatggttctacgtgtatcttccccacggaagcttaggaagacatcatagttacagggaggaggtgaagacaaagacgaagaagccatttttggtttggatccacaatcaattgtcaaacaacttcaattagactatgaaattccggacaaagtcaactacccgtacaggctggagcatatcgtttgcgtgcttccatgaggcatgaaggtgtgtgtatttatattttgtatttactgtattataatttttggaaaccaataaacttgcttatctttgacaatttcaatgttgactagctagtttctcatattgccaaaggagtagcaaccctgaatctggctttgttggaaacttatgtcttcctcttcttcctcttccagtcagaaattctacgtttttctgagcttccaaggcctggacacccgtagaacctttgtcagccatctccgccgttcattggacagaaaaggcattaagacttttgaagatgaaaatgagtctctgagaggtgaattagattcttctgcggtctatcagacaattggagagtcaaaagtggccgttgtcttgatatcggtgaactatgcctcttcacctttgtgcctggatagtctccttaagattttgaagtttcaccagtcaggttcactcgttttgataccaatcttctatgaagttgatcctatggatgtaagaaaacaaattgggaaactgtacgaagcattctcattgcatgagagagaaaaccctgaaaaggttcaaacatggaggcaagcactgtcccaactggtcagcattccgggcggccagtactcagagatttggtaatcctataatcaggttctatctaacaatttttttatgtgttactttaaatggtttcctgattttagtattctctgtgatagggatggtgatgcagagctgatccatcaaattaccgttgacatatggaatatatttgtcgcttccaagtcaagtgatttgtgtggtcttgtggggatggatcgccacatgaaagccatgtatagattgttagatttaggattgaaagatgaagttcgtcatatcaaaatttggggtagccgagacatcggcaagactgagtttgcaaaatatctgtatgaagagattttgcacaactttgatacccatgtcatgttaaaagctccacaaagaatttcgcgttttgaggaggttcgtttggcagaatatgtgtgtcttcgacttgagaaagcaagaactttgtcaaaaacatcgaaggacactgcatcaaggtttctcctcgtactggataatgtgaatgaatcatttgacccaataagaaaacttgcaagggtgattagttctttnnnnnnnnnnnnnnnnnnnnnnnnnnnnnnnnnnnnnnnnnnnnncagttcgacttcccctttaccgtttcaatatgaagttttagggctggagttctctgaagctcttcagctcttctgtctccatgctttcgagcagactcatccttttcttggttttgaagacctttcatgtcgtgcagtgaaactcgcaggtggttttcctttatccttaaaaagattaggctccagattttctggtagaaagaaggatgaatgggaagtgatcttgtttggatacgaaagatcaact

SEQ ID NO: 35184 - DNA, 2634 bp, Arabidopsis thaliana landsberg
atccgaacaagaagaagaagacgagtcttaagatcttgaatgttttaaagtgtccactcgctgatcattactctcccgaccaagtttctcaattgactcagtccttagaactcaatgtctctaaattccaagaaaggcttcgatttcttgagtcgcagaaacagaatgagacaaaaccggatcatcagagtttaacatcaatatcttctctgaaccaatctttgaaccctagccagttctcgctgtttatgtataaccatggatataatactctgtctcagatcccagtctctgcatcaaatttcaatcaggattatatctcagcgttacttgaacaatctgagttgaagagtcagataatgaagcaggaggtttgtggttatgagcagaacatgtgcatgagtaaccatggagatgctacgctctctcaaatcccattctctgcatcaaatttcaatcaagatttttcagccaacaacaacttccaacattcttttgtctcaaacacacaagattactactctgttcaaaaatctgtgaataacaactatgggttgaagaatcagttaatgaagcacgatctttgtggttatgagcacaacatgtgcatgagtaaccatggagatgctaccttctctcaaatcccactctctgcatcaaatttcaatcaagatttttcagtctcaatacaagaagaatctggcttgatgcagcaggagctttgtggttatgatcagaatcagaacatgagcatgggtgacatcacaaacaacaattttcaagttacttgcgcctcagtactagaatctgtgaacaactttgggttgaatcagttgatgcacaaggagttttatggttgtcatcaaaacatgtctatgggtaacatcaataacaacagctttcaacatccttgggtctcaaacgcagaccatactcggcggtacaagaatctgtgaacaactttgggttgaatcagttgatgcagaatgaactttatggttacggttatgcagacttttgttaatttcttatgattaattctgtgtgtctaatgtcttgttcttaggtgtgttgttgttctgtattcagctaatattgtaataaattttgaatcatcatccctagaaacattaattactaaaagccagtcttatgatctatttctgatttctctcttatgcataataaactcaaatttccaatagagactctcaacagagcaataactgtgtatgtgtgtgttagttgtataagtagaactaagcatatgtgttccattgggaaacaccagttatatgttataataatctgaattatctccagcttttttatggttatttagtggatagtatgaaacagtacatgcactttcactttccataaaggtcattattgtatcatgattgatgcagaggatatctacaccagtattctttcactctatagtagctagaaacaacaagtactacgtagcttattagtgtcttttaaagtacatatatataaatgtgatatgttggctcacttcacaatacctcgcttctgttcatttcccgtaaaatactcttcgatataagacatctatcacctacatgactccaaaagaatctcaaaacatcgttatcaccagcgtaagaggcactgatagatttataaagtttcaagtttaccatcaaccgtcgattatacattacatcgaacaaagcagaagcttcagtgaccttccctgttcgccaatatgcatacgccatggtcgtgaatataacactatctcccactaaacccttcttttccattgattcaaataacactttggcgtaatccacctgttctaacttacaaatccttcttattaatcctctgtatagagcaacatcagcacaaagacctcttttttcaaactcctctaggagttttgtgatttcgtcttgcttgttctggttatagaatccatcctcgagccaagaataggtcgcatatccaggagagaagcctttctctatcatagagaacagttcctcctttgcattttccagttccaacactttacaaaacccatgaatcaatgctttgtatgaatacatatccagttttagccctgattcaatcatcttcttcttgaccttcactgcagataccatgtcttcgattttgcaatatgcgttgatcaaagtattgcaggtgatattatcaggttcaatcttttttccactcatctcagtcaaaagccggttagcttctcttattcttccatcttcacataacttacgcaaaatcgaattatatgtcacaactccaggagaaaaccctcttgactccattacctcacgtaacctcaaagcttcatcaatatcattcattctacaatatccatcaatcaaagtagtataagtaacatgattcgctgtaacatcgtctttaatctcccgaaacagtcttgtggcctctctcattctaccttctctactaaacccatgtatgagtgaattataagtgacaatattaggagcaacaccacttctctccatcctatcttgcacagataaagcctcgaaatgcatactctttttgcagtacacagagatcaacgtgttataggtaaagatatcaggaaacacacctttttcttccatc

SEQ ID NO: 35185 - DNA, 841 bp, Arabidopsis thaliana landsberg
agaatgcagttggagagccaaggacgtcccacagcctagaggaggtattttcaggatatgagagccgtccttgatggcgtcctggcaagcctcggcttcacggttatcccataggattccgcacatctatgatccgcagctttgtattcaggtcgagtacagacatagcacgtcagatgggacactggagactaggctcatgtctccacgttaggactcgaatataacgcagtgtgctttagccattgattctcagcatagttctaagtgtagcaaagcgtgccagatgcatagatgtctcagtctatggacgaacattatcagattgtcgtcacaaccattcaatggtcttagaatgcaagagctcccccaataacagagccagtggggtaggactgtgtgtaacatagaacagaccccggggttatgccattcacaccaagtatcgcatttcgctacgttcttcatcgatgcgagagccgagatatttgttgtcgagagtcgaatgagacttgaggtcgctgcacatgaaaggcccacactacgtatacagggaggcgaatgccagacgtatgttagcaaggtacgtgacacatgatatgtcagcgtgttgatatatgcgatgtatgagctcacataaagactgatgttggaaatcaccgccacgctaatacatgaaaatatgtatcttaatgatatcgtaaattatacaataacggtaatcaaactaaacctactaactgaacaacatcagatgatcataatggcatgtatgaaatatgagctaaaaataagagtggctatagtctatttatttatgaagatgcctaaattaaagaca

SEQ ID NO: 35186 - DNA, 2966 bp, Arabidopsis thaliana landsberg
tgagggactggaacaaggtgttgaaggtgtgaatacacttgttgaagaggggtttagtgactcaagatctcgattcaatttgggacagaaatacaagtttcataaagtttgattccttgacatttgcctcatcgtgatacctgtcacagtaacagtagcaacacccatagtccaacattgttcatttgttcttaaccttgtggtctttgttttgctgataggtaatattgtaacatttgtattctctaagatcaattttgttgatttatattttgttaatgtgtgttatgtgagtttattgatgaataaattccaattcaatcaacagttataaaataattaaatatgaaataaaaattaaccaaattaatccatgttgaaatgatggaatttatttggcctaaacatggatgggtaaaaaataataaatcagatacgtataatggttgttaaaacaaaacaaaccaacgatcagatagattaatgatgattaaggaaattaatgaccgtcgatcaaagatttactgggtcccacactaccaaaataagaccgttagacgtaagcaaagaaaaaaaagaagggtaaaatcgtcaacagaagaaaatctctaaagaatctctctaatttttctatgagaccgttgagaaaccctttttaccattaaataaagtctttttgcaaacaacaaaatctggttaaccaaaatagctctctcttttactgaagaagtgatcgaattttattcaacgatggcggatataatctcaaatccgaccatggaacaactcttcttctctgtagatccgatgtctcttatactctctcaaaactccgacacacatcaacttaaactcttgttagacggtttctccggattcgaaagaggtccaagatacgatgaatactcgagattacgtgaatcgaagcttcgcatgaaacgtgattttcagaaattcctcgaggaagaagacgaagtagacgagccaaggatcaaaaaacaagtcagattcgagggtaattctgtaaattcgcaagaaggtgataagtattcgccggagaagaagaaacagagtcggttcgagggtatttcagtaatttcacaagaagataggttttcgccggagaaggtgaagaaacagagtcgatttgggttttctccgatgagaaaagctgttccgtcttcgttggcacaatcagttcctgatttctctgctgtgatacgtaaagagaatcgtcgtccggttaatatcaacactattactccgccaccaccgacttcgaagagtagaaacggcggcgttttgacgggatcggcttcaagagggagcaagtcggcgagtgctggagagaagaagagtaaagggatgatgatgatgggaatggcacgtaagagttacgctaatgttgaagatcttaagaagatttcaatggcggctgcttctgctattaatggcggtggcggtggaggaggaggagggagaaaagttggtgactgtggtggtggtcgtcggactattcttggttacagacatatttactgatttcgtttatcaaaagctttgatttttacacgattttattagttttttgtgggattttgattgatgagaaacaattcttggatttgattgttgatttgggtttttgtggctttttttggtgtgttggtgattttgatttgtttgtaaaaaataaagcataaattcttgatgttaggacttctagtacctcaaggtgtcgactttgctcaagagagagaccctaacagaactaagaacagagagaaaacggaaacagagagttcgatggttgtaggaaaaacagagacaagtgtggagcagaaataaaagagacaagacacaagagctttggtaacccagttcactaccaaaggcagctacgtctgggccgagtcttatactcggaatccactaaaacaagacagatattacaagtagaaatgataagcaagtccactctaatgcccttcaccagcacttagagcttactctatcagtttctaaacccagagaaatacagaacaagtttatgctattcttatttctctcctcactctatcttactgtgaaccttatgtttttccccactctctctcaaacgcctatagcacctatttatataaaagataactagggcaaccttgtgtcaatgctaacgtctttgcgcctccaaaaaagaacacaatgccagcgtgtaaccgtgttctgtcttcagtccttgataaagcaccttcacaccttaggacacaagcggacagatcgtccttatggctgaagaggcaacctcctttgtgttttaacctgttgcctgctcaccatggatgtggtcccaaaagtaacttaacctgggttgatatacttcaccatagttaagctccaacggtaactcatcttttgaagcatcttgatactcaagtcatcatttgtctcacaaaactccacctgatgatatgaggatcaaacaaacaccacaagctgcaattagagagagagttcataatacctgttttagtttcctggattcctgactcggacactctgagtcttactactcagactggatctggagtagtttcaaagcagcctgaaacttgctcacagccagagtcttggtgaagatatctgcagggttcctttcagttgatatcttcaccacatcaacatcaccatctgcgatcacatctctgatgaaatgatgcttcacgtcaatgtgcttggtgcgttcgtgatgcacattgttcctggagagtgctatggcactctgtgaatcacagaagatctcgatgctcttctgttcatatccaaactccttcaacagtcctttcagccacagagcttccttgacggcttcagtaagcgccatgtattcagcttctgtagtcgagatagcaacaacacgctgcagaccagacttccaacttatggtgtttcccccaagagtgaac

SEQ ID NO: 35187 - DNA, 2248 bp, Arabidopsis thaliana landsberg
gatgtcattcgacgtccttagcccacaaatcactgtaatactctaagaaaaaatttgggtacaaaataaataagggcttggctccatagcggatgttaaagatagctgatggaacccacctgaagaagaaggtgaattgggtagctcattaagctctgtttgttcccgctcaactccatcacgcacatgtgagccacccaaatctcctacaaaaatatcaaaagatatactaaaaaaaggccgagaaacgcaaaattcgacaattcctacaaaaaaaaaatctaaattaaaattatcagactctttgtcaggtagcctaagtcattcataaactagctttattgagaaacgagatcgaatccacaaatccatcaatctaatagaattaatcgaacaaaagagcagaaatccattagacaagtatagaagaagaagcataccagagggttccgcaaagagatcaagcttgacacgacggccggtgctattcatggcggcgtaacgacgctcttttctcttccccatcagatgtcttactctctcttcagactctaaccccaagccaattaaaaaaaaaaaaccagaagtagctttcgcgtcgcgtcgaaaggtaaaaactttatattcgaaccaaacgacaccgtttcttcgcaaaacccgccaaactgccttaggctatttccattgagatactttaaaagtttctaaaaaagaaaatataataatattttattatgatttagtttctgtccaattataaacacacacatatacacatagtctttcaatcattaatctaaagtttcattactctaaagtttctctgcagaaaaactattctcaatctctctcttatttctctcatactttattattattttatattttttaatcaatgagaaactatgtgagagactactaatggagatgctcttacaacaataaaacggttacaaaatgagaagtaacgaaatgacaaaaccggagacacgagatcggatttggaggttgatcggaaaacaaagaaacacatccattaaaaccggcgattacaagaagcactgctttgcggctacgacggtggatccgaactcattgactgaagtaattggttccagtcgctaagtcgaccccccgaacaaacctgaacctgcaacacttctcccgacatgaaccgttccccagataatccggaacccaatctctctaatcttcgacctagcaaaaagagagaacctagaaatctaacacccagtctccagcactaacaataaatgttatcttctccaagcaaagcaaacctcagatccggcctgacgaaaacaaaatcttggaagctgggaggatcagtggctcaaaccaagcctcaacaaccgaaatccgagaaaagccaaaacagatccattggatctgtcgttaatcgtctcgacaaacagcctaacccaccaatccgccttcatgacttccgccgcaatccgcagccctcacctcgagaagttgagccacaagaattctccaccaccataattctagcgtccatgaccagaaaaaatagcatcgggaaaatcctcaaacttgtcgtagaggaagccacagatgcatcacgaaccggaactccacaccacagctatcggagaggagagctcgctcaccaccgttttatggagcaagaaccctgacctgcaatgaagatctaaaagcaaaaaagaaaagcaaaagtagatctggttttatttttcttaaggagagagaagagagagacgtggaacgattgtcctcaatcagttgttattgcctttgttgttgtgctaagatagctttgctctgagtgttcgcctcttttttgtgtttagattgagttttagaagagctagtagagctaatggcttcgtgtgatgttgaatggttattatcttgctttgctctgctgatttcggaaagttagatattgttattttcacaatcagtaatagccctcctgcttttgcatctaattatggaaagatagaattgaacctcatcatttcatctttttctatagtttcattgtaaagttgagaagatgagccgaaaacttagttttaagtttttaactaaacatctttatgttttcatgtttttgttcatttttttttgtcatgaatccatatgtataggtttccaatctatgcttataacctaaaatgtttttattatcaatgatatatttccaatttagcaaaaagaaaaagaaacaaaaagtgagata

SEQ ID NO: 35188 - DNA, 4032 bp, Arabidopsis thaliana landsberg
gcacataacattcaccatagctcaaactaactttcccatcaaacctctagaactttatattctcaattgtaatactcaataaccagaaaagttacaaacttaacaaaccaaatcagatgtagtttcacctatcatcaaatgaaaaacagagacagagaatttgggtttctactctaacaactagaattctcgataacaagaaaagttacaaactttacaaaccaaaccagatatagtatcacctatcatcaaattcaacacatttttagatagttactctcacactcgtaatcattgtacataatcgaaaaagagattagaaacaaaaatcactcgaattcaaacttaagcagtcacagtaacttcgtgcaggagcttaccggagatgaattcatcataaaccggcgacggtagcggcggagcaaagcaaaaatgcgatgattcatggaataggtctcaaaagtcacgagaggatcacgtgagatatcttgaaaagaatcggacggctaagaataaagcagactaattctcttatctatctctaaccgttaaataaaaactaaagttttaaccttttaacctgggactagggttttcagatttcactactcttgtcgtgtaagacttgagcaactatataatctcaacttttctcaatcactatccgctgcggtctcgccgtgctgcccacaacaatctccgacttcgtcttcctcatctatcatcgtcgtcgtcaaccttatttatctcttaatttatcattaaaaccaaaaaaacaaaaaaaaagccttagctttcgtttcttcaatcccagcaaaaaaaatggctcaggttcaagctccttcttcacattctcctcctcctcctgctgttgttaacgacggggctgcgacggcttctgctacccctggaatcggcgtcggcggcggtggagacggagtcactcacggtgctctttgttctctctatgtcggagatctggatttcaatgtcaccgattctcagctttatgactatttcaccgaggtgtgtcaggttgtatctgttcgtgtttgtcgtgatgctgctaccaatacttctcttggttatggttatgtcaactacagcaacaccgacgatggtttgtgccctaaaaatttccccttttttttgttgattgataacatttgatattttggtaaagatctgatttttcggttttggaatcattcctttggctagtttgattgatgggttttgtttgattttgttaatagatattaatttacacgaatttaaaatgttgacactgattagggattttgttatcattgttgttttttgtaatgtcagcggagaaggcaatgcagaagttgaactacagttatctcaatgggaagatgattcggattacttactcttctcgtgactcttctgcccgtagaagtggggttgggaatttgtttgtaaaggtatattctttgtttgatgtctcttatctagcagcttctctttttgtttgattgcgtaattatgtattctttctttatgtgaagaatttggataagtccgttgacaacaaaactctgcacgaggcgttttccgggtgtgggactattgtgtcctgtaaggttgctactgatcacatgggtcagtctagaggatatgggtttgtgcagtttgacactgaggattcagctaagaatgctattgagaagctcaatgggaaagtgttgaatgacaaacagatttttgttggacctttttttcgtaaggaggaaagagagtctgctgctgataagaggaagtttactaatgtttatgtgaagaatctttcggaggcgactactgacgatgagttgaagactacttttggtccgtatggtagtatctcgagcgctgtagttatgagggatggagatgggaaatccaggtgttttggatttgtcaactttgagaatcctgaagatgcagctcgtgctgttgaagctctcaatggaaagaagtttgatgataaggagtggtatgtgggtaaagctcagaagaaatctgagagggaacttgagttgagccggagatatgaacaaggctcaagtgatggtggaaacaaatttgatgggttgaatttatatgttaagaaccttgatgataccgtcaccgatgagaagttgcgcgagttgtttgccgaatttggtacaatcacctcttgcaaggtcagcattgtttgttttccgcatacataataacatgagagatgcaattttttttgtctcttgattgatcggaacctcatacttttgtaacaaacaggttatgcgggaccctagtggtactagcaaaggatcaggatttgttgccttctctgctgccagtgaagcttcaagagtggtaatttaaataatcctgtgtcaagacaatattaaatttgttttgagcctctattttctttcttgattcaatttcttttggggtcttctgcagctgaatgaaatgaatggtaaaatggttggtggcaaaccgttgtatgttgctcttgcacagaggaaagaagaaaggagggctaagctgcaggtagtacttcccaccatagataaacaacccctacgtacacttatgtttgctatgtctcaagtccttatgtttctttttcaggcacagttttctcaaatgagacctgcttttatccccggtgtgggtcctcgaatgccaatatttacaggtggtgctccaggtcttggacaacagattttttacggtcaaggacctccaccaatcatccctcaccaggtaccattttgttctaactgaccactatgtaactctgcttgaatatgggactctttcaatcaataagcactcacttggttctacttaaatctgtgatatagcctggatttggatatcagcctcagctggttcctggaatgaggccggccttttttggtggaccgatgatgcagccaggtcagcaaggtccacgaccaggtggcagacggtcaggtgatggacccatgcgccatcagcatcagcagccaatgccttacatgcagccacaggttagtttataaaaaaaggagaatatgtcttaaatcccagatcaagatgaatctataagtctttgctttcttctctcctctagatgatgccaagaggacgagggtaccggtacccttctggtggtagaaacatgcctgacggtccaatgccaggaggaatggttccagttgcttatgacatgaatgtaatgccgtatagtcagcctatgtccgctggtcaattggctacttcccttgctaatgctacacctgctcaacagagaacagtaagtctctctcaatacctcttgacttgctgctatgtaggagaaaaaataagattacttacattcgatatgtttgttttggggtttttgtagcttcttggtgagagtctatatccattagtggaccagatagagagtgagcacgctgcgaaagtgactggtatgcttctggaaatggatcagaccgaggttttgcatctgctcgagtcaccagaggctctaaatgccaaagtttcagaggcattagatgtgttgagaaacgtgaatcagccatcttcacagggaagtgaaggcaacaaaagtggaagtccaagtgatctcttggcttcactttccatcaatgatcacttatgagaagcttttgttcgagttttttttttttactttgactctcttcctctctatctctctctctgattgacaaatttttgcgggaatctatttgctgttttagactttttttgctcgatatgattgtttctgttttgacttcttacttttttgggttgacttaaaaaaggatggttttattttattttgttggattatattttactgttgcaaaatgtttgcgctcagtttaaaactttttatgattgatttaagtttttagttatttgttggtaattgtcaattttgaacgagaaggtgatgaaattaggatatgtatagttcattagctaattaatccaattttagtttttcacaaatattaacaactgattataaat

SEQ ID NO: 35189 - DNA, 1068 bp, Arabidopsis thaliana landsberg
gccctctttctctctatcacatccactgtttttaatcattgtttgtgtttcgaatgaaggaaacaagaaagaacaaattgaaattcctggatttgttataaattcttagagttgcagtttcattaacatgagcaacgagtttccggttagaaacttcatttttctatttttaaaaaagaaaattgaattcaaaatagcaaaacaacgtcggtttagttgatgaatatgccacgttaataacatgtgtcatctgattcaaaaatcattagcattgactaatatttgttaacgttgactcataattatgcactatgtcaaaagtttaggtaggttttttgaaaagtttaggggtttaagtataaatcagcacttgtcgtttgttcaagctgaaaaacatactttcttaatagttcagattgaaaaatgccttcttctcatgaattagcagcaaatttggctcatccagttgaatgatgtgcttatcaacttgcaagcatctcttgtaagtaataagagcatttgcaggagcaaccatatatcttctatagacctctgcgccacgacctgcaccacaaccttcgtttgcaatatatctcaagaatgagtttaaagctgccattaatgatgccatcaaatgtcttcaaagtctatcatttattcttgatgaagtcaataagcatggtttgccttatgtccctgaattgtgttgtatgagcaatttcattagttttttttatagtttttttgactaacaaagttcatacatgagagacaattagacgatttcttctctacttcaagctttctttattgacgccttctaaataattttttattgtggggtttaatttagatggtttaatgtctttattgctctgattcttagttactcaaaattgagagaatccatattctaaggatcttaatttgaattatgatagatatatgtcatctaattgcgaaattgcttttctatgctttaaaaatcttgatattgtgggaatttgacttttctttctctatgtgtttgtattctataatgttctcgtggcaggttgtctttaattt

SEQ ID NO: 35190 - DNA, 6612 bp, Arabidopsis thaliana landsberg
tcttttgaatgaaatggtggagaagactttagactttgttgaagatcctgtcaatattcctgaggataaacccgagaatgactgtggagttcggttatttaagcggtgtgctactggcattgtatttgatcatgtaggttagtcatcaccgagaatccagctctgaatctgtgaactgtattattattatgaatccgtcgagaaacttgttttcgtgtttttcttgtcaaccagatgagattagaggacctaaaaagaagcctaatttacgccctgacaaaggagttgaaggaagctctaaagaggttgttatcaaacattgttctgttttgcgcgggattatgaaactatcaaagctaatttctttctgttttttgtgggtactgcagtttaagaaacgagtaaaatcaattgctgttgatggttcggatattttaactgctgctatggaagcggcgaagaaagcctcggctagattagatgcgaaagaagtggcagcgaaagataaagctaagaaagaggaagagagaatcgcagagttgaagaaagtaagaggagaaaaatggttaccttctattgaaagggcaatgaaaaaggaaatgaaggtacgttatacatatggtttctcatatttgtgtttcattcttgtgttagtagtagtaacatatcaacttaacaaatctcgctatgtatttgcagcgtatcaaacataccgcatggaagtctgcaatgtcgtgagctttcttcttttgaacttattatcaattttggagtctcattaattgaagaagaaacacagaatcattcactcttggctacaaaacttttactgaaagaagattatgaaattattatgtagagtagagagagattatttgttcttaatgtagtgagagtgaagttcttcagagatgttgtcatcattgtcgtctttgatccagacgaagtcttctaatccatcataaatctcctctactgcatatgcatttttcttgggtacttgtttggatgatgtagagaaagcattctttattcccataatcagtctttttccgatacttttctgcggttgtgcttgtggtggagatgctcttcttcgccggtaagttgtgctcaggtttgaaacagaacctctatcgcctctctgcgtcttgtttacgttactcggttggtgaacgcaatggaaactcgcggatcgagcagaatccatcacgcttcttgacctcgactccacgatattccggtccgatttctgcttctctgattctttcgataggaatctcttcattgtgtcgagctctttctctaggctttcaatcctcgagcttgtggaattcatcgcagctcttagccgacagttttgcctcgccgccgtatctcgctggaggagcgatccaagcgtcacggaggagtctctcgcctctgtggcaatctctctgtgtcgaacaccagtaggagccgcgcaggacgcagcaacagcagctaccatgatcgagtggcgagtgttgagctgctcttgtagcatcgcccgaactataaacctcaggggcattttcgggttttgaacagcgtgaagtagtaaaggcggcgagagtttgtcacagtctatcgaattacatatctgaaccttctcttcctccgtcatctctccgtcatgttcctgaagaaaaattcaaaagttttatccaatcataagataacacgtaacataatcggttaagacacgtttgagttgacgaaagtaccctttttaccttcacataagcatcaacgattctataaagcaaatcgtgacgcgggaaccgctgctgcacggcgtcagcgacgacgttaaaatcgccggcgggaagtttaacagcttcttctagaaactcgttaacgccatcaccgtctccgatttccatcaaagcttctacacaacgtccgatcagaaacgcggtcgtttcagactccggaagaagaagaaggcacgaacggagaacgatctgaatgtaatcaacgtttacgaagacgactcgtcggagataagactccgtcaagttcctcaagctctctctatctcttcctccgtcgtcagcttccgtaatcagaagaacctccacggcgattctcaacgaaacgacattggacggcgttaactcaatgtgagcgccgtaacagaaaccggcaactaacgaaaacgtttcagccgttatgtttaacggcggtgagagagttaattcgttaacgcccgttaggtggcgttttaaatagccactctttgacagaggatcctatgggattataattaaaacatcacataatgacataaaacataacctcccaataaaaatcaaacctttttgcttattttgcaataaatgtgtaattttttaaatttataacaaatatacaattaaaaatcaaataaaaatatcatagtttttgttaaaaaaaatttgattttttttatgaaaattgacaaataaaagcttgaaaatatgtaaccttgtgaagatggaaccttgtgcctcccacatttacgaatacatcaggtttagagttattagccaacgacctgaataaaaatatagaaaaaacacccaaaaaaaagagaaattataatttggtaaagattttctaccaaaaaaaaaatgtggtaaagatttggtaaattttctaagagaaacattaccatttatggactcgagattcaagctccattgaaggagaagaagagagattgataggttgtttaggagaaagagacaaagatgaagaagaagaagataaagaagaagagtgatgatctacgtagtcttcgtcttcataaatcgtatcaacaaaccctaagtttgtccatcgcttcatgtctttttttccgagagagaagagatcaaagaatgagaataatttgtgtgagttttgagaagattcgaattcgccggttaggtttttagtatcaagaagagaaggaaattttggacagtgaatgggcaataaatgtgagtaatatgggaaataaatgaatttaagaggatttgttgtgatcgttattatatgcgtgaaagtctttaaatgcgtttttcctttttcttcaccatataaccttctaattcatgtagagggaccacgtcccacatgttctccaaaatgtacattcgttctaacattcaaatttcacgagatttcaattaggtttaaattgagcttaaattgttgtgtatatatagtactagtgcaagtttgattggttatttttctttacttattgacatacttgtcgttgtcgtaaaaaaaacatggattgtttatttgtttatatcaatttgtttgcaccaactaccacaagaaaattagtttgatcggccagtttaatacaaagtccacttcatatgatactcatttctttcataatttgttaccgcctctaattattattatgtacaacatcattattttgcttgaaaatatatatatccaagagtcttggaagtccttgttcaaacattggcaatgggttcgaagatgtatgagtttcggcctgaaattttctaccggatgtatatcaaattgtggttatggatgtctaatatctcgtttaaaaacattttgatataattttttttaattactttattcattttcctcatgcctcaaacacaaggtactatttgaaaaatacaattttgacctgcaaaatcaaaaaactcaaagaaatcatgaaacaagacaagaaacctgtaacgcccgcgatcctcaataggatcgttggctaggacttggtccgagagaggaaggtggagtctcggacaagtgagaaggagctggccataagctcggacaaaggggaaatcatgcaggctaagctaggatcgtaaagaaatcacttgggtcagctcgcccaaagctcaagctcagctggaaggagtgacggttactcaggtcgagtgacagtccagctcgggcagctggacgagtgacggacgagctcgaggcagctggacgagtgacggttgaactcgaggtagctggacgagtgacggacgagctcgaggtagatgggcgagtgacggacgaactgggcggttatgggcgaagagatacaactcttcggaaaggtgcaactcttcggaagggcgcaactcttcggaaaggtgcaactcttcggaaaggtgcaaggaacggatgtgttgattcgggaagcatccattcgccccctatataaggaagggcgcccaggaccattccactcaccacaacacaccgaaaacacaagaaaactcaccattaaaactctctccctcttgggagaataaatagtcttaggattcggtagccgggctgtggccggcaataaagaaggaaggtcggatcgacctaacctcgagaaggaaggtaagggatcctagactttgagtctaagggttctaggatgtgaattagtagtcggatccttgaaaggaccgactagagggctgagtagtatccgggtcatgtgcatcctacacaagactcggtccgggtagggatcggctgaggcggggacgcggctcggcggaggaccggcgggtcttaactgacctgccgagaatcggccggactgatgcgcgatcttcccctctctgaattctctccacggatcggagtagtgtatggcatatagagcattgcatggacttgcatacatatgattaagtaaataagattacttatggctctatgactttcaggaacgaatggtgatcgtgggaaggacttggcttaggcgcgagagactcaaggccgggatgatgggtggtgatagttcagatagtctagggatcgattatatgacttgtaatagcttatatgcaaactcataggttgtatcgaatcctttgcttaattaataaagtgtccgattgtttgtttactctattcgtctcatatattgaatctcggaatcatatgaaacggattagactaggaaagaacctcataaacggttagggccgagtcacttagtggcttgggtcgagagaactcgcccggactttaggcagtccggatcggggcctttcactctccatgtagaaatgctgttttaacatccatttgttccagctccatatcgtctttcacaacagctgacatgagaatcctgattgaaatgtgtttgactactggagcaaacaccttctcataataaattcctttatgttgtgtaaaccctctaactactaaccaagccttatacctctgagcttcgactcctggaatacctggcttcagtttatacaaccacctgcagctaatcactttctgctctttaggcctgtaaactatatcccatgttccattcttgagtaatgaatcaatttcttctttcattcctccattccatttaatccaatgtttgtctttctttgcatcatgatagcactgaggttcttctgactcaattttcttcagccataaccaatgcaaaagcaaagtgagtatagtcaaccatcttctgaggtgggtttagtgctcttctttctctgtctctagctaactgatagttgctgagatcaatacttgcaatgagtggttcttgagttactgtgttctctgaatcagaatcttggtcaatctattatatagtaactccacctgttttagaacactctccatgttctttaactgaaacctgaaactcattgtaaccttctgagtcacttatgtctttcacaggttgttcactgctctcccttatatccttgtacacctgactttcgttaaacagtatgttccaactgatgacacacttctcttcatccaataaccacaccttgtaccctttagtaccttgtggataccccaagaaaactccttttagtgcccgcggttttagtttcccttgatccaagtgtacatatgctatgcacccgaatcttctcagatgtttgtatcctggcttcttgtcaagccacaattcctcagggacattgtgatctacacaagatgcaggtaatctattcaccaggtaagctacattagtagctgctttagccgaaaaaacttcttcaagacctgactcattcaacaagcaccttaccttttccattaaggttctattcattctttcagcaacaccgttttgttgaggagtacacgttctatgcctctcaattccattatgcttgcaaaactcatcaaacttgagattgcagaactcaagaccattatcagttcgcagtatcttgaccttcttgtttattgattctcaacaagctctttccattcacagactttcaaatgtctcatcctttgttttctgaaatattagccaaacttttctggacttatcatctatgatggagagaaaatactgttttcgtgacagtgaaggagtaacatttggtgaaccgcataagtcagcatgaatgtatcctaaaacctcctctgtgatgtgcttcccaacattaaaactcagcttcttatactttcccataacacagttctcacagaagcttaagtccctaatgtctttcttttcaagcagtccttcttctgctaaaatcttcatgttattcaaactcatatgtcaaagtctgcaatgccacaactcagtcttctcattggacccttcacattgcagttctcata

SEQ ID NO: 35191 - DNA, 2472 bp, Arabidopsis thaliana landsberg
tcccctcgtaattttgaaaccatgaacctttacatgatcaaaggatacaggtacttattgttacaatgcatttcaatagaaaacaaaacacaaacaacacataaacatcactaattcagaattttaaaaccatgcaccttaacattagaagggtcacttattaattattacaatgcattttcaaaccaaaccttggaataatctttgaagtttctcttggatgatcatgtcgattttgttctccatttcaggagtcaaatagttcttccaatcaccgacttctcctttacggaaaaatgttttgttatctctaccttcacataattttccagtcttatttatctccaaactgctcagattacgtagagagcaaagatctataatctcatccaccaatccgttctcttcttcttccttagtaaaaggagaatctaagaactcagcaagtctcttgatctgctcatgaggttctgctttcatctcctcaaacctcatgaaaaggacatgatttggatcttccaagcttcttctccagtagcttaagacttggtcccaaaaaggcccaaaaaagttgactcccttacaaaaagactcgaacgtttcctcgaaactggtttttacgttatcatcattagaaaagaaatgccaatattaaaccaatgtgtctttcatgttcctgcaaatatacacaactttacaagtagaatctttaagcacttcttgcagcgtatgagacggcatgtgtgtcgagaacagcctcggagacgatgagaacttggtcaggtccggtttttcgctatagtaatagagattcattttaaggtaggggacaagaacgtgcggattgttagaaagaaggggatgatgatgatcatgagaagggtgttttgatctatgcactagtgagaatgtaagtgccttgagctaagtcgtgccgcatttagggaacgaagcaacgatgatattggtgtcttgaggcttgaagtttttctggaaattgaggacagcttggagaaagtggtgagtataccaacaaccttggtacttacaaacatttatcccagtggaatctttgtctgaaggaagtgaagagatgagagtctttgtttcttcgcttaagtcatcgtttctcaagttgaccgccatatttttatcatccattaccaaaaattgtggtttaggacagaagcggaatgagataagaggtctcaacgagccttcagcatctgaaacgggagctttggttctaaagcgaacaacactttgtaaatcatcattatgattgtgttgttgcaatacgcaacgttttcaatcaacacttgtttgtttatttgtcaattgttaacgttttcaatcgacacttgtttgtttatttgtcaatcgttatggacttatggttgctaggatttgttgtcgtagttacgatttagttgtagaaaattcgtatttaactttgcgttattgacttatagtatcttttctgcgttaagtaaaagtatatcaaaacatgaataaaataatgagtttataggattgattttcgataactttatgaaagtaatcaaagccgtcttagctcagtggtagagcgcgtggcttttaaccacgtggccgtgggttcgatccccacagacggcgatcatggaaatttgtccaaacaaatttttggtgcttgcagccaccaattacttaaggacgactaccattatacaactatatcataattttgaaaataaggaatatcaggtataattacattgataatactaaaaattaacatccatcaatatgaaaatagaccatgcatgagattataagccaagtttattcagatcacaaacagttcataacaaatacacacataaatatgataggaaaagctgtttcccgtaactaaaatatagaatgcatggaacaacacatattgtccgggcacagccagagttagttagggcagctgcggcagcgtggaaagtcattcaacggcgtctagcggcggtctcacgctggcagttgaagaaaacagccgcgacggggaggccaagatcgttctcatgagcaaactctcgagtgttgaattggtctctgtaagatggcacagacaccacacttcctctacgggtctgcttgaacaacaaatacacaaagcggtggatccctatgtttggccgaggcatctcgtacccgattatctctttacctgttttgtattctcatattaaaatctttgaacagaaaatatacgtatatgaaatgtgatttgttatatctaaggatatatgtataggacttaccaaatgatacatcagtcgtccccgggatatcggtaacaatcctgagattagtcattgcaagaaaatgttatgtatttttattatatgtctcttaacattttttatttgcttctttggtaaatctctaacttaacaaaatttgaatggaacaaaatttaccagtgcaagtgctctctca

SEQ ID NO: 35192 - DNA, 1977 bp, Arabidopsis thaliana landsberg
tccctctgctccaccagaactgtgctaagacactacttatttctttgcaaaactctttcgtcaacttggacacattcatggaatatattggcatcgcaagggccaccgctttgagcaggacttctgtgagaccccttcccggacgtctcggcgtccggcaacgttgtactcaagtttgcgtctcttcccggccgaacctcttaatttttcgcgattcaacatagaattgcctttacgaggctaaattctataatcgctctcttattacacagcggaagtctttctaaccttggtttaattctaaccaactcttgtaccggtttcatcgtctttgttccttagacttagatcaatcctttactcagtcaagacatgcatatgttcgctaaccattctaagcctaacactcgcatatccctttatcctatttccacggtccattcccaaacgtctatcctaactagtaagctagatcgttacataccttggccaatatgcggatctcattccttagcccgtttgtcgccttatcctattcgttcaacgattcgtatgcgatcgtgaattgatgaaccaatccctatcgttacttagccatacaatcaaccaaccaaccccactggtctaagtacaacaatagagattggggatcgtacgacttccttggttcacgatggccgaatcaagctcttagcttattggtccatccgttctccaaacgtacgcccttctggctacatggtggacgattgagccctcggcttatcgaaccatccatgtttccgttccggtcatttactacgaccgcccacggtttactaaccgtttatccatccggtctatggtggtcgataaagctttcggcttattaatccatccatacaatccgaactatatccttatcacacccaagggtccgtggattcatccactggatcatcgtaggctagcccatgaaatccttcttccgtcagccttaggtttgctcgcgggtccaacatccgttttgtccatcggttcccaccgtggactttcccgttggttatccgtcgagtcaccctttggtcttaccgatccctgatcggtttcaccatggctgaggagatagatacatgaaggcggccgcgatgttgatcctatatggtgaatcacgttccttacccattcttggtgctttctccctttatcggtaagattgcatccatgggcgacccttgggtgtgttcagatgcacttatccttgtgcttcctcgaacacttttctcgatccatcccatccgacgatcggtctgtccgacctgttccgtcagacgatcggcctatcccatctgacccgtccgacgatcggtctgtccgatccgtctggccgatccgatccgtctgacgatcggtctggccgatccgatccaacgatcggtctaccagatctgattcgtctctaagacgaacggtctaccctctccatcctctacactccatcgaaccgttggaccgggaggtagcatgcgcatcagttcggtcgagttatactcgccgagccgcacccctttccgaccaacaacttcaggatgtgttgggactcttttaagaatgttttgtggtgttttgaatgttgtgagatgattccaaaggccttgggcgtcctcccttatatagggggcgaatggatgcttcccgaagcatcacatcccttcctggcatccttccgaaaggtcacatccgttccttacatccttccgaaaggtcacatccgttctttgtatcctttggtgatgcaactgttcgttggtactcgctcgaccttacaccttttggccgagacacctcttcacccgtgagctaccacagtcaaccaactcgagtgtcagatgaccggaccacccaactgggtcagtactcgatcagctcaccgagctcagtcgagctgttggtcaactcacctagttgagctagctagtcttccatctggtttagctc

SEQ ID NO: 35193 - DNA, 152 bp, Arabidopsis thaliana landsberg
agagccttgaatactagaagaagggcacctacacctaacaaaattaagtgaatacccagcatggaggccacactataactatctttccatacataaccgaaaacgggaaaagattcttcaagagtttcgggtcccagaagtgcatataatcc

SEQ ID NO: 35194 - DNA, 2594 bp, Arabidopsis thaliana landsberg
acatgcatttcaacaatgacatttcattagataacatcagcactgaccattgtcagacgcacacagaatattttcataatgtctaatatatgtatgccaagggaaactagaaatgtaactatccatgaagacagttgtggctaccaactaagcaatgcttcaccacaagagtttaaacatggagaagataaaattttagtaatacctgctgattgctcagtatacaaccctgctgcagtccagtacttcataaaatttttcttcactcgcttcatcagatccacaatataatcacctttcttattgtacttggaacagttattccaaatgtagttgacatccttgtaaacatcctcagaattcatatacttgttgcctttctcaaaattgttgcatattgttccaaaatccataggtgtcttgataatatcgaaatagtcctgatcacataatcagaaaacagtctcacgtgttagacatcaattctgaaatccctttaaaagatgaaagatactggagcctggagattggaaaagtataggagaaattatccagtaaaaatgtcaagtgacagggacaaaaagccacactatccatctttgttgagcggcaaagtttgttaaaaactataagaagatggcaagtcaagaatttctttcgattatcagcagttcataaaaggagagagactttagtttttccaataacaaaaagccaaggttatccctcaagggcaatagtatgtgtatactattacaaccaatctggttcacttatacacaaactaaaagagtatatatggaaaaagaaagatgagctaaacaatacgacgggtcaatgtactggagcatttctaagtcttgtcaatagagttcaaaacgaattttgtttctgactttgttcagagctaatttacctaggaagttcaacataagcatgtaatggatatatgtgaaacgtatcaagtgtttagatgaatgatagagctttcacaagccaaggttaatatataacaacaactcccagaatggtacatttagccaacaaagacgaagctaatatctgtacttacaggaattccaagagcttctggattgacaggaacattaaaaggatcagcagcctccatcttcataatcttcttgatcacctagagcaatttgacaccaacacataaaaggtgcattaggcgtaatatacaagttgaactgctcataccatgaaagaatttagcaacaatcaagggagatattaatctgagcatacaataagagaatcttccagttcttgcttattgtatcgtaaattttgatcagtcttcttctcctctttctgcaaagaaatcgttgcaatttccgcctctttcttactagcttgagaattctcctcagacgttttcgtatccttctgacctactaccacatcctgaaccttgacagtatcagtagcactcttctcagtaaccgagctagacccatcaaccgccttcgaagactttatccttatacctttagttttcctgtaaacattcagaaacaccggcttcctctcaggcaaacgaggaacaaattcctcctttttctcaacaggcacaacaggtttttctaacaccgcttgagaactactcttatcgatatcatcacgcaatgtctcatcgggttcaggtgctttcgaagtcttcaatttaaccttaacacgcgcaacagacttggccgctatattatcagctggatctacacttccagcaatatttgaaggagcatcaacctccattttagattcaagttcactattctcacactcaacaggagcttcagaactatgctcagaggtttgattctccgcgttttcgggttgactcattcaagttcccttgttcattgatagtcttagacttcttccctttcttatgtcctcttttacgtttcatactcttctacgatactataaacctcgtacgtatagatcacacacagagaagctataagagactcctgcaacaaccaaagggctacagaatcttaaatctgaatcaatcaaaattgtttcaagaaatcaaattgcagatcacgaaattcaaaatctatatatagtccttatcaagaagagtcaaacaagcttgaattcagaaacaagagcagagagaattttaccagaaaaagaaaccctaaatctacgtcgtcgtcgtcgtaaaaccagagaaaatcgaagagattggtggagaggaagaagagaagagagggagattcaaaaaattagaaaaagtttggagggaaagtggattttaccaattgaatttttaagtagaccggcgcttctactggctcacaaattcttcgaacgtcgattattagtttttagacccgagatggagccgtcgagtttttttaagacttttagtagatctgcgaattgagtaactactgcacgccgtcgagagatattttgggcttacaatgggccacttgagagtatgttctttttttgctccttaagaaattctatttcaaaggagaacggaaggtagagagaatacattttaatgcttctgattatgtgacaaaaatttgattttgatgaataatttaccttat

SEQ ID NO: 35195 - DNA, 1091 bp, Arabidopsis thaliana landsberg
  unsure (1)..(1091): unsure at all n locations
tttttacgccccctcctccttctcatggaatcaccaccctaaaacggggaattctccacaagaaatccccattctcttcttcttcatcatcttcttagactatgtatctgctcaatttcctcctactcctaatctatacgcaacaagcgaccttttcatgccaagcttagctattcatcaccggagttttctccatcggcttcactctcacctatgttctcctcgtctacgccaaatgcttccacaatgacctgcgatcagagaccgactgtgatggagaaagaatacgacatgatcgcctctggaaggacttttcatcggtcttcaagattctctggtttagacaaaacagcaatcgagtctcttcctctgtttagattctctgctttgaaaggatcaaaacaaggtcttgattgttctgtctgtttgtctaaattcgaaagtgttgagattcttagattgttgcctaagtgtagacacgctttccacatcggatgtatcgatcagtgnnnnnnnnnnnnnnnnncgtgtcctttgtgtagaaacagagtcaatattgaagacgacctctctgtgttgggtaatagcagcactagtcttaggatcttgaaccaatctgagacaagagaagaagactcgaggttggagatttacattgaacgcgaagaaggaactaatgacgggtcatcaagattcagcagtttccgaaagattctaaagaaatcgttgttgcttgagcgagaaggaaatgagaacatcgatgagaagaaacttatgcacaagttcaatcacaggatcgttgtttcggatgctgtgtttaagaaccgctggagtaatatcacttcatctgatttgacgtttttgacatcagaaatgctgaattcggtgtcaagcgacagattttcgtcggtggatcgagtgcatagaggtaacttgcgggacaaggaagatatgggaatgaaaagaatgttgattaagcacaaagactcatccagaagaacggtttctgagatcacgactgtttcaagagaaaaggcggtttggaggaagctacagaggttcaaccgcgttcacttcgcagattatgccgt

SEQ ID NO: 35196 - DNA, 1083 bp, Arabidopsis thaliana landsberg
gggatgtttttataattaaaagatttgaaatttgaaattatatttattttgttaatattgttagttttggttagcttttaaaattgtgtatttgtatttttattgttaaattttatgatttcacccggtatatatcatcccatattaatattagatttatttttttgggctttatttgggttttcgatttaaactgggcccattctgcttcaatgaaaccctaatgggttttgtttgggctttggatttaaaccgggcccattctgcttcaatgaaggtcctttgtccaacaaaactaacatccgacacaactagtattgccaagaggatcgtgccacatggcagttattgaatcaaaggccgccaaaactgtaacgtagacattacttatctccggtaacggacaaccactcgtttcccgaaacagcaactcacagactcacaccactccagtctccggcttaactaccaccagagacgattctctcttccgtcggttctatgacttcgattctcaacactgtctccaccatccactcttccagagttacctccgtcgatcgagtcggagtcctctctcttcggaattcggattccgttgagttcactcgccggcgttctggtttctcgacgttgatctacgaatcacccggtagttagcattctgttggatagattgatgaatgttttcttcgattttttttttactgatcttgttgtggatctctcgtagggcggagatttgttgtgcgtgcggcggagactgatactgataaaggtatgattttttagttgtttttattttctctctcttcaaaattctcttttcaaacactgtggcgtttgaatttccgacggcagttaaatctcagacacctgacaaggcaccagccggtggttcaagcattaaccagcttctcggtatcaaaggagcatctcaagaaactgtaattttgttcatctcctcagaatcttttaaattatcatatttgtcgataatgatgtgttagtttaggaattttccaactaaaggtaatctcttttgaggacaagtcttgtttttagcttagaagtgatgtaaaa

SEQ ID NO: 35197 - DNA, 574 bp, Arabidopsis thaliana landsberg
aagaacatgcgcgttgactacgtcttcgttcgctggttgcgtaagtccttttacgttcgtatatggatgcatctagacgatgcaactaaattttagtatagaaaaatacgttttcgaaaattgatcgatattggtgtttgggttttgaatatggaatatgtaaagtgtaaacacttattgatcgggaaaatgcatgaaatacataaattcaaatacagtatatatgtctattacgtatcaaaactaagttgtcatgcggataccaaccagctagccgacaagtgatgaaagaagctagagcaatcaaacaaccaatagggaaatgtagcaattaataaccagctttgttattgcttgttatcacagaaaggtcaattactgtcgcttatttattttttgcattaacataaataagttgtactgttacttacaaaaatgattttgacagtgactaggaaaagagtttgcgttacttcaaagtttaaacactatttacaccgattattgtaaattgtaattgatctcataattcgacggttgtaatgttgctgacggcatgcactgttttgtcttt

SEQ ID NO: 35198 - DNA, 1131 bp, Arabidopsis thaliana landsberg
agtatagaaattctatgcgtatttgatttgcaattggtttctggcctcgatgatgataaaatcttgagcttttgagtgcggatttaggtatccaatttaccacattccctctcggaagaccgataaagatttatcgacatgtttcttgagttatcatactttatcttcggctttccaaggtatttgtatatactgttgttatagcatacaacttgcaaggatttttcttgttataaaatttctcagctttagacatatcttggtgcaaactttgaaacaactagctttttgatgttcgacttcataggtaacttgatagagggagacgatgagattaacgaaaccatgaaagaagaaacattgtgttttgatgaaggaccggtgaccaagagaatgccattgcctccgtttggtgtaacaacttacaaaatgcaaggagatctttgggggaagacggggtttgaccaggaccggttgctttatcttcaaagcgctgcggattcatggctgaaacagctcaatgttgatcaccatgactataacttcttccttaactcaagcttctaaagatcaatcgggtcgttcgtatgtttatccttctccaaaccttaaacaaaaaaaaaggacctcataacccttttctttgttgttttcaagctccttttgttcctctgtgtatcccgttctttctgtttttgtctggctcgttgtgttgttttaggtagcaaccgccatcgcggagtattttttcctgttgcaagccagtcatggaagtttctaagaagaaaacagagcttttttttctttttttttaacggtgttgacaaaacaagaaagttgtgttcttttcttgcgtgagagatcatctaaatggaccttgaacagaggactctgtttggtctagctcagcttaaaaatataaaaaaatctgtctttcttgtatgtcggtatgagtggaagaagaaaactcttttttatagatttgatatgtcctttcgtttgttttcaagattttttagtgttgaatatgatgaccatgttgtcacacaatatttacttagtgacaggtggtgcatacttttttttctatgttctttataatttaatttaaattttttctatgttcttttc

SEQ ID NO: 35199 - DNA, 3598 bp, Arabidopsis thaliana landsberg
  unsure (1)..(3598): unsure at all n locations
gtacttctttgcggcgacccacttctccttgatcccagccagtagcttcgaatacgcagcagccagctcaaccttagcatcgtgaaccgccctcttcgccccttgtgcaatcgaagtcaggtccaccacctttttggagagctcttccctcttctgctccaagcaatggattaggctcctcgacgtctgcttgtcagcttgtaacccccagatctccatctccatgaacccgatcttctcagcaaaacctttctcgaggtcttttgaagtggacagctccattttcagcctctcgatctccgcctgaaataacaatcaggttagaatcatcaaatcaacgacgaattatttataaacaagtcaaaaccgaggtatacctggaacgagacttcgcgatcttgaccagccttcacactcgacgtcagctcccggatgagggcctttccttcttcaagctcattcaccgaggggacctagctcagacgctgctcatagagagcatccagcttgtttgtggcagttatcgcctaccgaaagcaaaacagaaagtcagaactagcataaagataaaaattagaaggagacagttatcgataattacctggccatcatgtcagcataggccgccgcctcggccatgttcttcactccaggaacctggtagttcctccccttgatgtggcgaagcaggttcgccaacccagcctcgtcctcaacgatcgggtgatcacggtcatgagtgtaagaccagtggaaaggcctgcttcccgcagatcctccgccggagttggacgtctgcctcacttcttgagaccggtttgaagacttgcccccacctctggagcctcgtcctccgccatgggacctgcccgaggatcgcctatccgcagacgcagctgcctccggagtagcagccgtaggttccatcctctcttctctaggagaggcgaccctctggtcgctcacgaccaactcagccgctggattcacctccggctgggtccaagctctcttcggagaatacggtgcaccgtcagaacgaacaactgcagatgactcatatacctgagcgacctgaatgttatctgactgacctgctgcagtagaggtcccggtatagatctcagtaagcgatggatgagatggagaggcagatgcgctggagacagctagagtgtttcgagcagcgctcaccgcggccgacagatcaccagcacgagcaggagccccggcgttggctcgttgaacacgaagacttggtcgcctcattcttcttctaatgagcgggagttctgaagtggagctggagtcaggagaaactgaacaaacaaagcaccacatttgttagttagcagctcgaatcttacagctgtcacaatgactcgtacattaaaaaaaaatgataatggaactcgtacctataggcaggtctgcctcggaccgagggacctcttcgatcggatctggcagtgctgctggaaggacgattgcgggaactgctggagctacggggagagcagctacaatacgatctctactaaaagtggcctagtcagtctgaccacgtcggagaagggttaacaactcgagttccgtctcggagagagtaactttcttggtctttgctgcaaaccatcaaaagaaaaataacattagtatcaatactaacgttcagcaaaagcagtaannnnnnnnnnnnnnnnnnnnnnnnnnnnnnnnnctcgtcatcctcgctggatcaaaactgccgattgaatgatgatctactctgaagaagaagtacttggatcgccaattggtgtcccgacaggccttcaaactgcctaggactagagatccgagacgagcgctgatgtagtacgtcccatggtcgctcctagcgttggtcttgacttggcaaagctgaagcaggtcatggtagccgaattatctgtttattttccgggcccgagtaaataacactagtacatggcggacgaagtttgggcacatcttaggaaaggcgaggtcgaggcaatagagcatctcgaggatgcacgccggaatcgggaaaaataggccacatttctcaaagaaattggcgtaagcgcagcaccacccggccgacacgttcttaggatgcagcgacggccttgggagtatcatagtcacccccactggaacctggcatctcctctggaggtcgaccaggtcgttgtttgtcatcagcgtgcctcccttttgcttgggagctttcttcttcttcggcttgtcggctctggtcgacggcagacggatttgacccattccgcttagggttataacgcgcctttgtacttgcggcggtgacgccgccgaccccgtctttgacgaactctcgtcgtcgccgtaactgtggttgctcttgttctgggaatcctctaggtctctcatctcttgatttcgatggagaaagacgagagagatgaaggaaaaagcaaagagggcagatcgaaaaagaagggagcagaagagaaagaaaacgatggagatagcagaagaaaggtgaaacttttctatctctaaaaatgaaaactaaacgcagtaaatagataagatgaagagaagttaccttgagagtcgtgtgagttgacgtgaaatcaagtggagatgtgggaagttatttaaaggagccataatcaccacgattttcgagattgcagagatctcttccccgcgcctgatctgggccgtcagatgcggtgcgcagaagagacgctccatctcagtcgtccacgtcaacagcgatttgtcttgcgtatgtactcaaaatatttcggttcaggaacctgaaattaaattgtttttgttgagtttatcctcaaaaccgactgattttatcatatctatcatctcatctggaatattttcgcaatcttacttgacctatatgttcgctcatcgagttcgcctactcactcaatgggctggggggcaaatgttggacctggattcccctccagaaatctacctgcaaaaataccaatcaagcccacaaagcccaccaagcccaccaagtagaggacctacgcagctgatgagcccacatacgcgaatgggtacttgggcttgataagcccggtcacctgatgaagggagataagcgaataacaacttaagaactgatgaggagatattcgcggaactgacctactgaatatccaggaggatctccgaatatcccggacggagctaccacgtgcgtagacctatgtaagggagcaaggacgactaggaagacacattcaattcagcttacattcacacacatacttttacacttgtaatctcatttcacattgtaaaagctttgtcataatcaatacaaaaattccattcgttcttagcaatataactctcaaggtttcagtgaagttatagacctcctttctcataatctcaattacaaatctctagtgtggatttcagaacccatatttgacaccgtctgtggggacggaaatagatcattccaacaccgaaactaacacatcaattgtgaccaacgatcatggatccaattcatcaaattcaacgggatctggcttacgagttcagatctgaacgatgcgctacggac

SEQ ID NO: 35200 - DNA, 11611 bp, Arabidopsis thaliana landsberg
atagatataaagtgtctataagctagataaagcaataggattataaaaaaaaattacaaaaatttatgcagatatgaaacaaattaaacaataatcaaatttttattcataagcgttttagatataacttgcatgaaagaaaaatagaacagtagaattcaacacaaataacaaataatccaaacaaagtgataaagggaaaacagaaacaaaaaacagaaaacttgcataacaccaacaaccttccaccacacccaatcaacactttagatcactacttatctctaccttgaccttcacagctcccttcttgatggccccttcctttttcactatgtttgctccaacaccaccgtttctgtcaactgttgcgtgccgaacagcttgagaatcaataacagcaatgctggtcttcaaatcatttggaatcacaccttctttagacacatattctttcaccttagttgtagacatctgttcaccgaagtcatcattagactgcttcaagtcaaccggttcgatgcacaacttctttaaagcagaagcttgatcagatgcggtaggattatcagcatacacatgtttagatgatggagtaacaaagtcgttactctcttgagtacactctatcattagtggaatctattagaaacacaaatacagattagtttaagagattcaaagtctaaaaacaactagaaaaattaagttttgttatattacctgatcactagacacaatagaggctggattgaccatatcagttggatcctccaacaattcttcctcatgtagtccatccttaagaaggacttttgaaaccttttatatttccttcccatcccaagtgatttctttctcagtagacagcaagaaaaggaaagtcttaccatacagattctttagtgtgtcagggagattctttgggtcatcaatctagattaaataagaatcactaaacgaaaataataactaacaaataagacatagaaatagaagacaaccattactaaaactaacctcatcaacagagccattcaagactgatggagcagtttctccgataatttcagtacagatttgatcaaataacaaaaattttgccttgtcgttgttgtccatcactttagcataaagcatgtacctagcaatcatattagtgatgacatttttgcaagtgtcacaccaaaacatgtgttttttttttcctttgttgttcacaccatgtactccagaatggaaatgtgtgactttcttattgcaagaacgactgctaatgtaataccaagcccaatcaatatcagttacgtatgtagtacacatcaaccttgccttcccaacctaaatatataccaacatatagtaaatactgggaactaattctcaggggctcctcttggctgaagagtaatctcatatactcttcttataaaaagaaatttgtttttgattttttttattccgtaaaagaagtaaattactcagaaaaccctaagaatattgcttaattacgacccaaccagggcaaatggatcctaaaataacccaagtccactgttttcgggtcaaatccaaataaaaccctaattcccctaattctctgcggtaaaatcgattcacatctcttttcctttgtttcttctttatttcttcactgtaaaatccagtaaaattattctcaattctcgtcaacgacaacaatataactgttcgtcgatcttggtatatctacaggaaactaagaaattggggtaagtgatttaactgttcgtcgattcgattcgagttgtttcagattgggttttgtgatcgaaattgattgaagagtagtgctaatccaaatgattttgtttgtaggtttggagaaatggctcgaacaaagaacgcatgtgtgccgttggcggcggcgtccgcggcggaggtggtggtttcacagacaatcaatgacgaagtagtagtagcgtcggctgctgaagtggattctgaagcaacaaattcaatctctaacgacgatagagcggtatgaactttaaactttacacaattagaaaagtataactatgtatgaatttggtatatctttgttgatattataacttagaaattttaaaaagtatatatatgtataaattagtatatctatgcataaattgagtatatctattttgaatctaacttagaaattttgaaactaaaaactaggtatatctatgttcgaatataacttacatattttagagactaaacaatatatctatgtataaattaggtatatctatgctgatttctacctttaaattatatgaaactaaaaagtatatctatatttaaactaggtatatctatgttcgaatataacttagatattttagagactaaaaggtatatctatttttaaattaggtatatctatgctgatttttaccattaaattatacgaaaataaaatgtatatctatattgaaactaggtatatctaaacttgaatttaacttataaattttcaaaactaaaatgtatatctatgtataaactaggtatatctatattcgaatttaacttataaattttcaaaactaaaaggtatatctatgtataatctaggtatatctatcttgatttctaatttatctatgttgctttctaaggtatatctatgttgattgcaggattctgatgaggaaaccaaagctcttcaaccgttgttcaatgaagatgtagcacaccggagctttgtggctaataaagctctgtctactgtggtaaaagctccaagaaaagccgcagtggaaaagaaaggcaagggaaaggctgctgcagctctgactagtccaagtgatgaaggtttgactagtccaagtgatgaaggtttgactgaggttgtaaacgaaatgaagaatttgatggagaatggatttaagtccatgaacaagaggatgaaagatttcagtaagaagtatgaagagcaagataaaagactgaaactgatggaagctgcaatcaaatcaattcaatcaggcattagaactgaagacgcttgtggttcaaaggagattgatgataaagaaaacgagctggaggaagggagtgatgcagagactgagatagacaaagaggtggctcaaggtgataaggagagagaggttggagaaacagagactgagatagacaaagaggtggttcaatgtgacagtgataaggaggtggctgaaagtgagattggggtggctgaaagtgagaaggacaaagaggtgcctcaagatgatgagatggatggaggtaaggtggctgagagtgatggagagatggatggagagaaggacaaagaggtgcctgaagatgatgagatggatggagagaaggagaaagaggtggctgagccaagtgagattgggatgcctgaaagtgagaaggacatagaggtggctgatagtgagaaggagaaagaggtgcctcaagatgctaaggtggctgagccaagtaagaagcgaggaaaggcacatgaggatggagatgatcctagtgaagaggtagttaaaaagcctaaggtggtcaagaagctggcagagtcgaggacggatgctaagccggtgtatcggagtcctatacagacgaggtataggaggaaaaagacaaaaaagaatgtttaagcaatttcaactcttggtttgttttaggtataactatgttggttgttgaaaacttggtacatctgttcgaacttggtacttatgtttttttttgtatatctttttgaaaacttggtacaactgttgaacatgtttattaggttttttgttttattttggtatatctacatatgttttgtaacactaagtacaattatatgtttttgtaattgataagaaaagaattttaaccgaaataactagattcaacacaacacttagtctttataattagattcatatccattcatcacatcaaattcaacacttagtcttcataattaaacattacaacacttacgcttgaatttctacgacaaacacaacatgccaacaattgccatggttattaaacatccagaactaaaaatgattaccatattaaagtccttcccctttttgttcttttccatcggatctctttccatcctctcttggttcctttccatcttcatcactcttacttcttcttcaagaacaccgagttgaaattctaattgttcaatctcatgtgtaaaagcctcatctacccacttaaacacatgattgtcgttcataagctacattttgaaattgtaaaaattgttaaatcacatgtatatctatgtataaactaggtatatctattaggtttatctattaggtatatctattaggtatatctattaggtatatctaggtattttagtgactagtcaaattaggtttatctatacctttttttctgcagctaaaccacaccggtaataacgacggtacggatttggatttgatattgaaatcctctcaacgatttcatcgccacaccaacactgctttggaattctaggaaccattggtcttggtcgggaaacggaggttccacacgagttcgatgctcctgagaggtggctcataattccctgagttttggatttagaaattctagaatatttaatagataaaccaggttgtacaatatgaatcttcaatctccgaaatcgaaaattgtcaattgcatatgagaaatctataagtgaaacgtgaattgaatgaaaaatgtacccagaaaaacgaaatgcttaccaaataattccactcttctctctttttctctcttcttctctcttctgagtcttctctcttcttgtcttttcttcttctttttcgatttgattttctgattttaatttataatagggttttaaaaaaattctgcgaattggggggaaacgaaaattttgggtgaaaattttttgatagtgtgaaaagtaatgtgaacacgtttcttatagtgtgaaaaggaattaaccgtgggacccgcgtacgagttgttcggaacaaaaaaggtggggcccgcaaactctttgcacacagatattccaagttaacaggttgtacctgtgtatacacagtttgacttttgggggttttataattttattagatatacttaattttaaactaaacaaatttagttataccaaagagttttgatgttttataaacattccacatattttcataggaaaatatgtctggaaaattcaattttgtgtgttttgcaatgttatgatgataataattataaagtcatcttcaaagtgtaaggtgtttcttgtataacaaatgaatttggtaacgactaattttttgaagtttcattaaattatgattttatcaatcagcagttttaatactcaacataagtggtataatttgtataagaaataacattacatcaaattttgttgcaaattaagcacatttgttacatttgtcatagttgtacctttacaaaaccaagtttaatcaagttttacaaaaccagagagtacaaaaaacacgaatttagagacatacatagttctaccatttaaaaattaagtttaaccgagttttacaaaatctgaaagtacttaaaaacacgagtacattaattttcgcttgtgttttggctaacactttcgtggtttagaaaaaaccagctctccaagtttctgcctttcacatgcttattcttagggcgacgttctccaactgatgggtgtctagtttcttgaactcttccctttttaacatcatgaaccggaggatatgctaacaatccttggatttcacttggaataacccactctgacttatgcggcaccggataaatggttctaacatatgccataacccacatctcaacaaagtaatattttgtgatcaaatcatataaactttttacctcctcggatctatttttctgtttcaagtgagtcatcacagccgctattgcgtgtacacaaggatacttgtccaagtcaaaacaacgacaataacaacttttattcctcaagtccaccacataggtcttaccatcgcgaccaatgacactatattgaagctcgtaggtgttaagctctatcaccggtaatttttgtgcaacttcacatgtttcatgtatctcgttctccacaaaaggaacaagtctatgtgcatttgatccacttaaggcttccttcctattattgcagctccattccgcaaatttcccaataattgcatctatcataggtaatagcgcataccctctcacatccctaaacacaccattcatagactcaaccgcattactagtgttaacgttgtactttactcccggaaaatgacatcttgcccatttttccaaatcagtgttttcatcaagataggtggctaccttaaggtgccttcttctaaactctgcatattcatgttcaaattcagacactgaacaaatggatgcaattcttctgaacgttttagcaacctcttctttgttgtatgcaactttcgttctcacattctgtgacaaatgatacacacagtttccatggtgagagctcgggtacacctcagccactgccttgatgaggctagaatttctgtcagacataaagaccaattccgaactgtctggtataacagttttgagagtttcgaaaaaccacttccaagtaacatctttttcgccatcagctacagcaaacgctaagggataatggtgatgattcgggtcttgagctgtggcaaaaatgagcacacctttatatatagtcttcaaaaatgttgcatccacaataatcccttttctcatgactttaaatccttcaatggcagcccccaaagcgacaaataggtacttgaaccttttttcttcatctaataccacactagtctttgtgccaggattcaccttctctaacatatacaaatattgataaaccatcttgaaactctcctcgggacaagcacgaatatcactaacagctagttttttccccctaatagcagtcgagtatgacacagttgtaccatgttttccctgaacaaggccaatgagacttttaggagttggggtcttgtactgacctggataatcttcatgcagtacggttgcaactaaatgtggtgtacctctctttttaatgcctgtagcagtattcgaccgtacacatgtatgcaacttcctatatgttcgaaccgagaagcgagttgaatccttagccttcgaaaatcgtatataccattcacacccttcttcagcacattttaccacataccgcttcttatccgagttgagtaatgttagtccaaaacaattcgtatttgctcctgtctctactaaatatttcacatcatcgctattttcaaattcttgacctattactagatcaagaccatcatcccatggacctttaaacttagaatgttggctgtcacgtggttcctcaacatattcacgaataccatcattctccttagtcatactcagattactatcaacaccattatccacatctctaagaggctccaaaggctctaaaggctccaatgtctccaaaggctcagcaagttgttctcctagtggctcatttgcgtaaagagttatagcaccaacattagctctatcatcattatctagaccaccgaaattctcctcttcataattcacaccaactgaactctttctttgtactctcgattgttgctcgtttacgtcaaccatttccaactcattaccgacttctacatgcaagacacttctacttttctcttcatccaacgtggttagataaacatatacatcatcatcatccctaatatataaatatgtaggaggtttaacacccgttggaatgtaactcaatttcagcttcatcgtagattcatctatctttatctttgtgcatatcttatccactaaccacgaataagtaatctcctccattgatgatgtcctaaacaatataccatacaaaccaactactcttggattccattgatatgcttctccggtttttgaataatatccatcataatcaaaatatatgattatgcccattatcctgaaaaaaacaaaaaaaaaacgttagctatacctagattttcctgttctaccaaattgtacttcgaacagctataccacgctcattttcagaaataccagttatactattgaaacagctataccacgctcattttcagaaataccagttataccataaatagtacttcaaacagctatatcacgctcattttcagaaataccagttataccataaatagtgcttcacacagctataccacgtttcttaggtatacctagattattctgttctaccaaagattttcggaccaaaaacagtaatctgcctaagattaactacgaatcaaccattacagtacattaaaatgtcttaatagacccagaatatatagttaccaacataatgtccattaatttccaacaccaatttcaaatctatcaaatctaattgaaatctacaaaattcaaacacaacaacacaatacttgatgaatgaagatgtccaaagtataagaaaagaatggtaaagctcactgtgaataacagaagcaaaacgacgacgagcttggtcgattggattcaacgtcgaaggattcgacgatagttgcagtcgtcgatttagattttgtgagggaggaaaagaaattctgggaatttctgataggttaatattttgtgaattaaatggtattggtttggagacttaaccgtaattggttggtttggttcgtccgtccggttccggtttgttgggtaagggtaaacaaggatttttaaaatttattaagagtataggagtatgttagattatatgagagtatttagactcattttaggagagtagagagtatatgagatcatcgtcctaaatactgtgtattagcataaatgagtctatattatagattaagtgcatagaaagacatttaggttatatataacacatacatcaccagaattaaggagttcaagaattgtgtttgagggatacttaagacgactatcactatttttagaaacaacaatctccatctttgggattctctcacggtacgtcaagagtatactatcaaatggtagtctgtttagaaaagacaattgttaataattcaaacgtgttacatataaagatatcctttttgagaatcatattactaaacttacgtccttaggaaagcatcaacctcaggaaattgaggattcacaaaaacttttgatgcatcaaaagagttagacaaattacgtacacctgccattagaataatgtttacctgttaatatttttgcattatacaaaactaaaataagacaacggattggtgagtttacctttgtatgatttgatcttcacaaacctgagcacacaaacaacaggtcgagcaccagcatcgttacaccgtctataaacttgttcagcaaatgcaccccacaaggtaactccaatgcgctcatcactataatagttaatttaaatgttagttttaaactttactaaaatagttactaattgaaataagataaattgttggatatagtacaaaaaattagaagagtaaactcacgcttcatctcggatatcaaaatcagttttggttgtgaatttattattagtctcaagttcttctaactcaccaataattataatatgaccgatggcatctacataaaaacaaagatccagactgtgaatcataacttaatacaaaaaatagatattagtgttatgcaacgaaaagttaccatccaacatggtgggattaagctccctactttggatcttttgaaaactggctaaagtcagatagttggaaattgactttgggggacttggaaatattgaagttccattgacaaaggacatcttgtagagatgggacgttgggcgaaaacctccaccggcatagttgagactaaaagtctcaatgaaaacccaatcaccaacagttagcatgttagcatacttgctaaccaaatctttcctcactaaacaatgaatctttttgccctgcatatatagaaaaagaaatttaatctatttagctaattcgtgtactatatgtaaactgattaaaaaaaattatgactgatgcaatgatctcttacagtttcatcagaaaacacaacttcaagggtttcaccggtgttggctgtgtattgacgccaagcatgaagagtcttcacttgcactctccaggaggtcttgtaaggcctgacatcagtaaggtaatcaaatgtggcagctaaaaaaccattaagggaggtgaatgatggtgaatgattaggtcacaatacctatatacatactggtacacattaggtttacgaattagtgaggaatgataagaaaatattctacttattaactgaaatggaataaaatcttattgcgtttaaaaattatagattcatgagctaattatgttaatgacagtaattgttgagattttctgtaacctgcaagtatgagaatctctactgaaaaattggaaaatacgaatattagatcctttgatgtattaggagggaaacataatgtttgtaacggattttaaccttagttggttaaaccgcaattttttgagattatattgatgtcattgagagaattattgtttcgggatattaggattcaaagattgtttgatgcataattgtagagatagcaagaattttcaaagatcatataacataaaatattcggaaatattttaagttagataatattcttttaaatttggctcgactctggattacagtctattatgcttccgaaagttatttgattatattcctttaaattttgctcgacatttacattacaatttattatgtttacgaaagttattagataatattcctttagcatattctttaaaattatgcaatctaggatccaaacagagttaaaccggttaaaacccacccatttgaattaattgttgaattattcctcaaatcttcaacattatcttcaaaaaagtgctgcaaaaatgtatatatagactagatatacaaaaaaacaaaatttaacaaggcagacaacaaattctttttttagtactatattttgttatcaaattttggtaatataacaatgtataccatttccttttgacaatcatttttcgtttttataaatttaaggttaattttttttaagaaaaaatatatactttttttaacaatcataatatatgacctttgcattatatatatatattaagaaatgcatagtatataccaaataaataaatatatatatatatataaacactaaaacttataaaagaaaatgattgccaaaagtaaaatgtatattttgttatattacaaaaatttgataacaaaatatagtacacaaaaagaatttgttgtctgctttgttatatttatttatcttgttatatcatcaaaagaataaaccaaaattttgttctataatgtttttgtgatttatttttttatattatttgtggtatattttgttattaggtttttttaaaaattatgtaataaaatattgctcttacctgtctattccaaaaatgacaaaaattgaatatacatcttggtctaccccggtcaa

SEQ ID NO: 35201 - DNA, 1100 bp, Arabidopsis thaliana landsberg
ggctggcaggtggagataagagcactgggttctttcatgctgcggtgaaagttgctagaatagggaatttattgacttttcttgttgatgaaaatgaacaagaacacactagaaatagtgataaagggaaacttgcgacatccttttttgagaccctattctcatcttcgtatcaaacaaatcagaatatctattaggaaggatttcaatccaaggtctctttagaattatatcagaatctgactcatgatgtcacggaattggaagtgtataacgcagtgttttctattaataaagaaagtgatctggggccagatggttttactgcattattttttcaacaacactgggatttagtgaagcctcaaatcttaagtgaggtctttggtttttttcagactggtgttctacctcaggattggaatcacactcatatttgtcttattcctaagataactacaccacagagattgtctgatcttagacctatcagtttgtgttttgtgttatataagattatatataagattttgattgcaagattgaaaaaacatctcccaaaaattatttccacaactcaatctgcttttgttcctgaccgtttgatctctgataatatattggttgctcatgaaatgattcacagcccgagaaccaatgatcgcatagcttatgaacatatggctttcaaaactaatatatcgaaggcttatgatagagttgagtggccttttttaaaaggaattttgactgctttggcattcaatgatacatgaatttcttggataatgggatgtgtgccatgtgtttctttctcagttttgatagacgcacggcctctctgtctgtttaatcctgagctcggtatcaagtaggttgctccgagtgcaaagggcttatttgtcttctgtttataggtttatggtcaatggcatctgctatctgagagagcaactttttaatgcggtactcatactcggcgttttgatcttaaagcacaaagacaccgtgagcttttttcgcttatgcatcacgtagtacaagggagagacccagaggtgaaggaagggaagcccgcgccagacggctttcttgctgca

SEQ ID NO: 35202 - DNA, 6364 bp, Arabidopsis thaliana landsberg
  unsure (1)..(6364): unsure at all n locations
agcccgtaatttccacgtccaaaacggtattgttttgagtctccgtctttttcttgttaacaaagtcagagctaataagatccgattcggaagtttctttgacatcaaaacacaaacccggaaagcttcgtctgccatttttcattcttctaagccctagctcaaagctttctctctcaaatccgccatgactaaacagcacgcgaactggtctccttacgataacaatggagggtacggatcgtgtgacctttaatcaacctgctgggtttcttcgcttagtgtctttcttctttattctgatttgctatctgggcgattgtgttacgattcacttactgtgaatttaatcgttgtgtgtttttcagaacatgtgtggccatcgctggatcggattactgtgttatcgccgccgatactcggatgtctactggttacagtattcttagtcgcgattactccaaaatccataaactgtaagtaccccttctctttcttctctcactgttgattctttgggagagtgattccatgctggcaatcgaactattattgctgtagattattagggtttttttgcaatcgtaattcgtagatctgggtgaaaccagttatatatgggtggagataaaataggtttcttaattattattagacatggcttttgatagtggtcacaattatctctatataaactttgtgattacattgatcattctataatccggtttattgcttagcttattcgttttcttataacgtttattgacaatgtgtgtagttctttgagtttgttcaaccttacgtaaagagtgtttgttactgtgttgttgatcttatataccacaagtattcattcgtatggaaatagatagaattctcgtgtttttcatcttatgtaacttgtaagactcttgttaagctgttgtcttcttttaacttttccagagcggacagagctgttttgtcttcctctggcttccaggctgatgtgaaagctttgcagaaggttctcaaatccagacacttggtgagttaaactttggtcgtttgatcaattatctttcatccttcgcagtattagaaaatgatgaaagacttgtgtaagagtgttttctctgtgtttggtttccttcagatctatcaacatcagcataacaagcagatgagctgtcctgcaatggcccagcttctctccaacacgctttatttcaagcggtttttcccctactatgcctttaatgttctaggagggcttgacgaggaaggtaaaatgctcctctttttttctccgttatgatgtgactttagaagagggtactttgtgtgatctttagtcttgaatatatccaggaaaagggtgtgtctttacttacgacgctgttggctcatacgagagagttggatacggtgctcaaggttctggttccacactcatcatgcctttccttgacaatcagctcaagtctccaagtcctcttttgctacctaaacaggtttgttgatattcttcattcgtgcttttggcgtttcgcattgtaaagataaaatgaatcgttctgttgcttatttgttcgtcttctgccaccatgtaggattcaaacacgccccctttccgaagctgaagcagttgacttggttaaaactgttttcgcatctgccacagagagggatatctacactgtaagttgtcctatttgtgtcttcttttgtcaccacgccacctaaagcttgcctttgtgctcatatcatttgcatttggttcaagtcttcaaaatattaccaaaacatttacttaatctatatcccttacgttgcacaactacttcatcttcctcaagtttttttctctaactaatgctttgtggattgtttactgtaatagggagacaagcttgagattatgatacttaaggccgacggtatcaagaccgaactcatggacctgaggaaagactaagctcctttagtgcatttagccaaccttatcggtttgttatttcacttcaacatcgagcttcctgagttgtagaactcgtatgaaatgctactgggtttgatattttacagttaaaatcatgactcgtgtttgaagtttctccaaaactgtttccttatgtatgagaatcactcgaatccttgtcttaaatcaatgtttctctcactatttatggcaatgtttttacatagatcacattaagatatttaatagacaagaatagaatctggaaactcttttcttcagaagctgttctctgatacccatcccttcttctctagctcttgtcgcaatgcctccataggtaaaaaatgaagaaaagtgtgagcatattatctattagccagtggcaataacagagatatatcacttgagtatccgagttgttacctttattcgctttctattgacatcaaagtcgaagttccctttacgggatgcagatcgatattccactttcgagttcttcccaggagtgaacaagaattcaacatcgtctactaactgtcaaaaaccaaagggtcttgtccaatatattgaggtatggaggttgagagagcaacataaagcttacttaacttacccccaagattggactttcatattccacatgaacgtagtcatccttcttctccacaatccgcggtgtaaatttatccggtttcaccgacttaatctgcaacaatggtgataaaaccgctgtaactactggaagattacaagaacttcaaatggtgactggattcatatcttgagattgcagttcatgtttaaggattgtaccacattaagaagctctttcattgcaacttgcctgttcacaggtgttttccttcctccattatagttcctgcccaccaggacaacaagacagtgtttgatgatcaaacatttcaaaccagaagacccaaatctgaacacaaaaagctcttgaattaccatggtggagcataatgcactcgatcactgatattctcagaagtggagatacagttattagtggcaggacatagagccaatctctcgttcttttgtactcctagataatctggttttttcccactaaaaccactcacaaatatttcatcatcataataacacctcagccgtggggatgtagaattccggtgaagaaaacgtacctaagctggaatatggctccgatcatagctaattcactgctcctaagaatgatatctcttccaatttcacaaagatctcaaaatcagatacttggttcggtgataaacacgagcacaagcaggagagaaagagactagtaccttcgaccaattagcttcggatgtttgtcatatgaagtctctggaatcgaggcactgatacgacgggcatagaaaacaagttttctccggcatttgtggtggtacaagcaagtggtcggtgacgccatggaagccatcgtcactagctcggatttctctttactctttggagtaagagaagaagaagaagaagaagtttgttacttctaacagggcttactactatcaatctattattggcccattggagttttactcgttcgttcaggaggccaataacagaaaacccacatataactaccaaactgatatgataggatttttttttttttatgatagctgtaaaatgttgttaataggtacaccaagttaattaataacgtaatgtagaaatattttcaagaagcccgtctagctcagttggtagagcgcaaggctcttaaccttgtggtcgtgggttcgagccccacggtgggcgatttgttattattttttttcatttttgttttttccttcactagtcaagtgtcaagtcctttgagaaataaaatcatcataccagggttacaaaaaaaaaaccttcaaaatgtcagttggtaacattttaaacctctaaagaattccactaacattataaaccactaatataattttgctaacattttaaacttccaaactacttttcatgtttgtaccactacaaaaaatatgaaacaattatttatatttgttaatattaaatttttaatttaatttaaatttacattgattttttatttattatgatagtttttatgtttgcaccgctaaaaaatgatagaacaattaattatgtttgtttaatatgaattttttaatttaatttaaatttacattactttattatttattatgattttaagattaataaaaaattcatcatcttcgactattcaccgttcgaccatgaaacgaaaattttttttatatcaaattcattgtatatgttcaccatcattttgttgtaattggtattatgagattctaatttatccacacgaagcataaaaatgcttatgaatcaatttctcaattaatttttccgattatattataatcttccaaaaccaaggttaaaacaaaaatttggaattttcaagatgtaaagtatgttcaccgcaagatgcttgggttgctttgaatcaaccggggaaattaccgaaatgtaacattttctgacgctagtagtaaaaaatacatattatttacacagtttgagtttgggcttctgaaagattgattgactaaaagtcattaaattacaaatctaaagttaaaagtgtttcgtctgaaatttcttgttagctccaaaagaggaaaacgaatccaagaaggagaaaaagtctcattcctcaagctccgcatcattcctccttcatggggtctctgcatcttacaatttagcactctcatattattattccttaaaccccttgttttgattttgtttccagatttaaagaaaccctaagacctcttcgaaatctccccagaaacacttatttcatttcttccttggccttgactacgcgtctttccttttactccggaaggaagatccagaaaggttttctttcgatcgttgcttttgactatgcatagatctggtacaacaatggcgtggaacgtattcaagttctgtactgccttacgaggtcttggatcgatcatgatccttttggttcttggtgttgtcggtgttacttattacgctgtcgttttgactaattatggtcctgcactctctcaaggtggccttgattctcttgctgctctcactatcttaatcctcttccatttcctcgtaagtcaatcatcttccccaattcaaaatactaaagctttgtgctttactcaattctgtcaataaagtttggtccttttttattgctttagatgtgaagtcttgttctgttttagattgaagttttgtgaatttagacaaggatgtgtttttatcttggtgcagctggcaatgcttttgtggagctatttctcagtggtttttactgatcctggtgttgtgcctcctaattggagaccatctactgatgaagaaagaggtgaatctgatccgttaaatagtttggactttgttggtttacaatccgattcttcttcttcaaacccaagagttcggttttgtcggaagtgcaatcaactaaaaccttctcgttgtcatcattgttctgtttgtaagcttcctcagtttctcttttcttttcttaccatgtatacttaagagtcttgaaactgaattgttgtgaggttgattccaatataggtggtcggtgtgtgttgaagatggatcaccattgtgtttgggttgttaactgtgtaggagcactgaactataagtattttcttcttttcttggtaagtttgttttctaccactactaatgttatagaatcttcttcagcttgtaatctggtcctcttgtcataacttgtgtgtgtttttcttatgttcatatgcagttctacacatttttagagacgacccttgtgactttggttcttatgccgcacttcattgcattctttagtgatgaagaaatacctggaaccccaggcactcttgctactacttttcttgcatttggtatgttcctacttccttatactatatatggtatgtagtgtgtaacttggtttcatttattaatcattctcaccttgtttcatcgtacaacagttttgaacttggcatttgcgttgagcgtgatgggtttcttaattatgcatatttccttggtagctggcaataccacaactatagaggtaattccttttcctttttcttttgacttgaacctataaagtttcccgtggccaaagctagaagctcctttttcataaacgagaatttggatctttagagtttttgggggntnggnccaaattnncnnntcatngggcttaagggggnctttgnannacttttgctttttaaatgagnaatttttttnnggatctttnnncaactccttacannctttgaggtgcatncccaatttnggcctgctttgagctttcctttg

SEQ ID NO: 35203 - DNA, 1025 bp, Arabidopsis thaliana landsberg
accatcattatgtctgtaatgcttgacacgaacctatatgatgtacacatacttcactttttaattgatagttttcaggatcactttactttccttttgtaaataattgacattaaagtttaagaggccacagggcaaaatgatcatctcatatagcctataggccttcaactaggctcaagtaagtttatctaggagtgattttgggtgttgcaagcattaataatgaaaatttcggattttggagcggatttggttcgggttattttagattcggataattaggatgagggagtttattatccgttcggattatatgattattcgaattcggtttcggttcggatggtgttagattcggaacggtttcggatcagcttttgatttaaaaaaaaaacaaattaaaaaattgtacaattttaataaaaatcgtttaattttactaaaatttggtttaattttgcaaaacaaagtaaaattataacaaatagaactaaaagaaatttggatattaaggttatagcgaatatttttgttatttagtattttttgggtataaattataactaaatattactaatattttaagatatataattttatttcggattacagatatccgtttgcttttcggttcggatcggattcagttcgggtaattcaggtaggagaattcattatctgttcggattttgtgactattcggttcggtttcggagccggattttttggatcggtttttggatttcggattttatgtccaactatatatacatatatatatatattttttttttataagctacaaagatgatgatgatgatccaaaagagagataaagatgagatcaatctgttgggattttcaagtttttctaattttgaaaaataccatctttgcaaaaatttcgatagttttcgaataatcatagaaacatatagaaataaacaaaacttcgtacggtcgtatctgtattttttgtccgcacttgtttcgtcactaatttcataatttccgagaaaaaa

SEQ ID NO: 35204 - DNA, 4051 bp, Arabidopsis thaliana landsberg
tgtataggtagtataattggcccagtgatcaagttctagatttggtagtcatcatcattggttatgttcatttacgtattgcaaatagttccacttgcactcaaaggtagggcatttcccatttttataggaacttctgtaccagaaacaatggtatctccaattatagcccctctgggatgtataatatatttcttctcaccatccccagggggtccgagacatggggaaacaacctaatcccggatccatactacggtcgctctccccgcaactggtggatactggtttctcgggctctggaaagtgacgcccgggaaacgaggtaaaagcttggaagaagacagtgaagatccgtttgacggaaacactagagtgaagaaagtgaagatcagaagcaagcaaaaatggctcgccataacttttaactttgatagctttttctctccagttacaagattgcaactgcctcaagctgatacagtcactgataaaaccaaaccgaaccaaaatcaatccaaagttgaaccaaattaatgaattatcatactaaaccaaacggtttaagtcttttttcctatctcgattaaatcctataacaaaccaaacaaatcgaataaacttaaatttgtaagtctagcaaacatctgtttattttccagtgacactctttggtaaccaaagattctctcatgaatcttttatttttgtgttgtgtcttttttatacaggctcaagcggctcgagctgtgtttttttaagggatgacgggggtgatggggtcaggttgaagagctttcttcacaagatcagtctgctccttaacatgaagctggtaaaatcctgtggctgtagcagctgagggaagacgaccaacgtatttgatgtcgttgaagtttcctctttgcagtgctttcatcgcggcgcaaagccttagggctatgtattggtatcctcccatgttcatcggctcttcttgacaccacacgatctctgcatctgttaaacacaagaacaaaagtttcaaagaattccataatcaaccaaaactattgaacacaaacttgagttttcgacgcctacttggatatcgctttagttctctttggatgagatcatatggaaatgggcaaagctgctctactctgcaaatggctacatcctttgtttcagacttctttcgctcttcgtcaagctcatagtagacctgattcattgacaagtattaaatttcagaatgtgagaactttgttagtaaatgacggaaaaagtggatctttttttataccttcccagagcagaggactagacgtctgataccttcttcaagatcagaatggccactttgatctttgatcaaccgtttaaatcgagttccttgcttgtcaaaaccaggatgtcctttaacatcatcgaattccgagagattagatacacactgtttgtgacgaagcaagtttttgggagacatcactataagaggcttgcggaagtccctgtgtatctgcaaatggatgatatcaagcgtgtgagtctgaagaataaaaataaataaagtaacaaccttttacaaacttggggtcgatagatattttacctgccgacggagaacgtggaaatagttggcaggtgtagtaacattgacaacttgccaattacattcttgaatctgctttcgaagagttggatccatctcagggataacgtaaggattgtcatcactcatctgcagttaaaatttccaaatgagaggaaacaaataccaaaagtggagaaaatcttaacagtaagtatcggtcatataatatacctgaaggaaacgttccaatcttccactggaatgttcaggaccctgaccatcatatccgtgaggaagtagaactactagaccagtttgacggagccatttggcttccccactgcttatgaactgatcaaacataacttgtgcgccattagcaaagtctccaaactgagcttcccataacaccagagaattgggattttccatcgaataacccagttcgaatcctagaacaccaaattctgaaagagagctgcatacacaaacaacgtaaagatcatgtaaaaacaattgaagagtggttatcatctctagagattaaaaaatatatatacctgttgctgacagtgaacatttcagggtcttggtttttgattaggtgatcgagaggacagtattcctccccagtttcttgatcatgaagcactgaatgtctatgactgaaagttcctctttcaacatcttgaccacttagccgaacatggttcccttccacaaccagtgtagcaaaagcaagtgcttctccaagtccccagtcaataccttctcccgattcaatcatttgagcacgttgttcataaactcttttcacccctctgtgtggcttaaagttctcagggaaggttgagattgcctttcccacattcttcaaaatctctggcttcactctgcaaaagaacaaaggaatagttttccagaaaaatattacattgaaaaagaaaagaaaaaaggccaaaagtcattgacaaactaaatgaaataaaaatgttttttacccagtgtttcggatcctagaaatctgctccggtgacttgaatccagtccagtgacttgccagccagtcacgtttttgtggaatataatctttacttgcctcatattcttcattgaggatagagcttactttcttttgaatcttgtcaatatcttcttgggttacctgtccagattgcaagagcttctcctggtagatttgaagtgacgagggatgactgcgtatcacctatcaccaacaagtgacatccgttttttaaacaaaaaaaattacaataaaagaatgaaatggaaacttgaattggttattagattatttcacagatatggatgatataatagccagaccttgtacatctttggttgtgtgaatgacggttcgtctatctcgttatgcccaaagcgacggtagcatactaaatcaacaacaacatcagaatggaatgtctggcgccactcagcagcaagttcacaagcatgcactactgcttcaatgtcatctgcattgacatggaaaattggggcactcaaagcctttgcaacatcagtgcaatactgtgaagaccttccttccctgggatcggttgtgaaagccacttgattattcaccacaatgtgcactgttccaccggtacagtagttaggaagtgcactaagatgcagagtttcatacaccactccttgtccggcaaagctaccatccccatggatcaaaatacccatgttctttgttctgttctcgtctttcgtgtaatactgtttcgctctggttttacctatcacaacaggatctactgcttccaagtggctgggatttgctaccaaagacaagtggagatgtttgcctcctctagttgggcgatcataagatgtacccaagtggtattttacatcacctgttccggtgtaaagcccaacttcatctactggcctagtaccaccactaaactcgctgaatatttggcgtagaggttttctaacaacattacccaaaacattaagtcgacccctatggggcataccgataactatgttctctaccccgagatctgcagacctatcgaacatctccttcatgccaggaatcaaagactcagcaccttcgagtccaaaccttttagccgtggtccacttagtagccaagaaattctcaaactgtgtgctccaggtaagcctatcataaataaccatccgacgctcactattgtactgtcgaggagttggggtctcgattttgtctctcaaccagttacatttgtccctatcagcaatgtgcatgtactcataccctatagtcccacagtaagcttgctcaagcctcgagagtatagacctcagtgtttgaaccggacggttctcagagagaaaaccggacatcgtccatacacccagaaagaacccccgcccaagatcagcttctgtaaacccataaagacatggcgtgagatcctctggaatctctctcttctctag

SEQ ID NO: 35205 - DNA, 1104 bp, Arabidopsis thaliana landsberg
  unsure (1)..(1104): unsure at all n locations
gtgtaaaccaaatctacagactctcgaaagtgaatgtgtgttcttgctatatgtgcattataagttattttcttgaaaaaacacatggaagtgtaaaccattttgcagtatccttgtccttaaaccgtactacatagtctaccatggaaacttagaatctgtagatttgatcaattaatggttttattgctgacctttttttgttctctgatttgaaatgattctctttgagccatattcttgattgatcaagttcttttttccccttttatgtcgtccatcattctttttccctataattcacatttgatttctcttttatgatctctcttgattccctccatggttctttggttttctgaaattgataagtggagggatgataacgagactctggacatggaagaaagtttccaaaataaagtagcttacactctgactctgaggataataatctttaagtgtttatttggaaccttcattttcatttctttattacttttgtttcttgtctgtgctcgtttcaaatcgagtccattgcattacaaaactctctttcgggcctttgtgctctgccttaattttcttttgttatttactcttttctttgtcagaacaacaacaatatctaggcaaataaaagaggtttttaaattctataatcgttatcatagtttcattatttctatatgtttagacagaaatgttgtcttgattgaatcaaggttcctttcttagaaaaaaaagaaatgcatgtcggctttcatcttacttttaattggaataagtaaactaaaatctttattcatcacatgcatttgcatgtatatatatatgtatacgttatccattgcttttgctaggttcatgttcttttttttgtgcaataatggcttaatttgttaatccagcttgcagattgcaatttgactgcaaagtttccccacttccataactacatatgtgctatcaaatcatttcattatgacgagcgaactcttgacacctatctttgtcagtactctgctttatttggtcgtttttattttgcatganaaaggtcanaaaaagccttactcatttggatattgatagtattacaca

SEQ ID NO: 35206 - DNA, 2806 bp, Arabidopsis thaliana landsberg
tccaatctttgcgttggtttcttacacaaaataaggctgcaaagccttgcctgtctttacaaaaaaactttacgccaaaaaatgtgtcggccgtctcctgcacaactactgagaaagacaaaatcataagaccaccgcagataagaagagattttagtttcgagaaagtagctcttataagatattttacctcctctagatggtccaatgactctttctcagttctcacgcattctgtttttacactttgatcacaaagttacaatttctagcaggcttcagaagagatattcccagtcaatagcgtccctcgaaacccttcttcgatatcttgagcccccgttttcttttcacataactcatctgttaagacataagatgaatagttttacatggacatctcgctaaccagacagcagaataatggtaaatttggttaccagcaatatcgcggtgttcatgcatctctgtatctctcacccaaagcctgtcgccggggaatatgttcatgtctgcaagggttgcagattcctgatcaatcacttttgagcctttgtggagttcctggttttccttcatcacctgcatattttattgaaaccccgttttgttgtgtttcttcaagttatctacagaaacgaaaaaaacactatgtctaaaagaatcttaccccaagtaattcccatatcatcatctttaattggtatacagtcgttgtcgcagacactttcaggcttgtcaggtttccataatttgttctccgagatcgctttgaagtacgccgatccacctcaaagctagagtcagatgcctctaacattgcttttggagcttcctttccacgcacaaaacagacaaatacatctccctcagagtaactaagtttctgcatcaactcacagctttctctctctcctatgcattcctcgcaaatctagcgaaaataaaagatcctgttaaatgcaactctagtcatgaagtcatacaataataaatgtgaatgcaaatgatcacacttgcttttaagaaaaagaaaaacagtataccgtaacgcatctgaacttcatatatggaccaatgtgaaatactaagccaacattgccattcaatattacatcacactctcaaaatgttgaccaaaaaaaaaggctcaagataataatgcaaatacctctggggatgccctgagaataagctgttgagcatcaacgtccatattatcatccggagaagaatccttctcaaggtcaatgacgtctggggatgaactttggtctgtattgccaacctcaataagagcagatattccattctccatgagccctccccactcgtcacagaaatatttccaatcaagctcagggatgattgttagcttgtctgtctagaaaaaggtgcaagagtactagagattagatcaaaatcagaattccccaagtctgcgtttgacgctataaacagccaacacgagagaggatgtaaactgaatccgacaatcacgataccaatttgttaaattcagaacatgattccctttatttctcactgaaagaaaatcacaccacagaaccacggaaccatactatcagacaccttacttccaagctctaaaaccagtctcaaaacacacagacacctccccacacttgattaatctcttatttataatatccttacttctacagaaataagttatttatgttcatatgaaaaatatttgttgaagcctctctatgttgtgaatgaacacttatcaattttccattcagatattggctttactgtatcaaacagtttaaaaatagattaggaatcatctcacggtatatatgatgcacttacagatggatttttctgaaaatacgagccacgtctgcagacaagttcagggagcctttcaaggagtcgtgtatgctgaaacaaacaaccataggaacaaaccattagttttatgctcatagtggggggatgaaatgaggcctgctgaaataagacaggtcataccacccgcgtttactaacatatattgaaatatttctatgagaggaaatagagaaagtggtcagggacactgatttagaattaatcacttctgtccacatagagctttacccccacaatatctaactgccagtaaattggaaaccgactcaccgccgagcaacagatcttacctttttgcatttgagagtattaatgactccatcaagacgttcaggctctggtgctgaagaactattttttccagtcatgttaatatagattctccattgcactagccacggagaaggcaacaagaaatatcggctttgtggcgttaatggtataccctttcccgtggctaacttctcgtgattttggcgctgcttgaccttcaatgttctgttgcataaaatagaaggtaagaaaatctttaagagtataacgaccaacaaaaaaaataactaatcatggctaaccttagtgaatcctcgaagcatgcaacctcagaaagtacctctgtgcaatgacaacattggctggagtccacaggaaaacaagtacaatccaaagtatcttctgacatcacttttagagcatcttcaaaaaggaatgaccagaaattctctggaactacaactcttttggcccctggtgcttgctctggcatcagctcaccatgattgcacgtaatagcatttgtgggccccgcatctgcttcagtaggagcatcaagatttttcctttttatccattgctgtaacctggaaacatgctattacgttttagaagcagctaattgtggaaacaccccacaaaataatag

SEQ ID NO: 35207 - DNA, 1829 bp, Arabidopsis thaliana landsberg
  unsure (1)..(1829): unsure at all n locations
tgggaaactttttcttacgaaatttcgtattgggcaaaaaaaaagaaaacaaactttgtgaaaactcttgtcaaaacttgaaagttttcttaatttttaaaattttagggttttctttctcgacgtcaaaactctgtagggtcgaaaaactttttccctataaaatcactcaatctttacattctcaatactatccacctatcttagaaatggagttctcaagctttttgtttactattttactcttttcactgaatatttctcctcttgtttcagctcatggctccaaccatgaagactttcttaagtgtctttcttaccgaatgaacgacaacaccgtcgaacccaaagtcatacacacttccaaagactcttcctttttttccatattggattcttcgatacaaaatccaagattctcggtttccgaaacacctaaaccggtctcaatcatcactcccgttaaagccagtgacgttcaaactgtgatcagatgcgcacagctgcatggaattcatgtaaggactcggagcgccggtcactgctacgaaggtctctcttacattgcgtacaacaaaccattcgctgtcatcgatttaaggaatcttcggtctatatcattagacgttgataaccggacaggttgggtccaaaccggagcaacggctggggaattgtattatgagattgggaaaaccaccaaatctcttgctttcccggccggtattcacccaaccgttggtgtaggcggacaatttagcggtggtggttatggcacattgctaaggaaatacggtttagctgcggataacataatcgatgcacttgtggttgacgcgagtgggaggattcttgaccgacaagcaatgggcgaggattacttttgggctattcgtggagggggcggatcaagcttcggtgttatactatcgtggaaggttaaattagtcgatgttccatccacaattaccgtgtttaaagtccagaaaaaatcgaagaaagaggccgttaggatcatcaagaaatggcaatatgttgcagataaggttcctgatgatcttttcattaggacaacattggagagatcaaacaagaacgcagtacacgctttgttcactggactatatattggtccggtgaacaatctattggcgttgatggaagaaaagtttccggaactaggtcttgagaaagaaggttgtgaagagatgagttggattgagtctgtactctggtttgctgatttccctagaggagaatctcttggtgttctcacgaatcgtgagcgtacattttatctttcaaaggcaaaatgattttgtccaagacccgatacccgagcttgcnattcaagagatatggaggcgattagaagcccccgaggctcggcttggaaagatcatattaactccatttggtgggaaaatgagtgaaatggcagagtacgaaacaccattcccacatcgaggagggaatctctatgagattcagtatgtggcttactggagagaagaggaagacaagaacaagacggagacagataaatatctgaaatgggtcgatagcgtttacgaatttatgactccatatgtttcgaaatctccaagaggagcttatgtcaatttcaaggatatggatttgggtatgtatcttggaaagaagaagacaaagtacgaggaaggaaagagttggggagtgaagtatttcaagaacaatttcgagagattggtgagagtgaagactagggttgatccaacagatttcttctgcgatgaacagagcattcctctggtgaacaaagttacctgaagagatcatttgaagttttt

SEQ ID NO: 35208 - DNA, 1792 bp, Arabidopsis thaliana landsberg
  unsure (1)..(1792): unsure at all n locations
gtttctgttaaaatatggctgagttagatttatcttatggctgagttatgttatgtgtggctgagataggtctatgttatgactgagttatggtatctgtggatgagtttgttttatgttatgactgagttatgaaatgcttacggctgatttatggttatacagatgtctgaagaccaagcaagggtgtaccctccaagattttaccaagagggggattctaatctggagggtaaaggcattaatcataatataaagctgggagagttccctacaattagagaatcaataggagaagaaatatgggcagaactgaaagagacagagcttggattaattgctaagcttgttgatagtcattttctatggtctggtaagaccgtacattatctactatgcagacagctgagaatactgaagaaggagctttggtgtatcgtggctggtaaacccatccggtttggattgaacgaatttcatcatatcactggtttaaatatagatgaactgcctacagaaaannnnnnnnnnnnnnnnnnnnnnnnagcgttcttcagtgaattgcgtgtgccaaccggtgaaggtcctaatctagatgaacttaggcagggcttagtaacgtgcagagcttggcctactgaaaagcgtatatggtttgggttattgactcttctatccattggactttttggcttgcatactaactctaggataccatttgagagtgccaaaagagttttcgacgacgaagccatgaagacttatccatggggtcgggcagcatatgaagcccttgtcgtttctataaagttgctgaggcctattggcaagacgtacaccgtcagtggtctggttttcgtgttgcaggcttgggcgtatgagtcaatcatcaccatcgccgagcgttttgggaacgctgttaacgcggatgagattccgttgcttagatggggtggcagccgtacccgttcaactatagaataggtcattgctgaagatatcaaagcgaatggtggtgaggtacggtttcggctctgttatgttctgttttttatcaaatatgtatgttacggctgagttaatgttttatttttctctgtgaaggctgagttatgttcttttttttttggcaaatatgttatgttacgactgaattatgttctataatggctgagttatattaagtgacgactgagttatattaagtgatggttgagttaaacatactgatgggttttattatctctcctgttgtagctgcgtgttcgtacaatggttgaaaaggctgagttaagcgagatggttcatttttggccagaccaattagaagacccagcacttgataacttgatccaagacttacacgaggttaagcttgttaaaggttattgggatgtgaagacgagtgagaagaagaagaaactcttaaaagataaagaagcggaggtgtctgaatctcccgctaagaaacagaaggtctctcacagtgagcatgttgattctcttgagaaagatgcagaaaagaagaagaagaagaagaagaagaagaagaagaagaaggaagtagctgtcgaatctgatgaggacgaggatgttcgttctcgtgagcaggatggtcagggagaccagcagtcgctcgtggatgtggtgtccaacttgatctctcccttaaactctcgatttgacaccgttgatactagcataaaagaaatgtcctcccgtctggatgtgattggatgtcaaatcgaatcgagtgttgaagcaaagtttgaaggaagggttggatcgattg

SEQ ID NO: 35209 - DNA, 2155 bp, Arabidopsis thaliana landsberg
ccctcaactttttctatcaccccaatgctaaagaacaaaataaaaaaaaatctttccattgtcaaacattaaaaagtaaaaaaaaaaagttcttcatcttcctcgtcctcactttattcctattccgtgttttttcagcgttttccacagctaaaaaccgacatagcttctctatttttgtttcctgggtgtatgtatgtacagagaataagaccgatctctccaagatctctgttttctgaagagttggtgaatactgtttaagcttctctataagagtgtcattccaaggtatctcttacttctctaatttggtgtttttagctttgtcttcaatttcttcttcaattttaatttctatgtatttgagtaatctataagttagattgcttatacagaaattctaggaaaatggtatttctttgtcaaaaagagacgttactgcaaaaaaacacttctttttctgggttttgggtctctttgagattttgatctaggagttgaattgaattgaaatcttttcttaaaggttctagtcactgctatactagtgcataaattctgttctttttattgattactagtaatatgaaaatgagaggaacaagagacgtattaaggtatgatattaaaatgtagagatatatcttcactctttttggaatactctgaaaatcttatcttaccaattcctctttaccaatttccttttcggtaaaatgtagaattttttatatctaagaaatataaatttccataatctgtacatatatcacacgctttttgaatgaatatttttgtaggtgaagtttttgatttcaaagggttcgaattgattttgcaggtgaagaagaagcgtttgattcccaaaggagattcatttatttgataaatagatttaagctaagagttaaaaaaagatggcaacactaggagatattggagtagcagcagcaatcaacatactcactgcaatcatcttccttttggcatttgcaatcttgaggattcaaccattcaacgatagggtttatttccctaaatggtatctcaaaggtgttagaggcagcgcctgttgaattcaaggtgctgaccgttagcagagattgatgaagctaggagcttgcgatcatacgcgacggttttaaactggatgcctgatgctcttaagatgccagagcctgaacttattgatcatgctggtttggattctgctgtttacttgaggatttacttgattgggtaatcaaaaaatgttttgttcttgcatacagttactaattatagctttgtttttttttttctaatggttttttttttttgtttactattttataggcttaagatctttggtccgattgcattactttcatggccaatattagtacctgtaaattggacaagtgatggtctgcaactagctaagcttcgtaatgtgacatctagtgatattgataagttatccatctcgaatatcgaaaatggatcagacaggtttgcaaattatcccaaaaaatctcatattgatgattctttcttccctctgtgacttcaaagtttgtactttggaaggttttgggctcatatcataatggcttatgcctttacaatctggacttgttatatgctgatgaaggagtatgagacagttgcaaacatgaggcttcagtttcttgcctcagaaggccgtcgacctgaccagttcacggaaagagtcgttcttatcccttgcttttaaactcataacacagctggtactgatcttgtatgttatgacgttttggcaggttcttgttaggaatgtacctccggacccagacgaaactgtgagtgagcttgtggagcattttttcctagttaatcaccctgataactacctcacacatcaggtaaattttctcattaaacggcttgaacttttcatatgtatttctatggtgttcttacacttcttgaatcaatatttaggttgtatgcaatgcaaacaagctcgcggatctggttagtaaaaagacgaagctgcagaactggcttgactattatcagctcaaatacactagaaataattctcagatcagacctataacgaaggtacttacagtgttaaacgtgatggttctgatgttctgttaagtaataactgtcttctcgcatc

SEQ ID NO: 35210 - DNA, 3635 bp, Arabidopsis thaliana landsberg
cagcacagccaaatattctagcatcgccatctattcatcagcagtccagatccagtgagaattatctaggcgcttctgattagccaatccttgaaccaaaacagcaaacgtaatgacagcaaaaaatagacctattttaccaatgatggttgccacaccattaagttttacttgcaacggtgtctcatcatcaccgccttcacttagtgtagccatcagtttaccccattgagtcctcattccaactgtagtcaccaacattttgcaagatccatcctgaaccttggtaccagagagaagaaacgggtgttccacactgacactaaccggttcactttctccagtcaagctcgatttcatttatcagaacagaaaaccctgagataaaaagcccatctgctggaatctggtctccaatgccaagatgaacaacatctccagggagtagatcatatattgagattttttgcctcagtttgtctctcgtaacctgaaccacaatctttttcttctctgcatccaggtccttgaattgcagggattgcctataatcactagtggcagtgacaaacacaacaagcagaatactcgccactataccaagtccgtcatgggcaccaataggccacccttccatcagtattccaactataagtgaaacaaacgcacatgcagctagaatcataagtgttgtatcctgaagggcttaccaaacaaataaccaaaagccacgggtggggctttctgcgaattggttgaatccataaatatcttttgcttacactcagcaggttttcagacgtactaattccactatcaatagacgaggaaagtttttcagtgaggccctcagttccaccatgaattttcaactttttcaaatcatgaccttctacaattgatcccaactcatcaggacaaatctcaaaccctgcttttcttacttcttcaggtagtgtatactcactggacaactttaaacctgtaagcacgcaataccttctcgttaaggaaatcaaatacatattgaataacacaagggagtagtctattctcactattaatgaactgaagtgcagcttgtgaaactaagaccgccactcgaaatttttcctgcattcataaggttgacaaaggaaaatggtattagaacaaagcaccaatagcagtaagaatttattctcaaaggaaaaatgaacagaacgctttgatcgctctaattaacgcctccttcaatacaaactacaagaaacacaaggcttgaaatgggttgtttgctactaatgagtcatatttgcttgaacattcttactagcaaacaccacgaagaacctaaaaatctacatcttaaattagaaacagaacctaatgtaatcatgtctagtgataacaatccctaacctgaggataggtaactagaaaaatactaaaaacgagctcacttagatcccatccagtaagtacagtgagtcaaccaaacaaaaaactcggaatgcagaaagatcacttattagatctccaacagtatacaagcagaaatagaaagaaatgtttcagtaatcaaagtgagaagaaagaagcacctgattggaacgccgaatcgcctcggcctcggaacgcttagacagattagcagtgaatctaaatctccttttaggattcttgacgatccagcagagcttcctccaacgctgcaacgcctcatcggacgagttcttcggcttcacatcgccgaagttttcgttcaagtagctctccatttcttcagcttactactctcgaacaacgagtgaattcgtaactatacttcagatgagataagattagagaaagagagaatcaaggatctcgtaaatcgagaacgaagaagatatgatatataacaagaagtcctctcactggtaatgggtgcttttaacttattgttatttacctttatatgggtcaagaggaagacgatgctttgacgcgtcgtctcgcactaagtgagcttcgtcgaactttcgtctgcctgttctgaaatttcctcatggccatgttttttttttttttttggaacactcatttattcggacatgactcggagctggtcaagaaagtcaaagctatttactgacttggactttatttcaacaaagtttttagtatattctaagttttgtgacttttgtccattagaaatttcacacaaataaattagaataatttactaagtatattttctattcacagtaaaaaatgattataaagttattaaaatctatttaaacaaatatctagttgctctatataaaaactacataattatgtgcgaaaaacaatcaccgcactaagttagttttttttttttttttggcttttaagagaaaaatggaaattctcgtgtttaacaagaattaggagaaacaaaaaggaaattttgtgttgtgccttaaaaaaaaaaggaaactgaagtctgtgtcactctatataatctaatctcctctaacaacaatcctaaaaaccaaacgaaaataaattcaggtggcttctcgcttttctctttcagaaaaacaaacgtttttttctttcgtagtttcgttcgagatgaagcaaattagtagcggtgaagtttggagatggaacaaggaagtagagatgaattcgataagagattgtttgaaacattgtagttccatcgctatcgacacagagtttcccggctgcttaaaggagactccgatggacgcgagtgaggaaattcgttacagagacatgaagttcaatgtggacaacacccatctcatccagttaggtttcacgctattcgacagaagaggattcgctaaaacctgggaaataaacttgtcagatttcgacgaacataagtgcttcaaaaacgataagtccattgcgtttctgaaaagcaatggtctcaatctggacaagatcagagaggaaggtattggaatcgatgaattctttagagacttttctcagattctcaaggagaaggacggaaagataacttgggtgaattttcaaggctcttacgacaatgcttatctcgttaaaggcttaacgggagggaaaccgttaccggagactaaggaagagtttcacgagaccgtcgagcagcttttgggaaagtttgtttttgacgtaaagaaaatcgctgaatcatgcagcggactaagtagccgattcggactacagagaatagctgatgtgttgcagatgaaacgtgttggaaaagctcatcacgctggctcagacagtgaattgacggctcgtgtcttcactaagttgactttcgatttgcttaatagtagaaagcagagtgtaagacgagttgatcatcagcaatttcaactagagcagcaacagcatcagcagtttatgatgactagatgttacatcccgataccgatgccgataccgagaccggtgatgtttgctgctcatcaccagaacccgtattttggtggtggttactttagaatgccggtccaaggaatgaactatgttttgtgatccctcactgtttgttaaacatgacttgctcggcatattatgtataatttctagttttatcagatgtttctttaaatactaaagattaactttcatcttttcatgtcgatcagaacgatact

SEQ ID NO: 35211 - DNA, 1978 bp, Arabidopsis thaliana landsberg
tatttaaccaaaaccaaaccggaaccaaaattccttggtaacaccaagccagccgaattaaaacaaattcgaagacatggtaattggtaacaaaggggacaaaacatgtaccagtttttttttaacgttcctaaacttgtaagttgtaagaattgtgcattaaccatttatatgtgagaaatatcttacattataagacattgaccatttatatgtgatatacaagagggatatgtggtcaattcatcgtcagcatggtggtaattggtaaaatatgtcaaattaattatgacatattagtcattctcttcgtgagagtgaacgtgaaaaaaagaaggtatattgtcggagtgagccaatatcatcatctcaaatggttatatacaaggaatatgcatggatcatggatcaattcatgcatgctgtattggaattttatgaaacttaatactatgtttggagcgtgtgttttaaacatttttaactagtattatagctttgactcagatccactctataaaccagatccatatggtaaggaaaaaataaattgttaagaagcaaggtcaacatgaggagtagaaagaagacaaaaaagaacgtgtattgtaaccaacccattatgtccataatctctataaaaggaaactcaagacaagaacacaaaagcaagaagatcagaaacaacacaaagatgaaaacattccaattgatgatgatctctttcttgttcgttgcaataacaacaacatccggtgtggttagtgagggtaacgacgtagtttatgacggcgaaggagatccggttaagcccaacgttccatattacatcagcttcatgacgtcggattacaacatgtggatctgccgaaagaaatggagatctaatgatcccaactcctgcctcatatgcaaccggtaatggtcactcatccaaatgtggcagcacccacaccggttatgtttgtgttatcaaacaaatcagagacagtcgcacgtgaatcagccaaactcaagattaagttcgtagatccccgtccctgcggtgaatccgggttttggagagtagttcagagaacttcttcagaaggtgaagtagtcctcaacggatctgaatctacgtcagacaatgccagtacgttcgccatcgagcaaactaacgaatactacaagttcactttcggtgacggccctgactatctaacgactatcagtttatccaacgattatccaatatataggttgatatccaagaagttctctggagaaatggagatttatttctacaagaaccttactatgggttaattaagccatgatgtttttatttccaaaatcaaaataaacttgttgtaagaacatgaatacgcaataaaaatgatataataacataaaaataaaactaaactcggagatcataagttgggtcattactgtgtattcatgttagcattacgctaatttaagatattttcttgtgatatgggttacaactacgtgatgaaggaaccaacttgatatgacaaaaatcatttagaaaaaaacaatgatataataacacaagaaagaacaaatactctgagatataagttgtgccgtgagttacattgtcagcagaggaagcagattgacttgttcccgtcgtgtcacggtttttctagacctttgaggaaccatctgattgcaaggtgctctgaagcataagtgataagattttcaaatatatatcttttttttttttgtcatctgtttcaaagattttctaatggcatataaatataaatgtttattttataacatttgttttgccacataatacatagtagataagtaagatatgctaagaaactctatcatcaaaatatggaatcatcttcattgctcttaggttggtgcactaagaagtgcagtttttggcggatctccaacattaagaaaactccttggcaatgcctgcaaacaaaccaaataagaaaaa

SEQ ID NO: 35212 - DNA, 1204 bp, Arabidopsis thaliana landsberg
  unsure (1)..(1204): unsure at all n locations
gaagagacagttgagagagagtggtgtttactctggttttgactcttaagagactcaactttgaggtaatgtctttgtatttgatggtaattttatatgaatgtgaagaaactagagcttgaattctcttagtgtcacaaatttgtatggagaataatcagttgcttagcattgtttactcgttctgattcctgaagttctcagctttgaaatgtatcttagtgttcctgaagatctcagctttgaaatgtatcttagtgttcctgatctcagctttgaaatgtatcttagtatatgatgataatttgatatgaatacgaagaatcatggtcttgattttcatggagaatcatcagtttcttagctctatattctcaaaaatgaatgcaaagaagaaacagaggcttgattttaatagacaccacacaattacatgaagaatcaacactatcgcaactttataaatcttacaatactgcaattactcaagctttgtagcagagcttatctctgactttgtgatccaaagctttgaattgattctccaaacaccaacttcatctgttctagcaatctggaacgagatgaagatataattcttattcctcatagaaatgtcgactggttttgtggtttacttatcggacaagattcaagaacgaagtcaaagactcgacatctctcttctcagatggatacttgatcggtctcgatgagttcttagggaacacaagtattggtggaaagcttccaagctgcaactcctttttggcaaagtccttctggtcaccatcagctctaaacttagcaaccttcacaccacttcctcccagcttatccgccaattcatcgaatgaagcttccattgcctgacaaaacgggcaccacggtgcataaagcacaacgatccaagcctctttccggttctctaacttcatcaaattctcaatcccttgcctgctcaagttcacaacattctcgctattgaagatatccgcgactgaggctgtcccgttgacattagcggttnnnnnnnnnnnnnnnnnnnnnnnnnnnnnnnnnnnnnnnnggccacactctttagccttagcatcttcccaccaccatctcccttctctctcatgctgnacccgcaaaaccgctctcgtgcatggctcacatccgattgaaacataacccgcagcgtgaagcgtgttgacaggaa

SEQ ID NO: 35213 - DNA, 1690 bp, Arabidopsis thaliana landsberg
  unsure (1)..(1690): unsure at all n locations
atgcccctgcgatcttagacattctttttgatctaaacattcttccgaatctatccttattgggaaatatctaatgtctttagccggaatccctttcttttcttctcttgtgtgtttatcgtaattcccatctcgaagcactacatctagggcggtttgactgatcttcatactcctttctgtataagatgcgatcattcggacaaccgtgaatgatatcatacccaaaaccaaacatcttcaagaattttttgatctcatttgttgaagttggaagcacattctctcctagtaagatgtcgtgcactaaactcaaaagttgatcaaagtaattctctgacatcccactctttactttaatnnnnnnnnnnnnnnnnnnnnnnnnnnnnnnnnnnnnnntgggacacccataatataatggagtttcagaatccttcaacttctctctaaagtcagattcttctttagttgatggctccttactatcatcttcattctgattttgagaatcagaatggtcttctccatcaaaataagttgttcttatcagctcataagctccaaattcactactaggctcagcttctaacttatcagcccgtatctccccatgcttactccaacatccatttctcttgtatttatgatccatttgcttagtaactagatgctccaaaacagtatcaattggttgatgatacagattccggcaatccgtacatggacaaaatatttcagaaggatctcccaaacgtctcgatgatgcgtaaacaaaagttgttgctcctttctcgtactcaatgctattccttggcagccatacccaactcttatccatttttaaaacaccaacaagctccaaccccatatatatgattatatatatatatatatatatatatattagttaacagagatacaagaacaaagacacaaagagaaatttcaaaaagacaaattcaatactatcaaagctatattgaatacaagaaccacataaactcaaagctacacgtaaactaagaaccacagaaataaactcaattcgatacaagtgaatcacataaatagtcaagttcaattggatacaagtgaaaagtcacagaaatagtcaacttctaatcgatacaagttaatagtcactggaaatagtcaagttctaatcaatacaagtgaatacaagctatcaaagctatttgaaactcaattcgatacaaatgaatgctcactatcaaagctatatgaaactcaaaatcgatctaagaaccacagaaatcgatctaaataacatacttgtcaaagagaagccactgaaatctttgagaaacgcggatagcgaaagccccaaatcgaaacccttaaatctgagaaacctgaaaatcaaatcctaaatgtgattaaaaccccaaatcgaaactcaaaccaaacaaatttcacaatgcaaaccctaaatcgattacaaaagaatcataaccttctcgatttagaatcagatctgtgtctgagaagctgaagagtaccaaaagagattgaggcgttaagcaagaacacgaacagggacgggagagagacagacagctgaagaacacgaacacgaacagagagaattgaaagagagaattgaaagagatgaagaacagtgagatgaagaacagtgagaacacgaacaatgtttttgccttagaaaaaa

SEQ ID NO: 35214 - DNA, 3593 bp, Arabidopsis thaliana landsberg
  unsure (1)..(3593): unsure at all n locations
aacacgttttttgaatttgctgattaaattaactcacattcgaacctttttgagtctaaattagattagagaaaatgaagcaacatccattctatactaaatggagaattcactgcttagtacctgatggtattatcaaaaccaacctatccgagttataaaccagagacaccaaaattaactcatnnnnnnnnnnnnnnnnnnnnnnnntagttgttgtaagatccaaattaacacatcgcaataggtacgttccacaaatattgcgtacaaaataaggcactagagtttttttttactaaagagttctttggtaccaacttcacctgatggtcgcagaaactgttgcgtcagtgtccaacttgatccttttcttcggttgctcagaatcttcttcaggggtggtgcctgagcattcaccttcatcttcatcttcaagctctgcggtgtcctcttcctgggtctttagcttctctatcacctccgctacttctctgttgacctgtttacacacatttcaccaaagagattattcctcaatttctgtgatcataaaaatggtaactatcgtatgatcagatctgctacagtttcactttccatgaatggaaagcatcaaataagtgtgtgcttgcagataacgaaaacagacttattaccattgaaccaacttcatcttattctagcagagtcaaaatcaatgctaatgcaatttgcacttgtattcatatgatttgatatgaaagaagaagaagatagatgatgtttcacctgagggttctggacaaaatcagatatgtctgttgggcaattggacacttcatgacattcttttgtgaacgtaattttcgtccaccgctgcctctctctctcactagagctgtcccagcaaacttggattccaagcaagccttgcagaagttatgagcacaaggcgttgtcacaggattagtcatcactttctgacagatctggcacttaaattctgcatcatcaaaatcccaatgacagttgagatactaaaataaacattttggaaacattaacttcttgatactataaacattttaacttcttggacacactgacctttcaaaagtcttgccctcatggtattcgggtttgccgactttatggcttccctcaaaagtttcctctcctcaggatccaaaacatttttaactgcctttttactagcaggtggtggcttcatccatctccaacgatcctcaccttcctgatcgagcaagcatataacaagtgggtacaactacaaataaagaaatgttagatgtctttggaacttacatcaatatcccatgatggactttcttttctctcaaacaggtctgtggccatattaagctctggaacatcaggcaaaggtcttgggcgatctccatgctcatcactgcaatataatatcacatcattaaacagtacaaatggtatatatatatatatggcgcacgatgtcacgaagtagatcaaacctggtccatggagctggctcattgtcacatctaacaaacaggaaacggcacatcttatgagtgccctatatatggaacaccatagaagaatgtgtcacttcatagaaaagaacgcgagggaaaatttattgttgtttcattgtttgctatatatgtgtgtacctgtattccaactatcctccagcatttctctatccggtaaacaccatcataccttagtagtcctccttgaggggcgtatggagaacgcttgtccttggtagacctgatcatatatggaagaaggtaatgaaatagtaataaagacgttgcatgcaatagagttgtacatgctcaaataaccactaacctgacaactcgaacaggataccctagtttacaactaagtcttaaagcttcattaaagtttaaaaatacttgatcaaaagcttgacccgtgttagtccttttgttgcctttgagaattcttcccccactatgtaacacattcaagaaaagagataaaatctatcagcacattggagaatagcaagagattattaaaataaaacaaatgaaccaaaagattggtcggagtaatgaaaagaagaccagccttcatgtgtataggaaccagtcgccatgatcctcatcatcatcaaaacctccagcgagcacgccagattgagctccataactcgcttgtccagcaatgccggaaacatgtgggaagtgagccccccactgccgacaagcaagtgggcccttccaggattctccaaccaaaagaccttggttcctaacaggatcattttcagctggtataggaccaaaatgatctcgagggattgtaacaaaaatcttgccactggaagcatttgcatttcctgttttcttagcacgttcagttgtaaatgctttatctggacggtcttcattgtcaacatagtgaacaacttttgaagtacgcgcatcagctttttcggatactcttgctaacctaatagcagacacaatggacaagttgatacggggattggtaaccatgctttcaggaattacgctgcggcatgttccacaactgcggtgtccctgccccatccacttcaagaaacatttcaagcaagcgttgtgcccacatggtgtctgaaaaagaaatacacaggatatccattagccctacttatttttgaaaagaataaatgaacactctataaaatagccttgcttgcaactcatcaataacaaaattatatgaaacactaacttaattgtctaatataaataaacatcccaaaattaaaaataaaaataaaatcgatatagaaaaaagaaacacacaagatatccatcagccctacctaaatactgcaactacaagtttcgaatagtaaataacaaaattattggaaaccctaacttaattttctaatactaataaagaaaatatcccataaacggcaaccaaacaacagtatagaaaagatcaagcatcaacaaaagtgtactcacaccaaatcctaacataacacacctctcaactaaataatctaaaccccaaaaagggtaaaaaaaaacaggataaattaaacaaccgtgaactataaataggtaattaagaactatttagtctaagcggacaagatatccatcagctctatacctaaatactactactactactatatgtttcgaatagtcaataacaaaattataggaaccctaacttagttttctaatataaataaagaaaacatcccataaacaacaaaatagaaaagatcaagcatcaacaaaaagtgtacacacacctaatcctaacacaagacgatgatacacacctctcaactaaataacctaaaccccaaaaagggtaaaaaaaaacaggataacttaaacaagtgtattaacaaccgtgaactataaatgtgtaattaagaacaatttagtctaagcgaacaattaattgtgtcaatagattctatgccacaagctaaaataagtaaatcaagtgacaataatgtgattcaacatacagattcgagacaccccccaagcataagagctaaagcaaagaaaaaaaaaaccgagacgggtttttgtagcgactgcatgcagagg

SEQ ID NO: 35215 - DNA, 7588 bp, Arabidopsis thaliana landsberg
  unsure (1)..(7588): unsure at all n locations
gtggtatggctttcgtgttgcaggcttgggcgtatgattcaatcatcaccatcggcgagcattttgggattgttctaaaagcggatgagatttcgttgcttagatggggtggcaaccgtaccactgtaacaatagaatcgnnnnnnnnnnnnnnnnnnaaagtgaatggtggtgaggtacggtttcggctctgttatgatagtcattgactgagttatgttctgttttttatcaaatatttatgttacggctgcgttgtgctcttttatcactgagttaatgttttgtttttttgtcaagtatgttacgtgacgactgagttatgatctgtgaaggctgagttatgttttcttgttttggcaaatatgttatgtgacgactgagttatgttctataatggctgagttatgttaggtgacggctgagttatgttctataatggttgagttatgttaagtgatggctgagttaaacatactgatgggttttattatctcttgtgttgtagctgcgtgttcgtaaaatggttgaaaaggctgagttaagcgagctgtttcattcttggccagaccaattagaagacccaacactcgataacttgatccaagacttacatgagcttaagcttgttaaaggttattgagatgtgaagacgagtgagaaaaagaagaaactcttaaaagataaagaaacggatgtgtctgaatctcccacaaagaagctgaaagtctctcacagtgagggtgttcattctcatgagaaaaatgcacaaaagaagaagaagaagaagaataagaagaaggaagtagctgtcgaatctgatgaggacgaggacgagcaggatgttcagggagaacagcagtcgctcgtggatgtggtgtccaacttaatctctcccttaaactcaaggtttgacaccgttgataaaagcatcatagaaatctcctcccgtctaaaggtgattggagatcaagtctaagagaggattgattcaaagtttgaaagaaggtttggatccattgataatgaggtcaagcagatgaaagagcatctgaaggttctaggcggggtgggcctaactggccaaactggcatagctgacttagcattaaactctggcatagctgacttagcattaaacccaagaggatcaaggcctccctaaaccccaaaaggtgcacagaatcctacaaataaccaatttgttactactcctcctccggtaagctaattgctgagctattacttattatctaattacggctgaattatcttcatattatacgggtgagttttaacttttatttagttatggctgagttatcttcatattatacggttgagttctctgaatattttacggctgagttatataaatattttacggctgagttataaacgctggttagttatggctgagttgttttcatgttataaatttagttagttagttatggctgagttatatgaatattatacggctgagttaaaaatttaattaggcatggctgagtttagttagttacggctgaggtatatgaatatgatacggctgagtttagttagttatggctgaggtatatgaatatgatacggctgagtttagttagttatggctgagttatatttatacataggtatgagttttcgttgtttaacgcctgagtttcgttacgtttatgcagtcgaaacaagctgatgttggggtaagtaggaagcttgaagcagaatttgataaggtctccattgtgtctgatgtggatttcgttgagactgtttctcctctcaatcgccgtttacgctctaggaagccaccatccccaaatgtgccaaagcagaaaaaggagaaaacattaaatgagctaatccagaaaccgccaacgagaagaggaagaggaagaaagcctttggagcagcctaaaaaggtgcctcctactgcgccaaagattagaataaataaacctaaaccatctgaggaaacaaagtcaaaagctgaggaagctaaggaaaaagctgagttagattcggatgtagttgatgtcacggataaggttgtatccgagtataatgaaatgcttcctgagtctgatgaagatgaggaggaaaccgagaggctaaagagtgtaaaagaaattcggctcaaaactattaagctggccccggatgggagctcattgattaaccccgaagatatgcccactcacacttttccagttattggagacaacgggctgagctgcatgagaaagggttgtctgccttcacgagcaatctatgatcctctggcaccggttgatccggccaaactgcagaagcttaaggcttatttgacaggtcccgaaaggtatggccctttatacgttactaagttgttaaatacgacatgcttacactatttgtttatattaactttctttattatgtgttagcaaacaatattacaaaccatatgggttcgacgatgtgatgttctactctgttatcatggccgaaagaaaggactggccagacgagaaacatggatggctgggtgatgatgtaagttactgttatgttctgtctgagtttggctaatgttatggctgagttatagtgtcgttatgtctgagttacagtagataatgactgatttatttaggtgttaaggctgagttttacttggttacgtctgagttaatgttgtgttttgtcttggttttattttctgtccagcactttggtgcgtatgtgaaaggcctcaccacgaggctcctgcgagatcctaccccatactacagcgaacgcgtcatgattctagacccgtggttcacatcaatgtggacgaaggattacgcacagtggaagatgaagccgaagagggtttctttcaaaggttctacgtatgaaaaatgggtcaacggtacgggtggagacgacccgacaaacaagaagtggataacagatgtggatcacttgtatactatcctccaaaccggaggtaatcattgggtgaccattcacgttgacttgcctaggggtcacgtggactgctatgattgcatcgtcggatgtcatacaccggaaagcgatggaaaaatccaggaacactgtaggccgttcacgaggatgattccacagatcatgagtgaaattatccctcccgcagtccgtgtcctgcaatacgaccaattttcattccgcggacggaccttaaaaaggtcccgcagaatactatcaccggggactgcggcgtttacacgttaaagattcttgaatgtttattgcttggtgtttcttttgaaggcattaatgattcaaatatccaggggctacgggttaggatggcaacagagctctacgatgaattacctaacagaatgcccgttcgtttttatgagacctgaattgcgtttttgaacatgtctgtgtcttttgggatttttagcatgtgattgtactaaatattgacactttaggattgataaccagaattatgtccgtatgaatctattattatgttaattataacaaaaaccaatgtaatggctgacttatcatcgctcgattcgttttacggctgatatatgctaacgtgaaggctgacttgtcatcgctcaaatcgtgctacacggctgagttattgttgtttaattcgatgtttagctgagttattataacgcggtggctgacttgtcatcagacaaatcgtttgttggctgagtttgtataacgtggtggttgacttgtcaaacccaaacttccctcccatcaaataaaccagacgtgactttaggactatagatacaccggtttacaacacccgaatagtcaagtacccaaacgtcgttataggaccaaacgtcgttacgttagagtaccaaacgtcgctaacgttaaggctgacttatcatcgctcaaatcgtgctagacggctgagttattgttgtttaattcgatgtttagctgagttattataacgcggtggctgacttgtcatcacacaaatcgtgtgatggctgagtttgtataacgtggtggttgacttgtcaaacccaaacttccctcccatcaaagaaaccaaacgtcactgtaggactatacatacaccagtttacgacaactgaatagtcaagaactcaaacatcgttataggaccaaacgtcgttacgttagagaaccaaacgtctttaggttagaggaccaaacgacgttagaggactatatatatactggttccctcttgtcttttctcttgtcgattcttagcaactagaactcttcctttcttgtcttgtcttctaatctctaagaaataaaactcttccgagatcatggatgcatccggttcacgttcaggttccaataagcggcggtgtgtggatgacggttccaacaagaggccgtgtgtggatgacggttccagcaaaaggctgtttgaaatggagaatagtttcgaagccatcatctctttcatcaggagcaacataagggagacggccgagttaaagaagcaagggacgtttcgtatttccgtcgaggatgctgacatggaatgatgacatggattattacagccgacgtcgttttgaagtgatgacgtggcaagtcagccaccaaacgaacagttcataacacagccatgaagcaaatctttaagtcagccgtgacatgaatactattacagtaattaaaacaggaaaaaaaacaaagttaattcagccgttgtatgtcgtaactcaactaactcaaccgtaacgttcaacaactcggccataactgcatgatattatagtaattaatcttttaaaaataagtcatccataacatggctgagttatatcgtaatccagctattggcggctgatttatagcactcgaccataactcagccgtcacatctttccataactaagccaatcaaaactataactcggccgcgtcgaggaaataagtcagcctttttctcataactcagccatattgttggctgggttatcttataacttcttataactcggccgaccatccttaactcaaccataccgttgcctgagttatacaataactcaggcaacattttacaactcagccgtaacgtctggctgagttatactcatactttgccgttttgtatgactcatatatttttgacgtaagtcagccgcaacataccgtaactcagccgtaactgccgttgtatcgtgttacggctgagttcatttaatccacgtcagcaatttctgacgtggtagtggcattccttgtaattacgtttttttcgtaacgtttagtaggagcacgctgggtattaaaaaaaagacgacaatatgacagtaataaaacaaagttctgtctgttattgtaataacacctaatttgtattctatcacagtaaatctctcttcattttttcatgaaaattgttttcaattttctttatttagtttaatggttgtatttaaatggttttatgaatcatgtatcatataacacttttataatataatattattgatttggtgtttaaaaaaaaaaatggttgcccatttaagctgtccatcgttcttgattaatcatatatagtaaaacctctataaattaataatgttggaactccgaaattttattaatttagagaggtattaatttatcgataaattaatattttaataatttatagagagatttttctaatttggtaactttttaaaagtttctataagatttccttcatatagaaaatatctttctaaaactatttacaagtaatatataataataatgtatagaaaacaacaccaaaagttttgatatagtaaaatataaaaactatagtcaaacaaagaacaaatatgaatttaaccaaaaaaatattataaagaatttttttacatataatatatatatatatagttgatacatttatataattattaatttatgatattgatgggacaatagatttacataggactttcaaaaaaattattatcttatgttaaatattacactggacaacttgagaccggaaaatttattaatttatagtaatcactaatttatcaaattatttaaaagtgaaacttcaatttacaattgtgcttacttcttttattcacctaatctatttggatgttgtataactgctaaatcacgttcacaattaccgtaaatctattatcttagatttaactttagtgaaatatgcatatagataataacaaattttaagttgattttcaatatttaaatttgtcatgttgtattatagattttttcgcaaattgaagagtttaattttaataatacaaaacattattaataaactcacctctggccttcattacttttgggtttgttgctatttgtgcttagatctaaaacaatgagcataaaccagattactttcattctgttggagttcgagggacatcaaattttagaatttggtttagtttggcttgatcctaatacaatgaatgtcattaacaagtggaagatttcatcaaactagatgatgatttggttctcaataactttatggatcgaccaagcggtatcactcgcagagatctcgaactcgcgaagaattgttgtcaaacctacaagggtttatatatttgtctcaatggttagtttacatgtgtttttggtattagaaaatttaaagatttcattaagttttggtttaaacttacaaagtttattttatctctctcttgtagtctgagaatctaaactttgttttatctttatgagaaatttggattgggcataacataataaaatgtgacattcaaaattgaacctagtcatcaacaaagatctactcaggcaagatatatggtagatacttgtgtctggtttgagtaacaattacacacttcagctgcaaagggttgtaacgataggaaaattttgaattgaataataaaaaaattgaacattattcaactcattcctctacgaaatagtagataattaagttgaacaaatttcctttgcaattagtttattttccaaaaattttggttgaatgatttttccaacttattcatctcaatggtaaaaaatgatatgaatgatttttcaactctttcaacttcttagtttgagacaactatttgcaccattggactaacaattgaaagattggccactcaaataacaaatcaattataatatcccaagatatgtttaaaacatattatgaaacaaagtacaaccactatataatatttatacaaatcaaactatttataaaattaaagtgataaatgtattgtctagaacggattctcacatagtactattttaaaataaaacttctaactatttttatcagaagcatcatttttggtactaaatatttggaactaaattaacatatagaaaaattagtgagccatttaattgtttaataagaaaattggacattttcaggcttcatcctctatttgaatttcaatggatattttgagagaaatctctggctttaattttaatttttacagtcgtagagctaatgaacaacaaaaagatcaactttggctgctgcaactggacaaaagacgctatgaaatggcgacaacgatttgaggcagcaaat

SEQ ID NO: 35216 - DNA, 640 bp, Arabidopsis thaliana landsberg
  unsure (1)..(640): unsure at all n locations
acacttaaaaaatcatatcgtctgtgtaaaatcatattcttagttctgtcccgagacatgctttactttttcatcactccaatcccaatctaacctggctgtcatgtttgattaacttcaggtactaatcaagtatacgatcagtactatcatcatacaaaacccaaattaaataaaatatggtaccaagacgttgtgttccttgtaactttcgtttgcatgcaatagatctcaacgtcgataatttgaattaatttcggttgttaacaataaaaaagatttctaacgtataacacgatatagtttaaggactaaattttatatacttcttacaattttcagtccacatgcttccatttaaaattcagttattatgttttatacagtttcataaatatattcttactttaatatattatcaaatgaagcaaataaactcgagtaaattttaaacgttccaaagggatgatgataaatcagtaacagttgatcacacaagttgacatatcgtcctgtaaagttaaaatctttgtttctttttttccttaaacgtgaaatctcttcttttgtttcacttttttctttggttgctctttagcttttgcgtttgctgttcttaattagaattngcctaaatgcg

SEQ ID NO: 35217 - DNA, 3459 bp, Arabidopsis thaliana landsberg
tgtaccacggcataaactacagtatctttaaatgtaaatttacttttcctatgatatttacaagtagttgtagcgtgaatgatgatgataacaggagtaataccaatcatgatcatgatcaaccatctcatttgcgcttgagggatcctaagattccagaaaaggtaaactttccagagtatgctgcgccagagtcacgttactgcccagcccgtgtttacgagtaataacttcctttctctaccctctctttctctcaccatatgaaatttgatcaatatatcaagttccttgaacaagatactcatcttcgtttctgtattgattcaaaacataaaaaagatatatcgaagacgaagagggtaagccaaaactgcagatcaacgctcaaaactgtttgcactgcaaggtacgcatcacttgtcgacttgatgcactttgtgttaaagtatgtctattcatgtcactcgattgattttggagaagcttaaattggttttctttttttttttaatctaaaaggcatgtgacatcaaagatccaaagcagaacatagagtggacagtgcctgaaggtggtggaggccctgcctattccctcatgtagtccttaagattcaacataccttctttactttaccatatctgataaataaatgagactcaacaaaatcctaaatggctgagttttctttttactaattgtttgtaatcattagtgtttcctgtgtttgtacactttcacttgacgtctattccaaaaaaaaaaaaaaaagattatcttgacagtaagaatgggcagacgagaaagtagattcgaaacgaagtatgatttataaaaaaaaacttgggtttctcgattgaagtatcatcaacaattttgacatcatgctgaagatttagtttatgagaacaacaagaacaactaaattaggaaaagaaaagaagaaaaaatctaaatgacattcattttttatacagcctttttttttttatctaaacgccgcaggaaaaaacctaacgaagatgagcatttggttgcatctgtagggctagttcgtaaacttgttactatagcacaaagcctctctcttggtcaggcaatttttagctctcaaatcatcacctacacaatttcaaaacagctatgagttagtgatacggcttctcttccttcaattcacttttctctaagctcacaagaaggcaaatcacaattgaatctgttgtgttttctttagcaatttatggggtttggtaaacaataagagtatctgtatcatcagattgttcgtctgagttttgctctgacggcattttcaagtctatcaaattggctctctgcgatcaggtcatctttgtatgctcttaatgatcacagtcaagattctttgcctcttatctttggtataaaggagagttttgcaacggttgttatatttctatacaagtagttagaaatcctaatcagagagtatattcttatcacatttaccaaaatttacaaatccaaggtatgctaaataagcaaccgttcgtacacacacactccatcatagctccaagaaaacaaaggggatccaagagaaagcacaatttacatgtgataagaataataatctgtgtgtgatactactagactagattcacggtagaatcaaagaaagaagtaccaaagtagacatcaataacgaaaatgcaagcaacacagaaaaaatgtatatatattcaataaagcagtcctatgttattttcacaaagtttcatgtaccctatataaaaatgcagactaaatgctccagtttcaacgacagcgagcacatgctttatcatatgtcaacaagaaaggatcagaaaagtatgtaagtaaagcttatggtcattcaactcagtcatcaggcagagggtagaagagataattaccttgaagattatgattatgatggagagtggagctagtttcaaggcccctgtccagccggagtacctgaagactgttgctgctgtttctgctgtatctggagaagaaggtttgctgcaaattgtagtgttgactggtatctctgattcttatcgacctccccatctgttgtaccctgaccatccccagagatcataggctgcaatcgtagtgcttggttttgtggctctaaatttgccttatctgctggtggttgcatggcagcttgaaattgggaagggtttaagttctgtgcctgatttgttgttacgccatgaaaattagcttgctgataacttggaattggaccatagttttggtttggcatggacgcttctggttggtattgctggaccatgggctgagaaacaggatgatttgacgaaccctgagtgtacatggaataattattatgaggcatatttggtaacggagacagctgaggcatgttaacagattggctctggtattgcatgttgccatggaccattccactagtgtagttggggttgtttgaagctggagggtaacgcgaaggaggaggaggtagttgcccagctggagtgtactgatttccgtattgttggaatgactgatttgacgcatcatgaactgtttgtggacctcttttccaagcttgagacggtgcttctccattgtacagtccattggattgatgtgctgaggaaacaactgttgaaggtcctgacataggttggtgactctcaagggctgcaggttgagaagttgcagggagaatagatgccagagtggttaaaagctccggagttaaactaaccccagcttgaggcgttgcattattaggtattctgagaggctcgctaacagatggttttgaagcagctgtcaaatgttctggtgcacccctaatgtaattttccctaggaggatataaactgtgactagcattggcaggtgaatcccgggcttgatccatataatgcagaggattggactgagattcttgtctgtatgatgctgtaacaggaacggctggcgggggtaacttgagaacaacaccatatagccgttcttgacgggtcacttggagtacatcagttaagaaatctgatggaggcaccaagaataaagttgtaccatcatctaatttggcaacacccgcccgatcttttgagctaaggtaccggagaaattcagtgtaagacgcaaaatcttcttccctgtctggtacgaaaaaaacgatctcacatccaatggcaacggcgtaatgtttagcgagcatattcaaatcagttcttgctgaacaattgacgacctcaggcctataaatcaattattaaaaaaaaaacaaagtcagtaattgagggcaatgccaaaaatgaatcaacaccatgaaaatcaagacatctcagaaactaaacaagtaatagtaaaataaaaatgtactatctataataatgttacttccatcgagaatgaaatggaaaatatataaatcgctctgaaaaagaaaacacc

SEQ ID NO: 35218 - DNA, 5580 bp, Arabidopsis thaliana landsberg
  unsure (1)..(5580): unsure at all n locations
aacacatgctagattacacaatcttggtagttagcttctaaattttcttttgtttttgtagaagctaagaggaagaacttggattctttgtaattggaagttttccatcatatgtgctcttcataacgtctggcttcttcactatccgaggtcctgttggaacttttcgggtctttggacgaatatcctgcgtgtgcacataagaaaatcatttgatgtttggcattttccattgttgaggaattgatgtaaagaagagagcaagctcaggtgtagtcgtaaagaacagaggactgtaacttcaaacctgatcaaagatggcagtgggtattgcaagtgtagcaacggcatttggagaatcgactataccggatattcttccttcgcatggacagcatgagagtaagagatatacctgttctcaacatagtttcttgatcagttttatctcttgttttaatgcttgtgatcaactaggttctgtgagacacatcttgttgcggagatcagtacctgttcttttgagtaaccgaatttgaaaagatagtctatagcgttgagaactgctcgtttgtatgcaactgttgcatctaggtaatgttgtcttccgctctcatcgacactgataccctcgaagacaagccactctgagaatcttggttccactggccctatctcaaagatcgggtttacgtggagagtggttggtcccattggtgtaaggtactcctgcatcccgtttctaatgatttcacacctattaatgagttacataatggtatctggtcagaatttcatagtaacactagacaaaaacagggacatctaagaaaaccgtatagagtctatttacagtgcaattaggaacttatgtacatacttgagttctagaaatccactcatctctatggctccacagaatgagatctcgccatcaccctgtgagaaatgcatgtcaccggtgcttagattagctccttctacaaacactggaagatatattttagagccactgcttaggttttttatgtcacagtttcctccattttcccttcctggtattgtcctagcagcctcctttgcaattctttcccattctgatgtcctctcttcaatctataagagggtatgcagtaagtacatttatacagttcaaaaactttgttacagtatcagaaaatagtgtacatttcctagtagacatcctttagttgttggtaggcttgctaatggccgctgatgcacaacctcacatagtgttagggactcaacacctttttcttctaattgtctttccctttcattccatattctcaagagttcttttgatggtgcagtgccaatgattcctggatgtgtcaaccctggaaatcgtactcctgccgtgccgtgatgtgatgttgttagaatgtgaataatcaacagaacatctcatcacaacatgattgtgctactaatctgcttgacaaaaaacaggatgatgttgtgctctaaccaggaatttgaggagagtaggcataaatcccttcaaagtaccaaatagctttggtcgcacaagggaaatggtcagtcaagaaaccaccgccattctctctatcaaatgaagcagtgaatccccattcatctcctggaagaggacccaagttgcatatctcaacagcaagaagatcacctggcctagctgcaacaccatcctcatccacaactttgatcggcccactcaggtaatgaacctgcataatcaccaagaaacttttacctatatgcaattcatcatgattagtttactcatatttcttactaaaactccttacagtagagaggtctatgctcttaatatcgccagcagagccatcttctttgactgcacctcccgtccagtcaaccatttccaccctaaacaactcaccagtcttgacctctgcaactgatggtatctcaggatgccatctattgtgcagtggctgagtctgctgccatggcctcttcttcaaatccaccttcaccaccactcgtggacttgctggagccatcaaaccgaacccaataagtacggtaatttatattctctctctactcacacgttctatgttaatatatttttgttttttgttttcccctcttgtattaaggaatcattgctcttgcagattccttatctacaactaaaggacagtaaaagatccctctttcaccatattgtagacttttctatatctagacaaatgactgtcattcatcttataatgccataagacacgtatgtctctttgtgtctgtgtgtggtaatgcatagatgacaagaagttgaaaatgacattttcttaacttatgttctgaataaggtctttctaatgtccggagagaggaatattacattcgacttagtaattgcgcagttttgcaattcaaagtaagctatttttgagacagaatctgtagatagtgcatatagattaaggacgcatatcatttaccttccaatttctatagtttcttgattttggaatttgcaaccaacaaaaaaaaaccatttctctctttaaacatttctgattatactatctagagagttgcttgtctatattatgtcgaagatcttggatttactcggtgaatggtgcaaatttaaccctttgtgtgctttctcgtttcgtgagttgctttatgtggaatctccaagacgccaactaaagaaaacaccaagttattgctttattattggaacatatgcttgattatacaatcttggtattagcttctaaattttaattttaatttttttgtagaagctaagaggaagaacttggattctttgtaattggaagctttccatcatatgtgctcttcagtacatctggtttcctcacaacccgaggtcctactggaaccttccgattctttggcctaatatcctgcattaacatacaaacgcaattaacatatttgcattcctatcttttcagttgctaacaaattattgagagacgagggtgaagaacagagtaaactcaagaggtttatacagaagctttttgacttatgcaaagaacagaggggcaaaattgatacctgatcaaagatggctgtaggtattgctagtgtagctggggcatttggagaatcaactatcccagatagtcttccttcacatggacaacatgagagtaagaggtacacctgttcacaccatattctcttgatcacttctgtctttgtagttttaatttatggatgtttggtgtgtgatcaactagattctggaagaaacatcaagctgcaaagacaagtacctgttcttttgagtaaccaaatttgaaaagatagtctatggcgttgagaactgcccgtttgtaagcaactgttgcatctaggtaatgctgttttccgctctcatnnnnnnnnnnnnnnnnnnnnnnnnnccactctgagaacctggttccactggtcctatctcaaagattgggtttacatggagaggggtaggtcccattggtgtaagggactcctgtatcccgtttctaatgatttcacacctattaatgagttacataatggtatctggtcagaatttcatagtaacactagacaaaaacagggacatctaagaaaaccgtatagagtctatttacagtgcaattaggaacttatgtacatacttgagttctagaaatccactcatctttatggctccacagaatgagatctcgtcatcaccctgtgagaaatgcatgtcaccggtgcttagattagctccttctacaaacactggaagatatattttagagccactgcttaggttttttatgtcacagtttcctccgttttctcttcctggtattgtcctcgcagcctcctttgcaatcctttcccattctggtgttcctctcttcaatctacaagaggattatgtaagaatccctgggaattcagaggtaagcactatttatacagttcaaaaaactttgttatagcatcagaaaatagcgtacattcccgaggagacatcctttagttgttggtaggcatgctaatggccgctgatgcactacctcacatagtgttagggactcaacaccactttcttctaattgtctttccctatcattccatattctcaagagttcattcgatggtgcagtgccaatgactcctgggtgtgtcaaacccggaaatcgtactcctgccatgatggggtaatattagcatttgaatattcaacagaacgaatcataacaaggaaagctacatggttatgctactaagtttcttgatagaagacattgaattgttttcttcttaccaggaatctgaggagagtaggcatagatcccttcaaagtaccaaatagctttggtcgcacaagggaaatggtcagtcaagaaaccaccgccattctctctatcaaatgaagcagtgaatccccattcatctcctggaagaggacccaagttgcatatctcaacagcaagaagatcacctggcctagctgcaacaccatcctcatccacaactttgatcggcccactcaggtgatgagtctgtacaatatatcaccaaaagttgtttttctttaaaagtaaactcattgtttcattattgatttttcacatgtttctcacaaaacccacttacagtagttaggactaggttcttgatatcgcttgcagagtcattgtctttgataacacctcccattgcatcaatcatttctacccggaaaaactcaccagccttgacctctgctactggtggtatctccggatgccatctattgtgcaatggctggtcctgctgccatggcttcttcttcaaatccaccttcaccactactcttggactcagtggagccatcaaagatcaaaacccaataagtacagtgatctctctattcacgttttctctctgtataactgtattgttttctctctttcttttgtccttgatacagtgaaaagagtgatcattggttcttgcagattccttatctatcataacaaaaagacagtaaaaaaagattgcagatttcaccatatcttgagacgttttcactttttcaaaaagtgtgactttttgtttttttatgaaccaagtggatagtatcaaaagacatgtgtctccctctgtgtgtggtaatgcatagatgacaagaagttgaaaatgacattttcttaacttatgttctgaaaagaatcagagagtcttaagctcaattgcttctccttcttcaggtcaaccattcaaacactctttgatccgtacttcctcattcttgctgtaacagaggagatgctatgaataagcatccgacagattttgtccaaaaaatctaatcgaatcttcatttgacttaatttcatttatgtttatttgttgggtttttttcgtggctgtggcttacacgcttggcgtcatcaagttttattttggtggctaccatcaaattttgtttatttattgaatgaaaggtgttgtatcattgcttctaattgacaactcccatggcccaccaacaaaaacaaaacaaaaaaataatttgaaatttggcatggttgataaagggttaaagatcatacagtg

SEQ ID NO: 35219 - DNA, 1249 bp, Arabidopsis thaliana landsberg
cttatagtgaagaatgatgatgatttgaaccgtaaatatctaagaaacagatgatatagatcaaagctgcttttctcgaattcgcagtctgagagggagagagagaaagattaggttagcgtttctgtttaacagctaattactcggtctaacatttgtatacttagtgttaattatacagtcttgttggagagattttgacactaaatttggttgttttggtgtcacgttgagatgaccttaaaattgtttatataccatttttgtttgatttttatgccttttcattttgtggtatttattattatttaatttattgtcaaaatacattttatttgatatttttaaatggtttacaatataatggactgagaccgcctaacaagatggttgtagatatttaaaacaaataaaacaaaaaggccgcaaggcccacaacccaacaaagaaatcgaggcccaaaatggttgtagaaatttggtttagctatcaaaaggttcaagcggctgacaatagaatttgttgtctgtccaaaacaaactaccataagcttatattgccacgagtactcattcggtattttttttaatattcctattaagatttaagctgtaaataaaaataaattaatacaattcagatcaaatgaaatattaaacttgaccacaaaaaacaaagttatgacattacttactaggcctatcaaatttaagcaaagtctgatggccccgcttgatagctctactacttactacaaaaagataactatgtatgtgtagtaagcaaaccttttttttttgtcggcttgtttaaattattttgagcttgaaaaagaaaatttatgtttttacttaatttaaataattttaacttttcatatttaaaaataggcaaaatattaataaataaaaactaaagaacaattttaattatcatgttagaaagttcacattttttatatttttgaatgttgtagaattttaacccttattctttttcctttatttttttgtaaataatattagtgtgataaatgatttgaaaaaatcgcctgctttcgagcaggacaaacggattaccgaattagctatttaatccgggctaaccaacatattgctgatagcaagctatggtctagactaaagatttctgactgctgacaattttggacttatatacaagaactgtctattatccgcgtgaatcagacactactagcctatggcctatgctcattttggttccattc

SEQ ID NO: 35220 - DNA, 4341 bp, Arabidopsis thaliana landsberg
ccaaggattctacctatagggactttactatgcaactccactttgcttccgcaaatgcagaactctgttcctgctatcactttcatcatggcttgtgccttaaggtacgctagcaacttcttcctcctaccaataccattctaatcattttcattgtgtgggtctaacattgattttcctctatgaatcaaggttagagcacatagacctggtcaggaaacatggtgtggccaaagtattgggaactcttgtgagcatcggtggagccaccgtgatcacattgtacagaggatttccgatatttgaccagggccttaacatgcaaaaggaagaggtggtcggatctgacaactcgcacagcttgacactcggatggttataccttatgggacattgtctgtcatgggctggttggatggttcttcaagctcctgttctaaagcaatacccggcgaagctcactttaacatccttcacatgtttctttggtctgattcagtttctggtcattgctctctttgtggaaactgatctaaataattggatcatcgtctcttgggaagagctcttcaccatcctatacgccgtaagctccctccctctgtctctctctcttccttttccttgatctgaatcaatggaaattagctaaatgaatgttcctttggccgtgtttacagggaataatagcgtcagggttggtggtttatcttcaaacatggtgtatctacaaaagcggtccagtttttgtcgctgttttccagcctctccagacacttcttgttgctgcgatggcgtttcttattcttggtgatcagttatactcgggagggtaagcgcattgaaaacgggatgtatcgggttttgtttctctcgattactcgatctaatagaatctttttggctttgcaggattgttggtgcagtgtttataatgctagggctctacttagttctttggggcaaaaacgaagaaagaaaactggctcttgaagagagtcaacaagatccagagtcactgaccaaaaatctacttgaggcacaacacaagaagagtaattctgaatctgaagtgtaaaagtgctgcaaacacaacgcattacttctctgtacatacacatacaagaacttggccaacacacaggctcctcaagtgggtctctcatacaattgatatcctagtcgtttacttttgagttgtaatcaaaattgggttgcaatttatttatgaataataaatgaaaagatggtaacattaaattaaagttgacaatagagaagcaaatgttctgatccggtctggttggagacagaccaatgacctggagaactcatgttcatgcaactgtgtactgtcttaatctttcatacaacgaatctataacatttgtgacccagtctatgattaaccagataggcaactgattttgtgacccatcatgcatcaaatatttgagtcccagtaattaaagttctgtttctactcctaccatttggactttcataaccaaaactaaatcaacatatgaaacaaaaaaaactgagagatcttgatatcacaagtcactagaaagaaatacaatcgcactaaaccacaaataaagccacttaactgcaatagcacatgttgcaagaaaagggagtctaagttcaaaaccattgtgcaagcacaacacatgaaaaaaacgaaacaaaagcttagatagagcaatagaagtgttctgggacctgttttgaaagaaactaccacactacctcacagttacgatgtcatcaatcttcaaaatcatcctaacgcattcagttgctaaagtgatcgcactggtactcacaagcaggggctgaacaacattttcctccaagatgttagtgatctgtcctttcctcacattgatccctgcgttgatttccccttgagcatgcttgttcctgagttcagtcacaatggcgatagggtttaaccctgcattctcggctagtgtgtaaggaataacttcgagagcttcagcaaaagacttcacacagtaaccttccatcccatgtagcaccttagcccaagcaccgagctgccttgagagctcaatctctggtgcaccacctcctgcaatcaagaaccttttgctcactagacacctaaccacacacaaggcatcatgtaaactcctttcagcttcatctagaacaagctggttggagccacgaactagaacagatgtagttctccccatgtccttgataccagtgatcttcaaaatctttccatctccaagggaggcctcctcaacaagatcagcatggccaagcttctcagctctgaaatgctcaatattggcgataggcaagcagttcaatgtcttggtgacaaattcaatctcatctctctcaacatccttaataaccataatcttagctttggccaaatagtgaagagatagatcagtcactgcatccctcaaaatactcttctgaatcaacaacacattgcaaccagttgctttgatcttcttaatcatccccaatatgtaattcctctcttctttcaagatcctatccatctgagtataatcagagacaacaatactctgctcgatatcagtcttaggaggtgagatctggaactgaatcacagcaatcttagcattctccacacgagtcggtccaccagcagcacggctaaccttcttatcaaaaaccaaacctttcacagtatgtgtatcatccacagtcccaccaagcttcttaacaatcttaatatcacgcaaatccacaatctcaggcttttccggatctataacagagagaaccgcatctacagctaaaggagcaagcaatgtagagtactgactaacaaccttactgttaagcgatgtgctcgcagatttcacaagtgaatctctatcagtgagctccactggaacagccatggcagtcaaaatatcgatcgccttaccacacgctttgtgaagcgaatctgaaatgacagtagggtggatcccgtttgtgagaagcgattgacactccttgagaagcgcaccggcgattactacgacggttgtagtaccatctccggcggctgaatcttgtgatttggaaagttcgaccaacatcttcgccgctggctgcaaaacctccatcttgttaaggatcgtagctccatcgttagtaatgattacctcaccgttcgccgtggaaatcatcttgtccatccctttcggtcccaaactagtacggacggcgtcagagacggctcgagcagagttgatgttcgcgaatcggatatcttctctccgcttgttgtctacgaacgattcagctttagatccacggggcttcgaagccattggtgccgctaccgccgccatttttttactacgagtgagagagcttgagatctcgacggaattgatctcgaacggagaaatttgcagaaaaccctaaatggaagtgtgacaagagtgttctggaaatgaaagagagaatagagaatttgaaaaaagccctagggtatacgctattgtttgataaatgggcctgttttgagtttttatgagttagcccaagaggccccgttaccggttcagacttcagacttgagtgtaaaataaaaagacggttaaacaaatttgagaaaaatctattctcgaccaaatgatctgggaattatttggaccccaagattacagcacacgaatgcttgaaaggtacttatttacactgactgattatgcaatagctcaagagctttgacaagaaccggtttgaaccggtttatatcaacgctaacgttgtgttgtaccgaataaaccgactcgaaagctccccacccacgctttgcaacggccaatggatctctaacgaactcgttatcgcgtccgtactgcttcaccagtgtgctctcctccgccgtgatcttgtactccaaatacctcagattcatgcccttcgacggatactcgaaatccatctttgcaagccactcgaatccaccgatcggaagaatctgaatcacgatcgcgttatcaggtaagaacaccatgttcgtcatccccgcgccgtgaacgccgagcatcacgtcacaggagttcacagttattgcgaaactcgcgatttccgtgtttgcttccgccaccacgactttaaatccgatttgtctcgccgctctagcgatttcacccgcgttcataaacgctcgcgatctgctcctagacaaaatcagaatccgtggcttccgcctcgtagccacggcggagtttctcaacgagtaggtgtctctgaggaatttccggaaatcggacattgaatactccgaattcgaagatcagtcgttagctctttgtcata

SEQ ID NO: 35221 - DNA, 5628 bp, Arabidopsis thaliana landsberg
agcacgattcagtcattatccaagttcacgttcaccgtcgcggagatacaacgtcacattacaacaaaatatgagaatgaaagcaagccgtatcgaataggaaaaacaattagatatgtgtatcagaagagtagagggacaatgattcacggagtcaggctttggagttaatatctgaggatggtatatggacaatgatcaaagtaagtaaaggaattgcaaagttaaagtgatggggacaaatcaagttattggagaaggaaccatagaagacatggttatggaaagaatagtcagaggagttaaggaagttatcgagaacttatgaatgggtcaagttgttttgttcataaagttgaagaagtcatcccctgtccttcacccagcccagtctaacgctcaagaagtggccaaggtatcaagttagtgagtaacagttaaaccataaaaatagatttaccctcagccttcttgaccttaagggtctcagataaggtacgtatgggttccatctattctcttgaatgtgatcgtgtgcattgcatgattagctggtagattacttgcttaatttcaattatgcatgcatctacgttgagtggggtcggattcggagtgttgagtgatcccgagtttttgcgtgcggttgttgagggtgccttcctacttggagtagtcattagattgatctattccctgaagccaaacccttgttttggagaagcgagtagttgaaatatttgtggtaaacatcgaagaatctctttaccggtcagctaaatgttcaagtagtgagaattcacttgggaaaaagcatgagtcatggtacattaaggaaggaaccttggtacccaaagaagttactatgagagagtcagaagatgttagagatgaagaagctttcctaatcacccaaacttaagctttcacgatttaaggattgatcggaatggaggagtttggttataaaatattgacggtacaagaaacttgtgggaagagttctttctaccttgggataagatattaccatcaagacgagaacataagttttcaatagctaaaattatgtaaggagccattcaaccgaatgaaagacaagagattggtgaataaactatggcgagccaaattcaagagaaggtggaatcataataagcaatgagtgatagtgaagataatcaagttttccaaggtactagaaaaataagggaaaggacatgaagaaaggctaaagatgttttaccagaaaagtttaacgcgttataagaaaggtggcgagaaggagcattttatggagaaggacttaagaatcttatgagcgagtttcaggagaaccctaagaagaaggagatgcccgaaagattgaattcagggacgaattcttttaaagggggtagaacgtagtgaccctcgctaaggggtaagcggccaaacgggaaaacatcaaggaatgaccgaggaagaactggaagagaaagaaatagttaaggatagaaagctaaagatatgggcaaggtaaaaatgaacttgtccaattctagtttaaaattgggtcatccgggcgaagccaaaacgagagtaagttgccccgagtacatggtcgattcccatatgtgccaaaaaggtgttaaaccatcaaagggaaaaagaaattactatttgagaaaaaatgggcaaaaatgggcaagaatgggcaatgcgggcgtgccgtgggcaaagttttcccagacgggctttgaacgccctttaaccacgccatggacacgtgggctggcttacttggtgcccaatcaaagttgcttggagccaaatttaagaggattggagccgaagtttccccttccacgtgtcatcgtcccatttctacagcatatgtgtctttacgggcgggcgacatgtgtcccgcaaggtgtcaccaccagatgacatgcatttgcttggagcccatgctgtttcacctataaatgcttggccaaagtcaagccatttgatgggagaaaggagagagaaccggaaggctgcccgactcataaaaatcgcccgtaaccgagagaaaacttgcccgcagttgagaaactttgcctgtgatcaagatcctttacccttaactaaataattcaagtccatgatctagagaacctgttcgtggatgagatatccctgtcggcgaccgagacatccgtggagatcgtgtgtgaatcttgttgagtcgaataaagacttcttctaaaagatttgatctgccgatttgtgtgaaaactcaagaatgagggaggttacttagaaagaagctagatcaagatgaaaatgatgtggagaagtcgtgagatgtccgagaaccgttaaagctaaccttaaaccttcagccaaatctatgtgggtctcgaagcgtgtgatatggcacatgataggttttgagtatatatttgggtcatggttagcttgtgtagtagcacgataatatactcttgcgttaggagaatgattttgtgcattacatgagtattgattaatggtgcgatggggctaagtcgcatatgtgatataatagatttttatgcgtaaaggttcattgttgggagtttgtgctgagtaaggatatggatgattgtatgtgttaaccatatgtctcataatatattgaattgttgggtcttgatacgtggtgctcgtggtaggaggcagagaccataagcgtatcaagatcgtggtatgtctgatcttcgtagtgaaccgtgctattgtggggtcttgttaacgatgttacttgatcgccatgtagtgcgaagggctcggagagacggggctagttaccctggccgagttgtctacacgacggtgtagcattttggtagggatgctccggttacatgcctttgtggttgtaaagcgggagatccagggattttgtgtttttggtgtggggttgtttgaaggcagcatatcgggccctttaaaacttaataaaattggagtcttaattgcttgtgcatatttttggtagatgactcagcaagctacatttcgttgttattctctgttgcgtgtttcgggatggggaactaatatatgttgcaggtagaccgagctcattaaataatcttagattacttgtgaatccattttgttttgcaggataccctagtgggaaccattagagggatgctcaagatgtaggaaagctggtatagagtttgttgcttttgcaaaacttaatgattttagttcttgttggatttgagcgtataggctcgaggcgccattgtaaaaacgttttggatatttggttgtacgagaatttttatgttataaaagattatttttgtatgaagagtgtgtttcattcgatcttagtcttgtccaggctaacacaactcacgatcatggcaagggttgaaaagcctaaaccgcgttcgtgagggatggttcatgtgggtaatccggctaagggtctaaatatatttggaacctatgttgggttgtctatgtgagctatcaatgtagcatttctaggttgcccttggcttgtccggccatagagcgattcagggggcgttacactcgctgctttatcttttacggttttcttcttcttctcattcctcttcacatcccaataaccttcaacaaacttatccccatgtatgtcttcgatcaagtgatcaagtgttggatcttgtacttcatatggcttagtatgaaacagctcgcttacatcatccttcataaccatttgacgcacattcagctacaacgcaagaaaatattgataacacggctttatagcctgttttagctattgttttcttatgtttcagagataatttggtgccattctagagccaagaaaaggagaaacacgtattctaggtgccaagaaggtttttaagagttttgaagctaaaagtatcaaaaggggatcaattccagtagttcagaagtttagcatccttcggaggtcttccccatcacggcaacaagatatttcggtatgcatggaaagctagaagagtcaagattaacgtcgatgtcgaaccgaagcaatccatgaagtcgttcagaagatatgacctgaagagttaagacatgtcaaaaatcggccatttggaaacaataaatccaaaaagcatccggccaagctaaggagacttgaacccgggcagctccgagaagcttatcaccgacttataggttacgcccaagtccttctctctttctgacacgcgtcattaggctccttcccttaagcccgctactcggcccgatcactgacttatccggcagattgacgttcttacccctaaacctaattcttggcccccaagtataaatacagtttttaagccctaaccctaggtgtgccttcatcacaagcgaaccctagccgtcacctagagttgccaactcgccgccacaccccttgagctcgaagatcaccatctctttctctttctctttcgttttgtataagattctttaaggtggagctttgcctcttgtgttctacattaaaagaagtgatctctaaagcctttttaagtcttattatgttattattatggcttactcaaccgaactattgattagctcctttgccatgagcgagtagatctctagttgggtttgagggggtttcaaaggggaattcatggggacgttagatctgatttaggttggcggtttctatgattttgtttgatcgtttacacaattctttctatttgagtttaatcttaatgcatgtatgtccgcaacgtcacctagtacatgatcttaagtactttatacttggcagaatcttgtataattgcttgaactaactcacgaatgagtaagatttgattacctttgctaaccgccgattatagggtcttatggactataattgaacttgaacttaatgctttgatatgtatgtcatcaccatgttagcacctcctagccgtgggggcaactgagtggccaggtatagtgagattaaccggctttcgactactaaccgttagggctagctggacttgaatgaatttcgtatgtctaagaatttggaagtaaacaaacctaaccatgtaatcacctgaattggaatctatacctttattttgaacgacgatatccggagaaacccccaaagacctagcgcttctctcttattgcttatcatctctttagttacttgacttttttattgtgtttattcactgcatacgacaaccccctctcttattatttggtcctagcttcactctcttctaaaggatttctctgaactacttctctccttgtggaatcgatcctaaagtactactccgaaatactgcgcacttgtagtagtcgtgtggtctttcaagtaaaagcctgaagcgaaataaaatacgcatcaagcattttggcgccatttccggggagagattgtttgttccacaagtccaaggattagagtgaactctaggacactttgctttgattttttgtttttgtttttctttgtttcaggaagtttaaaggatgaattcgaggaattatcccaatggctactaccataatgtgaatcacagctcaaaccgcggatcacatttctctatttgccactacacgcccgatgcatcccaaatgcatggcggg

SEQ ID NO: 35222 - DNA, 1366 bp, Arabidopsis thaliana landsberg
acggatcattcgttattctcactgtagtatgctcatgcactttcgataaactatacaagtctacaaattttaccgcttctaaatgtatcttttgagtgtatccataatctcatgataagtacaatactttggttctgattattctctctcaaaccgggtcgatgcatgctcatccaattcctagtaaaaagttatcaaaggggaattaaataagaaaagcctataaattttcttaagaaaatatttttatttcggaaaacaaaaaaacagaaatttcctaataaaagctctcccaaacaactcggctcttcgtctgtctgataatctaattcatccctacacacgacaacgacaagtttcctcatctttctctctgttttctctttccgctaatttcttgatcatcttcttcttgttctgtatgcaatggggactcctcgttcgccggctacagatttctttggaatttccaagacagcatgcaaagcctacaagtccctcgtcaccaaattgcaccctctttcttctcatcgcaaatccgaatcccattccgacgccgattccgtacgtttaattaacatcttctcttattgtgacgaacgctattttctgatcatcatttcatttacgttttcacatttgagcaatgatttttgctatggaataacgtagaaatagataaattgttcccaacaatgatcaaacggcgaaatattcgatttatatcattatggatttccgtttctttcttctttttatctcttcgaggattgtttgtgaaaacctctgtttcgtaaaataaaaaaatcatttttcaatccagagatcgtgagaacagagtaaaataatatttttgtttgtaaaaattgataggcaatccaccggagatatttggaggagaaatttgcggaggaggatgatctcattgctgctcggagaggtctccggctacagagcatggacgatagtagcgtcttcaaacgtcgttcttctctgttatcaaactcaagtagccgccgtagccacacgccgcaagctagaccaacgtacctctcttcctccgcttcttccaaccgccgttctgctttctcaagaagcacaagccgtagagacgaaggcagcagccacagcggagtgagaagccacggtttgaaatcacgtcccatctcaaacaacaccagtccgatgacgtcacctttcacgagtcctagaggaaaagatcaaaccttaggtgatttattcggatctgtaaagaaactttcgtctcctacaagcaatagtccgataaacggcgtcaaacaatcttctccttcgtcgatttcgaagagtgctagcaagagagataaggatgaaagaggctctacga

SEQ ID NO: 35223 - DNA, 6323 bp, Arabidopsis thaliana landsberg
caattacagaatctatacaatcttcaatattgaatctatacgatcttcaaaaattcaagtctttcttatatatattttttttccggcaaaaaggatacagatgaagatcatgccatttgttttagaatcttgtttctattaaagttcaaaaaatagaccggacaaagttataaattaggattatataaaacagatatggatatgaatcgccataataagcattaaacctccatattgagtaattgactaatttacaaagatataaaatctgcaaaaaggtatgcatttacaagaatagccgattctattcatgtcaaattaacaaatatataagaatacaaatcccctaaacacatcttaaccaattactcaacaaaagagaagaaaatgacatctctaacaactcaaaccctaatcatcaccatttttcttcttacaatcccaacatccttcgcatcaccaccatcactcgaagacgttttcgcacaatgcgtcaccgattttaaaccttcaaatccaaaatccccaatccaaaactacatatacactcaacgaagccctaatttcctcacaatccttaacaactacgtccgtaaccttttgttacttcaacaacatgacacgtaaacccgtagcgattgtagctgccgcggatgtcactcacatccaggctacaatcacttgcgccaagaaactcggtctccagctccggatccgcagtggaggacatgactacgacggtatgtcgtatttatcaaccattgatttcgttgtcctagacatgttcaatctccggtctatcaatatagatcctaaactcgacaccgcgtgggtccaatccggtgctacgcttggagagatctactacggagtcgccaacaaaagcaatgacctccgtggatttcctgccggaatctgtcctggtttaggcgctggtggacattttaagcggtggaggttacggaaacatgatgaggaaatacggtttatcgatcgataacattatagacgctaagatcgttgacgctaaaggaagagttttggaccggagctcaatgggagaagatcttttctgggccttacgtggtggtggagctgctagtttctgtgttgtcttagcttggaagattaagcttgttccggttccagctaaagtcacagtctttaacattgaaacgtttggaaacacaggaagcgtgaacaccacggaacttgtagccaaatggcaagagatcgcagacaagattgacaatgatctgttcataagattaactttaggctcaagcaacaaaaccgtgaaggcttctttcatgggaatgtacctcggaaactcatcgaatcttctagaaatcatgaacgcgaaattccctgagcttggtctgatcaaaagagagtgtattgaaatgaaatggatcgaatcggttctgttctggctcggtatcccacccggtacagcaccaacaacgaatatgctaaaccggatcccacaaaagcaaatctacctcaagagaaaatccgattacgtccaaaaaccgatttcacgaaccggtttagagtcaatattcaagatcatgacagagaacgagaacgtcacaatggcttttaacccttacggagggaggatgagtgagattccatcgaccgagaccgctttccctcacagagcaggaaacatgttcaagattcagtacgcagcaaactggttcgtgccaggtgaagcagtggctaaagattgcttgagccagacggaaagattgttcgaggcaatgagcccttacgtgtcaaagaatccaagagaggcgtttttgaactatagagacgttgacattggaaagagcttaaactcaacgtacgaggaaggtaaagtgtacggagttaagtattttaaggataacttcgagaaattggttaagatcaagagcagagttgatcccgacaactttttccgatacgagcagagcattccagtgctctccagccactagagagactagagacacacttctattaacaattgctaccaaaaatttatattcaaatgttaacatgcaagaaatagtactataactatttgatgtaaaatgcgaagagttaatttgagctctctgtttttatcgaattcagacttaaacctgtgtcttggattagaagatgaggaagtagtcatttgttttcctgtatatgaactttcaaaatttatattcacattatatgacaaaaaatttatacattttctttattttcactccagtaagaaatgtgttggaattgttaattggaatctgtcacgtagccggatcacgtatttgtacttttgaagacaaaattcaccaatgagtgataagctgataatagaaaagaacaaagaaaccagtttttaactatttgcatgtaacttatttgttacaaattatatgtagttaaaatgtttcctctatttgtatatcagtcaagcactatgtataagaaatgtcaatttatgaatttttccatgtcattcatagagagtcactcgtttatttcttatatagacaataacacacaacatgcatacaatatgactagatttaaccaatgatatactgcggggacaatttattttttaaagttattatacgtaaaagtttgtaaattgtatctatctatataatatttttattttatagtttacaattgttattaagtaacgtcctgccaaacccgtcccgccaacccgtcccgtaaaaaaacccatttattttattaatgttgatcttatttatgatatgtttatgaattattgtctaaatattttgtaattttgtagtaattaaatgctatcaaatatctttgcggtttgatgattataatcgaattgttatagtcatggagaaaagcaatattaaaaatgataattttctagtaattaaatgatattaaatattttggaagttttattttagtaactaatcgtgtagttaatgtggagagatttaggaaaggttgtgaaatgtcaaatatttaattcgaagatttttttctaattattaaaaacaaacattaaaattcagtggcagccattgtaaataagttccaattactggatttatttcataaaatggctgcaaaaatgtatatgtagatatgtgagtataacttggattatactcatatcagtttgaaaatcacgtaggttcaaaattacagaaataaccacttacctaagtataaaaaccatcttatatattaacaaaatcggccagtcacggaggctagatgtcacggccagcactaaaaatggcgcaaatttgggatcaaaccaattgtaactttgactcctcgggatgtggccgatgcataaccggtgactgcgcaatggtggacttcaatgcgctggttggggccagcctccgaacacgttggctaagtatgctttgaaccaatacaataatttagacttctacgacatctcacttgtggatggatttaacattcctatggagtttaggtaagaatatcgtcataatctttcgtaaaattgactttttcccaaaaacaaatggaacataaatgtccaaacctaaattttctccccgaagaaaagaaaacaacaatcgaaagtctatttttaaaatgttctgaactgatgatgatagtgttttgttggtgttaattgtttccagcccgacaagctcgaattgcaaccggataatatgcaatgcagacataaaaggacagcgtccaaacaagttgagagccccggtcggtaacccgtgtacggtttataggtcaaaccattactgttgtatgagcggacaaggttcatgtagcagcactgggttctcaagattcttcaaacagaggtgtcccgacgcctacagctatccggtatccacaagacgacccaacaagcactttcacttgtagttccgctaactacagggtcatgttttgtccttaggcgctaagctcggtgctacgggtctcaccagctcccgattgaccccggtccccggtagttatttggttacaaaggagcataagataattaagagtagagactcgtctctctcttgtatgtgtgtaagtgtgtacgtagctatgcgtacgcatgtaatcataagatcacaacttaatgtataaaaatgaagccatggagcatacaaccattctcatcgatatctaaggaagtcgtgaaagaaatgcaatacgcaataatgtttactttgaactcttaaatgaatcccatagagagcccaaatcaacattacctcctgagagtacaattcctatgtttttgcaatcacgccaagaaggattgttgcggaaactgtttgataaaactgctgctaggccaatagctccacttggttccacagagaccttcagtatctcatagcacattttcatggcttcgattatttcacaatcttccaaggtgaccacatcatctaccaagtccctcaccaccggcctgatagcaaaaaaaaatgtttagagaaggaatgatacagagtttgagaaaatttctgttctatatctgcttcatagacatgattcctatacgagtaagaagtagattaccaggttaaacctccaagagaagctcgaaggccatcagctatagtattagtcacaggtaaagtgatgattttaccagcgaccttagactgagccgcatcatcagctccttttggttcagcggctataatccggatactaggcttaatcgatttggcagcaagcgccacaccagatatcaaaccacccccgcttatcggcacaactatagcatcaatctcttggatttgctcgagcagttccaatgcaattgtaccctgaccactgttacaagaaccataatccaacatttcagtaaaaatcactaaacagtttcaccaataacgcatttctggcagaaaatggtatcccataaaagacatttgaaagaccaatagcgagaaagcaaaatacctaataatgcgtccatcattataagggtggatgagaactgaacctgtttcctgcaagacttttgaagctacttcctctctagaagacattgttgcttcactccatataaccttaccaccataccggatcacattatcaactttgcactttggagcaccttttggtacaacaatatatgccggtattccctgaatctttgcagccaaagacaatgcagcagcatggtttccactggtaatagaaattcaacattaaggaactaacaaacgaatacaattgcagaatattcagtcactattaactctatacattacctataaggcacaaatgaaatcagtaaacaataaagcattaatctttcacagtatggaaacaaaacctgctgtgtgttacaactccttttgctgcttgttcagcatcaagagacaaaacagcattgcaagctccacggaatttgaaagctccactttttccacaataaacagaagagtaaaatgatcgatattcaatactgagaacaatgagagaatctccactcaatcaagcattattactaagaagtactctcaccctttctgaaagcactcacacttaaagaacaagcttcttccggagattgaattcaacgattcagatgttaacaccggagttctatgtatatacggcttaatacgatcatgagcttcctttatagaagataaatcagcagcatacttctctctatttgcttccatttctaaaaagtaaaaacatttcaaagaaacttcattatcacttcatcaacttcctacttatcagaatagaaaaccatatcctcaatcatcttaaataacttcaaatttgttaactttatgctcaatatactaatttttgctacctaaaaatgttagctttatagacaaattaagtttctcttctgtctcaaatcacaaaagaacacagcagaagttgcaaaagactgaaacttttaacattgcaatttttgggttaaaaaatacaaaggagtctactaaaacccaaaaactaagtgactgagacaaagaaaggatgaaaacaaacctaatttctcaaatttgagcttagggtttaggattgggaatttcaatttgcccagtttcagggaattgcagaattcgagaggacagagacatttactcaaagacagcgtgatgttatggttatggagctgaaaaaggaaacgtcccgctgtttttttatcctagaggcgtcgtgagttgcttgtctccatatgtggggctatcgcgtgtctttagcccctgtgcttttttccttcaacccccccggagtattggagggggttcgccgtagagaaggttcgtttcgtgaggtttgaggcaaatcgtctcctt

SEQ ID NO: 35224 - DNA, 3550 bp, Arabidopsis thaliana landsberg
acctgtgttatcaatgattttcgaggtccgcgttgagaaggatcagaggatctgactgttttcattttcgcgtgtttgtcttctatcattagtactacggggtcggcttttttgatatgctcgtagctgcccatatagcattttcgggatctgcgttggctgctgtatacgactgttatccccttgtccaaggggaatttaatgcattggtggtaggttgatgggacggctttcatagttcgcagatcgagttctacaaagactaggtctatgcgttctctcctagtaggtggaggagagtcacctccctccggtgttcggtcccgtttcttttgtttgagggtttgctcctcctcctgttcgtcgggaggaggggtttcaactttggggtttgaaccttttttagttttgcccccaactgcgattaattttttaagggcgcaacattcctctgtggaatgtcctctttttttgtggtacttgcaatatttttcgaggtcaagttctggactctcgtcctcggctgcctcttctattgcgaatagggtatgctgcccttgcgtttggttttcctttttgaagggttttttggttgcaaggggagcgttttgtgttttagattctttgaatcttaaggccagcacaacgagttcctcttcggcttttgcgaagtggagagctttgtaaagcgcatcgtctaaagataccggttgcctaacagtgaggtcctcacggaatctagaggaaatccacaagccgttgcgaagggcggctatggctacctcctcgtttaggttcgcaatctttgatttgattgctttgaatttttcgacgtaagatcgcagggattcgttctgaagttgggtgagaccccagaggtcggcttcagacgtcctgtttacgatgagtaccgagtactattttaagaaagcggcggcaagctggtcgaaggtatcaatagactagcaaaccattcgagggtgtgacctacgaggttctctgcgaagaaacagcaatgacctgcttcgttttcttcgtccttcaggtacgctcaggttatagccagacggaaggctctcagatgagcctttgggtcgctcgttccgtcgtatcctgggaaacggaatctctcgacgtctctgatgcgataatgggtaatcctatccgtgaatggggtacgcctggtttcttcgatcactcgatctatgacgggaggatcgctcactgctagatgcattcgtgaatgcatttgagccatgtttgcatttgtttgagctgcgtgattgcggaatgtatccatatccacgacgttacgcgtatcgaccggtgctttgggatcggttggactgttaaggaggtcacttcctggtatccggggaatggatggcggataagcgatagaggtccgttgttgcgttgagttcccgggaacgcgagaactagatgcggttgtttggtttctcgtccacgtgtacctaggggcgaatagcccatcggtagtaaaggtgggaccgatagccttgggaaggcaggcgttgtgcttatctcgtttcctgttgccgagtttttgacgagagtgttcgtaggtgcctgtaaaaaggcatcctgccggttgataggaggtgagacgtctatcgaggcgaagtctagacgagtcctcggagtaggatcggctggttagacgggttggctgggttatctccgttcagaggctgtatcgtgacgttttgttctccgccccttgtgtgcggaggcggagtgatttggtcagatccagaagaattcgagttttgggaaatgttctccgcatcagcgttatggacaacatcaaccttggttccaggagggagatccgttgggaggtgcccgtctgtaacgttattgtttgggatctgaactggtaagccagatcccgttgaattggatgaattgggatccatgatcgttggtcacaattgatgtgtttgtttcggtgttggtatgatctatttccgtccccacaaacggcgccaaatgtgggttctgaaatccacactagagatttgtaattgagatgatgagaaaggagggctagatcttcactgaaaccttgagagttatattgctaagaacgactggactttttgtattgattatgacaaaacttttacaatgtgaaaagagattacaagtgaaaaagtgtgtgtgcgaatgtgaactagattgattgtgttttccaagtcgtcctagctcccttatataggtctacacacgtggtagctccgtccaggatatgcggagatcctcctggatattcggcaggtcagttccgagatatcagatccgctccgcgaatatctcctcgtcagttcctaggtcattattcgcttatctccctgcatcaggtgactatgcttttctggcccaaatacccattcgcgtatgtgggctcgtcagctgcgtaggtcctctacttagtgggcttggtgggcttttgtgggctggcttggtattttcacaggtggattcctggaggggaatccagctccaacatttgccccccagcccattgagtgagtaggcgaactcgatgagcggacatataggtcaggtaagattgcgaaaatattcttgacgagaggataaatgtgattagatcagtcggttttgaagataaactcaacaatttcgttttaatttcagattccctccaaccaaaagattttgaggagatacgcgagatgagtcgctgctgatgtggacggctgagatggagcgtctcttcagcgcaccgcatctgacagtccagatcggacgcggagaagagatctctacaatctcgaaaatcatggtgatgatggctttaaataacttcccacctcttcacttgacgtcacgtcaactcaagcgactcttaaggtaaattctgtccacctttattatctactgcgttttgtctttagagatacaaaaatttcatctttttctgctatctccatcgtttgtctgctactctcgtgtttctcgatctgccctctttgctcttttctttcatctctctcgtctttctctatccaaaccaaaagatgagcgccttcgaggattcccagaacaaaagcaaccacaggtacggcgacgatgagagttcgtcccagaccaggtcgacggggtcactgccgcaagtacaaaggcgcgtcataaccctagacagaatgggtccaattcgtccgccgtctatcagagccgacaaaccgaagaagaaaaaggctgccaagcaaaaaggaggcacgccgatgacaaacagcgacctggtcgacctccggaggagatgccaggttccggtaggggtaactatgatactcccaaggccgccactgcatcgtgagaacgtgccggtcgggtgagtgtgcgcttatgccaatttctttgagaaatgtggcctttttttcccgtttccggtgtgtatcctcgagatgctctactgtctcggcctcgcctttccccagatatgcccgaactttgtccgccatgtattggcgttattcacccggctcgggaagtagacagagaa

SEQ ID NO: 35225 - DNA, 839 bp, Arabidopsis thaliana landsberg
aaatttgattagggagttaaatgaaaataaagtagcccaattgggaaatttaaatgatttgtactgatgaaacaacacagaacaaagccaatcgactaaataaactatcatcaacaataaaaaaataaaatggaatataagtattttacctcaaacgatcggttgagtttcagagatggaaaaaacttgtgcggaaagtgtctagattattaaatttcatgatttatttgacaactactaattctgaaaactatatattaaaaaataaattcgaaacagaaaaaataataagagtatcagacagagacagagaaagacaaagaagaagatggaagcaaactctgtctctgtgagaagacgaggaagttggagaacaaccgccaaactaaaacgcacactgttttgtttttttaacagaaatcatatcagcgaagcgtcctaagcccaggtccccgtgggattccttctattgttagttaattacgcgattaacctagattttatgttattaacagtttgtggcatcattttttttgtttttttagcttcgttcgtcatctgtaatagattttccgcgcatttccgtaggtttcgcatctcattcaaatgttccgttctgttcaattggagtatttcggttcggttcggtcggctaccaatttggtgtttctgtttttctttgagggcaattattcataacagttaaataaatgaacagtgttaattatccagatgtttaaaatgtgttgtttgtatataacaaataagtagtggatattataatcattaaacatggtttagtcggctaaatttctagatccatgggtttagttagttta

SEQ ID NO: 35226 - DNA, 2700 bp, Arabidopsis thaliana landsberg
tatcaaaatatcaaacatgaactggttattaacttctatctctgtttttttttttaatgtgtctttgtcttaagttcagatgttgtattaagccttgttcatttttaacatcacaggaaaaagagttaggaaggacggtgagtgttcgtgaggttttcatcaagactcataccaaaccagatggtacttatgtcgacaaaaaggcagagcagattgttaaaaacttatgagaagaagctgcaagaagttgtctgaaatggagacagagacttcaaatgtttcagacggggaatcaagacctcgggagttcacaatagatgatcatacagtcatctttctggaggtaaagtttacattttcacttgcatattgtctgcattttctcaaactctttattaatggtatggctatttttttcataggccacaaagacagattcaagagggaactattatgcagttggaagcctcaaagataatcttccggatctagtcactggaaagggcaaacatgcagcagactctacctcctttgtgtcattgcaagagcaactgaaagaagctcaacagatgattgaagagcaggctgctcataatgctagacgtgaggaagagcaagtccgagctgtggctgaacagaaagacaagcttgagcacttggccttggtggaaaagtatttgcgccaaactgatccaacctttctcaactttatggctactcattcatctgaagcaaccacaaccgatcctatctaatcttcaccatctcagtcttaagttccctacttcataactctcatgaattctgatataaccctatttttaccgattttagctgcgatttaggtataggttttagagtctaattgttatttctagagtcttttctagttcttttcaggtctttacatgtttgggatgcatttggagattatggagtattctggagattaaaaaacaacttaagttgctgaagaaatccggagacgaaaatgcacgtaggtgtcgaacgacacacccctggtgtcgagcgacaccaatacctgacggcaattttgagacgcaacttattgatgttttgaagatttccaaattcggccctgaactttcttctatttctaaataaggcccatcacgtgttttaggtcatatatatagtttttaaggtcattgtttagacctaagcttggagaggctattctcctcatctcttttgtacgttgggagcaaaaccctgtggagagtccctttggagaagatcttctttactctttctcttgctattattgatttcttattcagactatgatttgtgtttctttgattatgtctaagtaatccgcttgttaggtttaaggtttctcattagggattcatatggtttaatagattgcctcctctgctaggttatctgtagagttcttcatatttaattatgcttaatgctagatctagagaaattaactagattttgaattcagataatagatatgcccaccataggtatctgtagttggatctattatttgatgagcctggtttataggtgtgtaataagaatcagcctatctactaaggtgaacaatcgaactcgttaagaatgcatatttaggttaataatctttcggcttctccgattattcttagctatagatatagggagtttcgcggaacaccaccggttattccataattagagtttgagtttaagaattgttcgataacaacctatctttcattagatctactaaccaatagtttcctgagaataccctaagcctgacgtttttactttcttgtcttacaacctcacaatctgctattgcttccttttgtttctttttattttcattactatcttacttagcttaattcaaaaccttgctctattgtgtgattcgagagctttatggaattcgacccgtacaatcgatctcttatttgagagagtggtcttaaggcaatttgacctatatcactttccctcaagcaaacaaaaaatcttaagttgaacgagaggtttgatggtggggattcaaaaatcgaagcatgcatatagaacgggtaagctcaatgtccaggtagctaattctaggttacaagatgatagactcttagttaaaaacgttagccatactcgtcacaatgcaacctaacaacttgccttaatctattcaagcatccacatcaaccaattccctttaacattcattaagcacgaacagtggatcaagcaatgcaatggatttgaactcactttgtttcgggcttaggctaagagacaaaaatggtccctctagaggtttggtcgagtaacaggggactctcagagaaaagattgagcttcagcagaatgctaaaggtaaaagccaatggacccatacaagaacagactcccatctacccaatgatatagtatgatagctcagaagatgatcccagtcccatagatttccttactctaccctttttctcattctttctctctttttggttcaagttctaaggggttttctttgaaacgatttaagagtctagcgggtttggttttatattttgacaaacttaaggctgttcttctaatcttagcacatagggcgttttacccttttctttgaatcacaatccctaacttctttgaattccaaaccctttactaaacttaacacttttgtatcccctttagaactctaaactctta

SEQ ID NO: 35227 - DNA, 4530 bp, Arabidopsis thaliana landsberg
cgttcttctaaatcttgaaaggatgctgagtcttcggggagttggcggttggcactgcctagagtgtctttaagatatccaagtccataaggattgcctcttgaatccctatctgtggactgcaagaaatagagaggaagacaattagtgaatgaatgcatcaatggactctaagactctgaattagactacaacatcttacctcgagaaagatggctttatactcatctactgtgagatcccaaggtcgtgaagtgccattagagacagtagaagctgcagcctccagttcagacagctttgatctcacattctgcccataagtttgagcaatcttctccgccttccgatcaacataagtgccatccgacttagtgtgtgtctggatgaacacctcaccaagatggaacggtcttcccaatttctcttcctgcaaactgatagtaggttttttttggtcaattatcctataacaccaatcatgtcgttgtagtattttaggttgtcaatccaaatgggtgtgatgctaacaatcaagatgtgatcagaagtcactaagtcaagccaagcataacaggttttggtgtgttctagcagtcctaaatgaacatgcagaaaacagaaaatcaaacagaaacagtgaaacactcgaccaacacagctctttgcagagcactgggtgtggtcgagtgacaggtcgagtaacagacagaaaatgtaacagggatactcgactgcacagtctgttgccagacaactgggtggtcgagtatcaggtcgagtaacagtaaagaattgcagaaactaagcaacagatgacaagatgcagtaaacaacagtagagtaaataataaaatcaatcagataaagaattcccgaggatgggataattgagtagtttcgtttcctcagtttacaggtgattgacatgctcaataaattatccctagataacaagttctttaaccaaatctaagtgccaccgcaacagagaccctcaagttaacgtagtcccagactcaatcaccattgacgagagctaacctaacaggtattacgaatcaacaagttacagctaaaacgctccctgcaaccattaccttggtacatggccacaaatctcttgaattagtggttcagacatttcatcgaacaccttttgggcgcggaaatgtttgggctcaaatttcagttgatcagaaagcaataggcattaagaacaactaatccagaagggatctatcaatcgatactcaatcacctagcatactgagaattctacactactctaaccttttcttttaaatctattcactactaagacatgagggcaggaggcataaacgttgaacaggttgaagacatgataacaacagtgtaacagaaggatgataacagaatgaacaacaataaacgaaaatcaagaacaaaagctgaatactgaatactgaatatatatagagaaatccggattacaaaaggtctagaacacaaggtctgcggaaataaaattagataaaaacttcttgtctgcgaaaatgtgaagtacatgctacttatagccaaatattctgaaaccctaatacttaaaacgacgaagtattgggacggattaagaactgtactcgacccatgtggtcgagtgggaggtcgagtgaatagctggagtcttctttttttccttgtgctcgagtgtctggttgagtgcggaatgaagaaggctgtgaagcttgtcatcgagtatgcagtcgagtggtggtgatggtgatactcgacttccacgtagagtgatgaggtcgagtagtgttctggcaatgaaggcgaagacactcggcctcggggtagagtgatgtgatcgagtgatggtaaagtgatgggatgaagtagtgatgtcctctactcgaccagtgggtcgagtgatctgttgagttcttgaagctcctactcgacctcggggtcgagtggtttgacatgatcaggcccacttctttagatagctcgtcaacagctccaaatcatctgaaaacaacgcatatatgcaacatgcatgctaaactatcctaaacatgtaaagtgatgacaaatgatgagaaatggtataaaccaatggtgatatgatgctaaagcgatgacaaatggatgctcaaaacatgtaaaatgcacagttatcacttaccgtagaagctggggcagcatatcaatatatcaacgatgcccaaaggagaagcgatccctgaagctcctcctcattgaacctaattgcttcccaaacgtagagccaacgacgttaaacaagtgcgctatgtgggagccaacccactaggtaaatattttctttaggatttaaactttacttttgcttttgatctttccagtatttgtttcaagactttttaaaaacaaaaaagaaaaataaaaaatagaaaaacccaaaaagaagagaaggaaggagggtcaccagaacccgtcactaggcacccttacaacaggcccgactactgattcgagtaactggcacggcatgaagaagccggcccggtcgtgccaatttttggccgtagcccgcccatgcgctccaacctttggtcggagggcgcccggctgtgccacactttggccggagctgccctacctggcagcagagcaagcccgacgacctgggcaacatactatcacgcccgcctgttcggccgacccaaaacttagccagccaagactcggccaatgatggccaacacgtgaatggataagtgaagttgcaccgccacggccgatcggcccgacaatggattcgtttgacccatgaccattctgcgcatcccaatggccggcgaccccaaccaacacccagccgcttatttctcacccactccaccctttcggcgaagcacagcacctggccagccatccattgacaccatccgtcaccacgaatttgattttattcgtggccatattgacaaaaacaagatcaattctctcttagatatgtttttttttattttgttatgttaaagctattggtggttttagttttttgtttcgaggaagatgcaaatggagattaatatcattgaattcgaccatcctaagccgagtatgggtgatgttaagcaaggagagagatcatccggttagtcaccacaaccaaggtgacattgttcttaacctatctttctcacaaattcatccatatgcttatttccccaccgagggtggtgtgatttgagattgggggtggggtggggggtggtggggggttaaatgatctgttactactaatgatactctctatttcgttgacttgaaacctttttccactttttacaccaatacgttctaacaaagcaaaaagtttttattttgtttcttttcaaagtatcactgggcaaggacgatgtagggaacgatgaacctactatatgttgaataagaccattaaaatgtgctaactcatttcctaagtgacaagttttgcaggattcacaaggacggacaatacctagaaaccaactaccggatctttcccgtgaagtctcactacggagactctgtttgacctgacaactctattttatttggacgatataacctgaccttaattctttctcatgaaggggtgttagatcggggaaaccagcatatacattcaggacttcttatccctttttaccactctctcctgatcctgaatggccactcacttttagtggttcctacccttaaaccctatccctcttttttcaagcctcatgcatttctctttccctttttcatttagcagatgtgtgtaaaaacgtcggagagaaaggaacaacacaatttcccgccacgaaggcggaagaaggaagtaaaagaaaagatttcagcaaaatggcctaagagtttattcttccttggaaccaattcaaaaggtatgctcattagacacggtgtttagaagttctgtttgcccttccaaaaaaaaaaaaaaaaaaaaaaaaagagaaaagaaaaataaaaattaaaaagaaaggaaaggaaacattacaaccaagagagtctagtagcatggttccatggaaagaaatggaaacctaagggagagatgagccaattagagaagagagccccctcggaaaaacctaagtctgggggaaccgaaagtaagaaaaaagtaaaggagaagaaggtgtttaaaagaagaagtggttggaaactgtggacctcaaccgatccgtcctctcttgcggttttgcaacatatatttcattcgagactatacagtaaccctaaacactttaactccaccacttaaacaccaaaagcccctttcataccaagcgttgtctaccccgaatgacaccctctaatgagaaagtcaatgccaaaacatttaaagaatgtaaagtgttaattgacgtgaattcagagttccgcaggatcaaagcggatggacaaggacgagaaaggcataggactatcgagcgctcgttctaacttaacttttgtttaatgtggtctgtaggggatatattcgaaatacggtca

SEQ ID NO: 35228 - DNA, 1825 bp, Arabidopsis thaliana landsberg
aagatttcaggaaatccggaattgttgatgcttaatcccgtcttagaagcccactggttaagaaggagccgtttcaaagaaaaactgggaaagatccctggattctttcaactctgaccatggttcccattgggcaaattgggttttttcaggcaattgttctatggtgatttgggaggcttcaggtaagttggaaatgcccactcttccgtggcaaaggaagcgtggaattccactaagtacagggccttgcggccctagctttgatcattgctgataggtttcaagaaaacccttcggcctgctaaaagatctaccagtaatgattaatggagtggaagtgcctacagatttcgttgtgcttgagatggaagcagaacctacggattctctaatcctagggagacctttcttagcctcagcgggagcgatgatagatgtcaaagacgggagaataagtctcaaccttgggaagcacatcaagctgcagtttgacatctacgaaactttgcaaaggtcaactgtagaagaaaagatcatggctcaaccttagccttcgaattcaatcacccgaccaagcacaacctctacacctgacttgtgagaactaaaaagaaatctgatgagcaagaagaaaccatagaaaagctagctcaaacagttgaggaacttaagagtaaactggatcagatgcaagagaaagctcaatcaaaatgcgggattgacactatcccgagaaaaagattacttaaagatggtatgaggagatagattatccaccagaagagaaagaggcctatttcgaggaaagaagaattgagtattcggctactcttctctcaagagaggatgctgaatatgatgatgagatcagagaggactatgcagatcttctctatcacccattttcttcttaatgagtgtgaggagtcaagctagagactttaaacaagctcacttgggaggaattcccaagactgtttttgtaaataaaacttttattttcttgttatttttgatttgtttttggttgtgtttgtgattctcaggaacagagaaacagcgtggaggtagagtaaaaatttaaaaattttactctacagagcaacaggggatcgagtatgtcaaaaattcaagagtttgaaaaacttctgttgcactaagaagccatgaggtcgagtaagttggtcgagtattagtgatgattttaaaaaacaaaattttgaaattatacttatactcgaccaacagaagctacagagacttgcatggagtttaacaagtttacagaggattacagaaggttctaggcaacagagaacagtgcttcaggacaaacagacagagcgtggcccaccacctctcacctttgttcccccacgcgtttttagagataacaaaatctcttccctccttccctaccactcgatctcaccctatcctttcccaccgacatcatctctcttcctctccaaacgctcaacctcgaagactcactctccctcacgtctctcactcgaccaaacttcactcaccatctctcttcctcaccaaacactcggccactccattacactcgaccacaccactcactcgatcccatacctccggcttctccatctctcacggcttcgtctcccttcccactcgaccacgacacagccgctgccgctcgcgccaccagcttcattctttctttcactcgaccggtttcgccatctctcatgactcttgaccttgccgttcactcgaccacatcgcctttcacttcgccggaagcttcaccgtctcaacgtcttctccatcttcactcgattgcaacgac

SEQ ID NO: 35229 - DNA, 5241 bp, Arabidopsis thaliana landsberg
gaccgagttttaacagtgtagcccatataaaacccatcaaaatcaaatgacagatatttgtcattttctaacgagacattgtcagtgaaactcatgaaacggccaaaagatgcaagctttgtaaactgtaatgaaactaaagcgtccaattagattacctcagtagaagaagagagtttctcgaccgattttctcaactgggtcaaggcaagttcttggctttcctccatgatctttggctctctcagatcctaaaaaaatctcacagagaaataaagagagagccttttgtggtccgtacagacgcacgataaagtaagttgaaaaagtaaagagctttgatgttgacaaagacccagaagccacaggaagaagaaacagacaaagtattgggtacttgtctctacggtaagtggatagaaataactcaataagcctttccccaactcgctgcaattaatgggcagctggaagttgaagctctctctttgacttttgtttctactactttgacgatttaaaacagctgtgatgattacattgctttttaactcctaaatcccgaatcttaaggcttacttaaagttcttttaatcatttttctgatcaaccatgtgaaacaggctttgttaacggttatacatttagctgcttgttcttaattgagcattggaaattcagttctaacgatttttattgtttgtgacagaagaaaagtcctttaggttaataagttgttctatctacatgagatgtacattaaattttcaagaaagattagcttctttgtcatctatttgtttttaaacttgaactggatccaaatacagtaatggcacaagtggagaccaattgaataaaaatcaaagattagcttcctttttgtctaatgtaaagagtgcgacttcaaaatatgtcttaactgttctaaaaaccagtattcaagaatcgaagatacacaccaaaaaaaagtgggaaagttgtgatagaaattagcgacccaagaaaacatgagtagtcgcgtgtatgtttgtgtagactggaagttagaactccaaacatatctattataatgcagtgtgcccacacgaacaaagaaattaacaatataaagaatatgtcttagcaaacccccttacttccaagccactgcatcgatgtcgtctctagcttgtttgtaaagctctagccgtttagctaaggttcctcttcgttccatcagctgtgggtcttcgtccaacatagcacccagcttctccttctgcaccatcatttttcttaaatttattctcgatttgggcatggcattttctacaaggtaacaaaataatccaaagggtaataatatagtttacctctttcctgccaacttgagcgtagaagaagttgagaagcgatctcttagcttctctaacttggcagtaaacgacagctttgggaagagagtttctcaatgtgtcgcagaccatgtttatgtatgcactcacgttggatcctgaattatccaaagtcaacaaacaaagacttgataatgtatcatttctaagtaaagggaggcgagagagacacgtaccgatctttctgaagtgattatcggagtaggggtctgcgtttggtgctggggcattccttgggtttggtttctctttctcgggttcaagatggagtttcctgaagaactcaaccgtgaggtagctagattccatatccaccagacgcaaaaccgttttcctgctttcgtctctgaatctttcaagagcttcatttgcagcagctgctatatcgcttgctagagtcgggaaacgcttcagttcctgaaaaaaacagcaatggtatgttaggactaaaacagagcgtaaagagctaggaagagttctcaaaaccaaaggcatcttgtcagttcttacctctgtttctgaaattgactttctgaccagctccttcaatacgaaatgcacctaggaaatatcaaacagcaatcaagaatatagtcaatttactaaaacttaagtctcaaaagtaatgcaatctaataaattttggaagcatactgcatcgacagtggcttcagctggtcctttgaaatagcttatggatccatcaatgagccttctgtatccctgttcaggagcaataagatgcggctgataacaataagcttctgaaacaaccttctgaacatttttggtagacagatgtcgatcaaagggaagtttctttaaggctgctggtaattgatggtcgaaaactccataaattcggtctccaccaggtcgtctgatacaaacaacataatgactgtcagaagaccaactttaccggacgtacattgtgaaattatgtgaagcattttctggcaaacatctatgaaaaggtcattgatgtaatttttttactaaaactgcacatccttagtctggaaactgactagaaggtaagcaaaattcattatagagcagcacattactctggaaacgacactatctcttaaaaaaattcatagactccaagttgatcatcacagtcgcaatgtaatagtacaccaacaagaagttataagctttacgaataagaagtagaataactaaatcacttaccctccatccaagtgctccttaaagacacgatcaaatgcccggcagagttccaaaattgtgtaaagttgggcctgaaatcatatatttagtgagtgactaaccatacgattctgatgcaactctgaattccaattacttaatggtttaaaatcttactcctgaatctactgcaatgggtctcccaatcctatcaagttctgcatttatctcatcgatgcttttgttgatcaaagcaacaatactggggattttctgcctgataacagtctctaagtgctaatagagaggaaaacaaagaaggaagaaagtcaaagctaagcattcaagctttaatttacacgagatctgtgcaagtaaatccacagggtacctgagacaagagttttgctagatattctgatcccattctactggctaagtgcccgtattcagggcttgtttcaaaatattcttgctctcttttacgtgcagcaatcatatagactctcttattaatatcagcttgtgaacgattcacaattccaacccagggatgttgcaaacagaatgaccttccctcaagaaccttcatcacataggtagaggaggtgtcacaatatattaaacaagtaacagaattagttgacaccccaaggtgcagaaatcaagaaagacgcttacatctagacaatctgttcctttatccatgatatcaagcttggttgcaacaccaaaagtcctttcgcctacagaaatatattagaaggttaagaaaatgttgtggagtgtaaaaagtcactacttaccagttattaggaaactacatttaggtcgtacctgtaggatcaacttctctagcaagttttatagcatctgaggtagcaatatcttgatttgctggagaaatagccaatatgatgcaatttggctgcagttaaaagattttatggataagcttccagagttgacattatagtgagtgatgatgatcaaatgcattcttctgttcaacttggttggaaaagttgaaaagattgccgaaaccgtctcagtaatagcttagagcaagactgaccttttcaacataagaccggaccatattttcaatgtcttggacaatactttccggttgtccatctacacgaataatattcatatcagtgactagtttaagcacaagattcatatcagtaactagtttaagcacaagctaagctactggataaaaaatagtaaactcttacctacagcgaccttggtcaaacccggaagatctatgagcgtcagattaacaactgtagagaaaagagtagagtgagaaatcaaagtcacatggaagaggttagcaaaattggaatcttcaaatctaattgggctactcgttatctcattacagctggtatcaaactatcaataatataggaaatttaccgggttggtttctgaactaactacaataggaatgcataacaggaaatgtggtcttaagcacaaaccattaggagaatatatgctcagctgaattggaatgtttgagatttgttttgacttcccagtaatacgatcagtttcatcctcaatttctttccgcacagcagctgaaaagagaataacacttagattagcccgacatgcctttgtcgatttcactgtttccagcaattagcgtgaaagattcaatcaaactaccaaaatcagcaaatctcttcttaggagcatgaagaaactcagcgtactcagttgtcccgtcttcagtcttatgaagttgcaacaccaatggcctccttgtaacgatacctgataaaatcaaatggtatcaatttagatggtctccttcttcagtctcatgtttttcgaagtagtcaaaatgttcatgtaatgctctcaagatcacagagcttcgctaaattgtttgaaatcgaagcaactaataagagcacgaaattccgaaaacctaatttcaattccaaacatcgaagacactagacaaaattgcttaacgagaggtaaaattaccagatccacgaggcagaaaatctcttcccacaacactttctagaactgaagattttccggaactctgatccacaatatcaaccaaacaaaaatgataaatcagaaacgtggagattgaagaggcgagaagtgagatcggatcttaacgtagaaatgtgtatattcaatagaaagagatcaaacctggccaccaacgacagcgacggttgggagagcttcccaaagcgacattccttcaccgccatgatctccgaggacagtacacgccctctggattttgtttatcagacctatcaaacttttcatcgtcgccatgtttcctggaacgtatcacagatccagaaaatctctcaccgacgctcagatctagatctaacgaaacgaatatagttatcggaggatggatttgaaacgtccggtgagttgttactctctcgcggtagcaggagggattgatgaatctgggagaaaagaggaaagaacccaatggagcagagaacggtaatgggaaaaacaatttcaaaccaaaaaagtaggactacttgctcaaatatataatccttccggaccgaaagtgaaaatatatcaaatcccaagtcgctaaacgcgtaccggtcaatgatacggaaccggttcaattcatgtggtt

SEQ ID NO: 35230 - DNA, 972 bp, Arabidopsis thaliana landsberg
tagcagactcattaggaaattagtaggagatgtaacgaattcatatttatacactaatagctgcaatggcttcaacaaggcgagcacgaatagcagcaaatagttctgctaaggcctcactcgaagcagaaacataatttgtcaccaagcttgtagcagcaacagcatttcttgtctcccgggtgctaagtatatcccagcaacgaactatctgatggtgcaaaattggaaccgcaccatatttcaatagatcatatacaaagttgggattagtacaaactggtgtagaaccacacacaatcctagaatgaaacagcagtccatgcctggagatccacaaataaatcgcaagtcagaccacttgcaaaaaagcaaagaaaacacaaattaatggcaagtgagatcacttgcaaaaatggaaacaaaacaatgggtttcattagatgatatgcttaagagatggtgctgaaaaggtgaagtgtgtgtttgacaatgaaagtttggataattaggaaaaagttggaaagcgctagctagctagtagctttaccaattcatgtcagagaaatcgacatcctgatgaagaggatcccatctcaaaagctccagtcttagataaggtgaatacatggaaggaacggtcaaagacgtgtaagcagcccggaaagcaggtgaagggtgtcgcgcaccccttttaaatatcgacttcacccttgaaagctcggagtacaccacagatgcatcactaaagattttgtcggcacgctgaagtaagctatctcgtgcctcctcataagctgaagtctcacagtcactctcatcatcggtgcttgagtctccttctactatcagggaatatccatcaacctgctttctctattctagaatagctgaagcatgtctttcagtaattaccttcatctgatcttcaattgccgtgattaagtgtccgtttttctgagaaagaaagaa

SEQ ID NO: 35231 - DNA, 1910 bp, Arabidopsis thaliana landsberg
tgccactcaccatcgcaaggaagctgggattcgtccaatataagccatgcgacctatccttgatccttgctgataggaccttaagaaaaccctatggcatgctcgaagatctgcctatcaagattaatggagtagaagtgcctacagactttattgtgctcgagattgatgaaaaacttaaagatcctctgatcttgggaagacccttcttggccacagttggagcagtcatcgatgttaagcagggaaagatagatcttaatttgggaaaggatcttaaaatgaagtttgacatcagagatgatatgaagaaaccaacaatagacggccataccttcttagttgatgaaaagggtcagctagctaaggaactattagaagagcctgcttctaaagatcaggttgaaactgctttgactaggattggtgaagctagacatctccctagtgagactttgagctatgataaatcattagactcacacaaggcagtagtaggaacagagctctttggatcgaaaacagaggttagggcatcaaacaaggaaatctcaactcatactcgaccactatgctcgagcgtcaactcgagtaacctttcaacgtgtccagagaagtcatgttccaccaacagctccagtcacgcattttgcaatcaaatgataggttagtactcaaggagaagtctatatggcaggacaaagctataagagagttaacacacacggtgagagagctgaagaatcaaatcaaagagcttcatggaaaagcctacaaagcgcctctcgacatcaaggatgtcccaaatgatgaagtaattgctttggttagcaaagaagaatgtgaattcacattcgaacggtttagagaagacgactatcgagatgatcaaaaggaaacttacaagaaaagggacattgagtattcaactacagacctgtcaagagagcatgttgagtacattgctgtatccattgaggaagaagaggagatttcaattcctctatatcaccctccttaagcctaatgagtgtgaggagtcaagctagagacttaaaacaagctcacttgggaggaagtcccatgactatccctataaataatttttttttaacggttatttttgattcgttttggttgtgtttgtggttttcaggaatggagaagtaacctggagatagagtaaaaattcaaaacttttactctaccaagagcatggggatcgagtataccagtctagaggagtgcaaaaatttgaaaattttctgttgcacctggtgaccttgtgatcgagtaagaaggtcgagtaccgtctcgtttcactcacaaaaattcaaattcatcaccacatactcaatcatcatgcagagttaacctccgcatttaaatgagtttactcgaccaccaagccgagttaacatctacaggtcaccaagtttactcgaccacggaggcatcccaactgctcacttttcactcgatcaccaaggcgacacattagtccatttctcagaccaatatactcgaccgtcggaccaaacatcctgtgaaccctgcgatcgagtatcccgcaccagaggagggtgaataacaacaaggtccccttattccaggggattacaccagagaggagatgtacgactacgtctccagcgtcttcaactgaggtaccacacacaaccatcattgtatataccattttctgttttcgttttgttttagtgtctcttgaactcttctttacaattctactacacaagggactgtgtagtttaagtttgggggaggattcaagaagtatttaacatgtttgctagtgagtcttatttgcatcatttgagtcttaacttcatctaaggcataaaaaaaaaaaattgaaaaatttctgaaaatgtattccacaaaaacac

SEQ ID NO: 35232 - DNA, 4307 bp, Arabidopsis thaliana landsberg
  unsure (1)..(4307): unsure at all n locations
agtaattgtggggtctacaatcttagtagataagataagtgaccatttgtttcatctattgcattagcttcttggaagtcgctccacaatttgcatctctccggtaagatgttggacaagttctgtattccaaaagattaaaaaccaaaaacacttagaaacaaataaaaaccaaagtgttcttgattaaattaaagcttgtataacactaaaccattggtataatgtcggcaatcatgaaatccaactctcaaatcagtctcccatgacttattaaactccattgccatttccatagcatcattccctttagatgatccaaccatccaacatctttgtcttggaacattcttcaaccttctttgcaaaactacacctgtaacaaaaaaaaaaaaaattctttgatcagaatcttgactacatttgcatgatcaaaaaggttcgttgaaaatcagagaaaagttgtctgaatcacagattacattcgatatcattgtctgagaatcagaacctggaatcaaatttcctgacaaaagtgagattgctgcttctatgctttcagggttacgtggctgaaaatcaaacacaagaacctaaagattccacaaaacggattaggtcaacaagtattattaactcatttatgcattttagtgaaagttatatagatagagaaacctcttgacggattggagaagaaggtttgatgaggaccatgaaatgttgtaaatttgagatattaagtgagtaagccattgacataataagttgcggcggaccggccgcggctttaagcggcaccgccgctacatagatggtgtctccactactactagtggtggttggtgatggtgtgaagagagaggccattgtcttcttctgtttcgtgtggcttgaatcgttatcttctttcttgaccataagcatttaaaaaaaaacattatcctaaaatgtgaggtcataattagtgatttggagattatattatacacgaaattataaatctgttatgagatgggttacattagcttggatgtgaaccaatatcaattaaagaaaagcaaaatggaggaactatctcaattcacaagagtgagaatgataatctacataataataacatctctttaaatatctattgactttagaaatgttataatggttgccatttgcctttcaacacaatttatttacatgaatgtttatactcctactctcttttgatctcttttattctccatggtgtaggaaatttcattgttttgtggatagttgatggttctactcccataattatgaatccaagtgcgtctcgtaatggcgttgtaaccatagagatataaaaaaaaagctttactcaaaacgggttaaggctcgttactgctagtcctgggcgtttgggtatttgggtcaaatatttcgggtttgggttttttggatttagaagtttaagacccgttcgggtaatttaagattttggatcgggttcgggtttggattcgagtttatttatataatgaaatatcaaattttgtgtgcaaatctattaaattacttgaaaatttcaaaaattcccaaaacaacacgagtagttttgcttgaatatatctaaaaagacacaaaaataactaaaatatccaaaaaaatcctaatattttctatatataagtgtaaatataactaagatattattaatatatatttatatttgaaatatgtttggatacctattcgggttcgggttcgagtttttcgggttttgaagtttagacccgttcaagtatttgaaaattttcggtacacccgcctaaataggcgggccttatctagttatatataaagtgaagttgaatgaaattctatgtgcatgtatagattaattctatattcatatgagaaggattgtgtaaattttagataattttctatattattgatttattttagttggttatttttaattagttacgtatatatatatatatgtatatgtttactatacttctaaaaagttaacgtggctcaatggttttagtccttcaatagcacctaaaaggtcaccagttcaactctacttggtgtttgttttttgtttttttctttaatttcaaaacgacgtcgtttcgcttttaacagaaaaaactaacagaaaattaatcacgttatctttttgttaacggaaacttaacgacatgcctaaaatggcatagtcaaggaaactttgctattttattgaaagtcaaacaaaattttacgattttaatgatattttctaaattcatggtttttttatcccaaatttgaaagtttatggtttttttgacatttttcccagaacatgataaaaagttgataaaaaatggcattcttgaattactaatttactactgcacgtgagaattgagaaatgcaaatcgacaacatcatccaaacattaggcgacgcatcaacgacaatcttttttagatctacgtgtccctaaaatgtaaaaacaaaccaaaaccaacggctgtgatttgttagatggtcttactttgaccaaatccaaccaattgacaagttttaaaatgctattaaaaaccaaaagatgagagaaagtccataaatactaaacaagggctcctctttgatctctcccataataataagaagaagatggccaactctaacaacgactggtctcaattctacaacaaccaaaccttcttcaccaccgcaacctccaccgtcacaaccaccaccaccaccgccacgtcagctgattctcctctgagtccggataatcgccgtgttgcaaagccaacacgtcggagatctagagcctcacgtcgtacacctactacacttttcaacaccgacacagccaacttcagagccatggtgcaacaattcaccggcggtccatccgccgttgcgttcgggtcttcgccgtcgtctggttttagtctcacctcgtctgatcccactgccggagtatcttcctctccttggcaatacgctaatttgcagaaccaaatggctcataacgagctaatgcaacaacagcgaccgtacatgttttcgtcgtcaaacaacgtgagcactcttagctatcctaacgcagtggctaccgatggttttgtgggggcggaggagagtagagagggtggtggaggaggaggaggttatgctccgtcgtcggagaggaatagcaatactacctattccgaggaaaaaacggtatattattcttagaaatgttctttttctagttttttacctattccgaggaaaaaaaacataaacgaagaaatgttaggtatactgactttgtttgtagcagaatgaaaactttgactattgtaattttctttagttgtttattgtttttcatattttgaggacttgtggacggataaattaaataaacttaatagaattatacgattcaattagagataaaatgcggtatggttttaataacgcactacataatgcgattttgtcttcattcagaactttaaatagcatttaccaatttgagatatcgtcatttcgagtttaagaactcatttagaaagggaaacaaaaattttaagcggctttggaaacaaatatactcaaacgtgatcacatgatatggataaatatgttcataactattcgactacaaaattatgcattttggtgttcatagtttagtattcgaacaacttgttcaaactatcctacataaattcgattataagatcccgtagtcgtattttatatgtatgaatactttcgttatggtaatagtttcgagtatcatatacttgtacatggaaaggtctaaatgaattttcttttcctttttccttccatgtgatgatcaactttagaaaaatcttagttggcttttcaatttaaagaagaattttctctacagaaagagaagtgaagaataaatattttacgtcgccgttgcttttcgttcagaaactaggggaaatgagtcggtgaaggtaggctaccaacatgtgaagaatctcacgtgatgcgtttctcttttcttctcctttttcacaaaatgaaaaagtcgtttatatcgcataaaaaacgagtaacaaaaaaagggttagagacgggatgaattaatggcccatatttaacttaatactttttctgaagaaatgaattcgttaatgtgaaaattgtttgcttgcttactaattacttttgtgcttccataccttttttttgttgcatatggttntaaatggtggcaatctggagatcttccgagcttggttatatgtatgatgggtaccattcggatatgttaataa

SEQ ID NO: 35233 - DNA, 988 bp, Arabidopsis thaliana landsberg
tgttttttaatggacaactgataggttatttccaagggaggaagggcattcgccaaggtgatccaatgtcttctcatctctttgtgattgttatggatgtcctggctaaatcgttggacttaggggctgttaatggtgcttttaaccttcaccccaagtgcctagcacccatgatcactcatttaagtttcgcggatgatgtgctggtcttctctgatggtgctgagacttctattgctggaattctcactatcttagatgagtttaagaaaggttcgggtcttggtattaatagagacaaaactgcgcttctgttggatggtggaaattttgagaggaatcgatctgtggctaacaatctgggtatcactcacggttctctccctgtgagatatttgggagtgcctcttatggctcaaaagatgcggcgtcaggactatcagcctttgattgatcgtattggtatgagattttcctcgtggacagcgagacatctttctttcgcgggtcgtctccaactcttgcagtcagtaatctactcctttatcaacttatgggcctctgtttttattctccctaacaaatgcttgctcaaacttgagcaaatgtgtaatgcatttctttggaagggagctccaaactcgtcgagaggagctaagattgcttgggacattgtttgctcagaaaagtgttgtggtggattgggcctgcgtagacttactacttggaatacagttcttggtctgaagcttatatggcttctgttctctgcgggtggttccctttgggtctcttggatgaggtataatgttcttggtcagaggaatttttggactcttaactctacaacttcagacagctggatttggaggaggttgtgtaagctcagagaagtggctaggccttttgttgtttgtgatgttgggtctggggtcactgcgaagttttggcatgacaattggactggacacggtcctccgattgatta

SEQ ID NO: 35234 - DNA, 1233 bp, Arabidopsis thaliana landsberg
gcagtgggacaaaaagaataacttactatgctttaatggacagagatttatcaagaaatgatttatcaggagatattccagtgttttttgctgatatgaagttgttgaaactcatgtgagattttttttcataattcctctcgttctcttgctcctctctttgttctactctgaaagtcttttttcatgtacagaaacttaagcgggaacccgaatcttaatctcagagttccagactctcttcagaaaaggataaacagcaaatctttaacactaatgtaagatgatcgtacccccttcaacagtccttatatgtagtgcaacaataattctatctaatcccttcctctcttttttgtcttcgttttcaaataattattaatgataacagtttgggtgaaaacctaaatcccattcccaaaaaagagagtaaaaaggttccagtggttgctatagcagcttcagtggctggcgtgttcgttctgctgataatattggccatctttttcgttgttagaggaaaaaaaggtaaaagtactaatggtatgaatgaacccccaaactgggtcttgaaaataattaatttaaaaatgaaaactttctgtacgaataattgcagctccaagaccacccccatcagtaactagcgctagtggtatagttaaaagtgaaacaagatcatccaatccatcaatcatgacaaaagatcgcaggatcacatatccccaagtactgaagatgactaataactttgaaagagttcttggcaaaggaggatttggaacagtgtatcatggaaacttggaggatgctcaagtagctgtgaaaatgctctctcattcatcggctcaaggttataaagagttcaaagcagaggtactacttaaccaagaaatggatccgttagtcgctttttttttttttaagcattaagtttctcagttatgaaatggtcattttgaaatctttcttaggttgaacttcttttaagagttcaccatagacatttggtgggacttgtgggttactgcgatgatggagataacttggctttgatttatgaatacatggctaatggagacctgagagagaatatgtcaggtaaacactttgactaagagactctgatatagtcaagttcatctccatctacagtttaaaaacattgaaaaaacggtatagggaaaaactgggggcaaagttcttacctgggaaaacaggatgcaaatagct

SEQ ID NO: 35235 - DNA, 3039 bp, Arabidopsis thaliana landsberg
agaaataacagcagtaggagatttttaatagaactattacctgaagatcctaacttgtattttgttctgtataattctcttcagagtcggaagcatgttggtgtttacatcgatggcagagtagtttaacaggctgtgacacgtggggaaagcatagagtgcaacagtggttataaagattcttcattttatgaaagtgaaagagaggaaaagaacttacttgctgcacaaagaccatgaataaggcaggtttgtgcggttggcgtgaagagccatctgtacctctgggatatttaggtagaactgtctttcgtagttcatacacacatccactcccatgctcatcttagtagcctgaaaccattttcataagtttacagataattcaagcaaaagttttgttggtgcaaaaaagggctaaccatttgtttaagccttagctcttgcagggcaatagatgggtagcataggtcagggagaacatcaaaggtattgacatactcagtggtgatgtctccggcttcacggatagcatcgttgcaggcatcacttacgttatgggggtatgcatatgtgtaatgtgagaagtcacattgaatcttgattgtacgtcccactacctcagagatcatgccatgcgaccagaagaactcgtatacagctggaatgtccctgtcaagcttcagaagtggattccctatctgatcagaaagaaacgattcagaagagaaccaaaaatagagttgatggaacgtcaaggtgcttttgcttactgcaatgcctttgatgttgaatttgaacccacttgagcgtgagttatagctgagaatcgcatcagccagttgaggtatgtaatgtcctgcgagaaaacagagatgagaatactgatgttttccaagtcaacatttaatagatttcatcgatatcgaagacatacctgcatagctttcgccagtgagaaagagatcgtgagacttcaactccgggaacttatcgaaccatctcaacaagaacacgagcatatcgctggctgttcaaatacaaaacaagtcaagaaacaactatcttctaatatagtgagagtgagatcctctgaaactttggagtttaaaaatttacccgcagacttgtccccagcgttgtaatcagagcttcgggtggagtaagaccaaccaactccagccgccgcgtccacaaatagcaggtttgaggcttcacatttacaacactagacaataacgtcaggtgtaagatcaaaggtctgatttctctcattctttgcttactattataagacattgacctttgttccacgacatggagttcatgcgaagaccacggccatatcctgtggggtaaaacggacctagctcagtgaaagctcctccaccaacagaagaacaacctggacctataaaacaaacctcaacttattcatttcacaaattagtgatttgtgatatactcaaatgctaattagttaggaagcagagcaactaaacacgaacctccattgagccacaaggttaacggttttgtgtcagggtgtttttcagcttccacgaagtagttgaaaaggctacggccagcattcaagtcgagatcaacataccctgcgtactgtctgaatacaacctttggttgaccaggaagcctgacaaccaagtcttcttccggatagcattcagcaaaactgatagtatatcccaccctatgcactgtgtccgataccaccaccatagccaccgcattggtctgacacgataccatgttctgaaacatgtcgatattcgatagcatcaaccagttataagttaacgtcaatctcactgaatctttaatatttaactgaacctataccatatacagaacaatttcacagactcaaaaagaacattcagaatccaaattagacagtgtgaggtttagagtttatagaactcactatctcgtttcgattagcactcgtttgtaaagaactttgacgaggacttgaaaacagaataagaaacagagaaatgcagagaaagtaaatgagcaagaatccactataagtctagaatcaggttctatcttaggcttgtacagcaacaagacacgaatctagtgaggagtgatctttgttccgaagttttcctgaatcgttctaacactagaactagatctaaaacgacacagttccgttttaggcaagaagcacgtgaggagcaaattctcagaagcccttccttgtaaaacggtagtccaatttatattgtgattagtaacagtatcattaaatatttttctttctcaggcttatattttctgatctcttagtaatctgtttgagtacaacttgaatacaactgcatacgattctgaatttttgtatgttgaaatcagttactttttctcgattttgtgtagaattcaattgaaattttgaaaattatttttaagaactcctgtcgattttttaaattttgtgtcgacgttgtctaattgattcaaaagaaactgatatatatctcagaattaaattgagcgtgtttaactatgcacaacaacatataactagtttggttttgtaaatccaaaattcctgaaacttaagagtacaagtgcatatctacatcacttttttgaagtccaaaattgctaatctaatcgggtggttatttatattttgatccgcaaatcattaatcggatcttacgtaatcggtggttcatactaaaaagttgcaaacgaaattaaatgattagattttgtgaatatgtgaaccttatatagatatgacaaactaatatttgcttatcaaatggatttgctatttaaccatttgtaatctaaatcaagtattgacagctaaattactaaacccaataaagacattagatctattatttgtatgaaggcatatcttttcgcaactaattactacattcaagatcatcatatatggaatattccgttacgaaaaaaataatgttacattttattgcatacttctgctatttttttgagatcgtgaaacatggaattcataaatccgac

SEQ ID NO: 35236 - DNA, 1941 bp, Arabidopsis thaliana landsberg
aacaattgatctatccttgcttaaaggtcgggctttactggctgatatgcctcgctctaccattgtacaggttttattgcattaagctttctctgatgttgtagttaaatttgtagattgtgtggagcaaatggtgctaaacatgcgaaagaaggatgagattgtaccatctcttcgggctataatcaatcaatttgatgaagcgaaccaaagaccatctgatacgttttcttgtggtcagcagacgaccgagtcatttgatatatcacatgctaatgatgctagctatgccgacgatgatgaaggatatgagaactttggaacttcttttgattatgagggtcaatccggtgatgttgatgaaaactttggccccaatgatgcagaaccaacatattcaaattttcatgaggttattaccatcgctcttctaatgatcttttttcttaatgaattttatttggtactgaaaacctgatgttttcactttgcaggaagatgaaccagcctccctgcaagacatggattcagatgacagactggagaatgttgatgactatctctttttgtcgttgggaatctcatctaagcaaaattcttgggcaggtcctgatcactggaagtatcgaaaaacaaaaggtatgcacttatatctctgatttcaagaaataacataagtcctcttagttatcgattttcttgtgagggttaacattctctgaactctttgcaggtccagatgttcaatctgcttcagaaaacaaatcctcaccaccagcgaagaaaaccaggaaaaagaagcaagcagagcctgaactagattttgcaaaagctttggaggaagaaatgcctgatatttttgcccctccaaaaaacccaaagactttacttctcccagcaagtagaaccccttgtcaaacgaaacttccagaggattgccattatcaacctgagaatctaataaagctatttctactaccgaatgtgatggtatggcttgccaaacacagacccagtcactactttgctattgtttttctgtgtttttttatcttttcttttccattttgtgtcatcttttctgaatttactctcctgaatgataacagtgccttgggaggaggagaagaaaaaactcaggtaacacttccagtcattaagaaaatcatcacgtgttggtatccgtggcggtttatgaggcgtataacagtgtctttgttttctttactgatattaaattgccgtaacaaaggaaatggtttcaacaaattaccactaaatctgtattgggtttttgaaaaaaaatacttatgttacacttggtttgttatgtgcatattccaggtgaaacttcaagacagcagcgtgatgaccatgaacatggggaatcctggggaaatgataatgtgtatgatgatgatgatggcccattcgatgataatggaaatgatcaaagtgatgcagaggatacaaacacattaatctctcagccacgccaggtatgtatagattgatctgcatatggttacagcattacaaatcatttcaaaaggctgtagctatctatcttaggaatgaaacattgttgtaattatcctacacaactcatgctttaggtcaacaaaattgatgtccaatacgataaagcttcaaaacaagttgatgtgcaagtgctaaaggaaactctttgggagtgtcttcaggaatctcatcaacctccaattcaggttaaccaatatactctgattatctctcttatgatttacatgactcattcgtgtacttcacatcagccaagttttgtcaacatacaatctaggcttccacacacatacatacctgtttagtgcagtgcacctttttcttattgcttcatgccgaaactaacccaaggatggcttttccttctttctgcccattactgtgatgatgacagaatct

SEQ ID NO: 35237 - DNA, 170 bp, Arabidopsis thaliana landsberg
cttttctagttcttcttccaagtgcaggataaccccagggggttacgggtttttttctaccaataggagcccttccttcaccacctacgtggcgatggacgactgggtggataactgctcctcttactacacgacgtttacctaaccaacattgcgatccggctataccc

SEQ ID NO: 35238 - DNA, 1196 bp, Arabidopsis thaliana landsberg
gacataattcacctgcttttatggaaagattgagagaattatgttggttccgtaaagttagccgaagttctacgtatcttccccatccacaaggtaatgattcaaaatcaaccacttgtagacacagagaaaagtacttatctcgaatgggataagcgataggacgcctagaacaaaacaaaatgacagattaatgaataccaacgacgatagtataacctaaatctaatttggtgaaattataagataaaaaggctctagttttaccatttgcagtccccgatcaagactggaacagaatataacctctcagattgcggagagaagttctttattatccaacaaaactttttatgagcttgcttctccattggattttgttgtaatcaaactaacctacacctggagaaagagaaaacctcttttaactgaatgtcacacacatgtatatatattcagaaaaccaattgaccccaacgaaaacacactcgcgagaaacaaaataagaccaataaaaaaacctaagcatatgaagtaggaattccttgcgattgaactacatgcaagaatatgaagtgaattgcacacacaaatttgtaaaccaaacaaatcaatcaatcatcatgtgataaattaaatctcgatgaacaaaaaccaacatacatctcaaataatcaccataaactcgaacaaagaggagagaataaaaaactgaaggaaatctagtagtggatttaccttttgaaagttgaaagtttgttagcgagtcgctagctagggtttatagctttactcttttgtaccgcgatggcgcgatatatatgggagatcagttaagataaggactgcgcgtttacgcgttccaaaaaataaatacataaaatagattcgttaaatcaaaacttggattaaataattaagatgcgtagataattctgataaagtagtacgcacgcattttcaaaataaaacttgcaaaaaccttaagagtaaagcgttaagacttatttgatacttgattcacaagtaacgacgagagaaacctaaaatctccaacacaaggaaggtgctgaaataaggaatggagaagtaaaaagactaatgatttatgattcatgcattcaaacaacatccctgaaactaattcgaactttagaagccaaagcggcagctttctcttcttaagttcggattcc

SEQ ID NO: 35239 - DNA, 2106 bp, Arabidopsis thaliana landsberg
tttgaaagaaacggttctcctctcccaacaaaaccgcaacttgatatgatcttagtagagaaagattcatggatttcaactgaagataatgactcagagattcgtttattgaattcaagaaccaacggaaacgttcatcacaagtctccgaaactagctctattcgcaacaaacatcacaaattcggagttcgacagagctaaatccgcaggatttgcagatacggtaataatgaaaccgttaagagcaagcatgattggggcgtgtctgcaacaagttctcgagctgagaaaaacaagacaacaacatccagaaggatcatcacccgcaactctcaagagcttgcttacagggaagaagattcttgtggttgatgataatatagttaacaggagagtagctgcaggagctctcaagaaatttggagcagaagtggtttgtgcagagagtggtcaagttgctttgggtttgcttcagattccacacactttcgatgcttgcttcatggatattcaaatgccacagatggacgggtaactaaatcacaactaatactatttttggattattcggtttttgaattgttcggtatgaaaaatttcccgccaaattataactgacttggtttggttcggattcggttaaaatcttttataaacttcattgattctcagatttgaagcaactcgtcagataagaatgatggagaaggaaactaaagagaagacaaatctcgaatggcatttaccgattctagcgatgactgcggatgtgatacacgcgacctacgaggaatgtctgaaaagtgggatggatggttacgtctccaaaccttttgaagaagagaatctctataaatccgttgccaaatcattcaaacctaatcctatctcaccttcgtcgtaatccaatcttccggcgagttttttttctctctccgcagccggaagagtggaccgattctgctgattgatatgcattttggtttctgtacatacagtaggttcacaatctagagattttgaaggtttttttttctttcaccgaagtaatgtagcttgccatgactagtgtatgttgttaaacgacaacgtctaagacgacggttcagtgttgatcttagcgtaagtattaatcccacgggatcgtttgtactgtatcagatttggttagtcgtttaaacattgtaatgttctaataataacttttccatatataacatcttcttataacttgagacgagaccattttgattcatcttttgagcttgtttagcaaccaaatcggttagctagttgaacgaagatcagagaaagagctcaaacaactcttcattagctatagctcagtcgacgacttgagctttcaaacaacagaaacagagcaaagcttaaaaacgactgcgttttactattggttcgtcgatctcactaaaccgagtgagataaccaaagccaatcaacaaccctttaatcggatctctcgatgtaatctataaaggatgagaagaattaggaacttgtccaagaagagtatataaaaaatatctgactttttgtttgttttttatatactctatcggcttattctatcagtttcggtaggaacgcaacgagatagtccagaatgaatttctcccgatttaggtagaattgggtcgctacgctgttaggttcgaatttaaaatgtcttccgaataataccaaggagtaattagaccgcctgcatttctaactaccatgtaaactaattaagtcaaatcacaactgacagacttccgaaacaaatgtgtttttgtgtccaaagataatcgaattcggtttaggaattttactatttactaaaacttcccctactactaaactacaaatgcttgagtgttaattttttttttttcaaaatatgtattaaacaaatttaatataaaattaataattataatgttatgatttttttggttttagacttgaacatttgatgtttagaagaaaaaaactatgtttcctacaataaataacaaagattatatatgaaattgcatattttaattgtaattttttatataattaactgagtgaaatatgtgtgagtaacactaatgataaa

SEQ ID NO: 35240 - DNA, 1556 bp, Arabidopsis thaliana landsberg
tgccgttgtcgtacttagggtgtcaatcctaaggggtatgatgcaaacagatgatatgtgatcagaagtcactaagtcaagccaagcgataacagtattggggtttctaatagtcctaagcgaacatgcaaaaaacagaaacaataacagaattactaaaatcactcgaccacaacaggctgatgccagaagtaagatgtggtcgagtaacaggtcgagtaaaagacacgatttgaaccagctatactcgactgcacagtctgtagccagacactgggtgtggtcgagtatactggtcgagtaacagacaggaaacgagacaactgtactcgactgcacagtctgttgccagacactgggcgtggtcgagtaagttggtcgagtaattgcaaaaactaacaaacaagcaatgagaacgattaagcgataacgataaaacagagaaatcaaatagacgagaaattcctaaggatggggtaatcgaatagagtggtatcctagcctatccgaatggttaacaagcgcaatcaagctatccctagacaacaggctcgacaacagatcaattcactcccatgatagaaatcctcaagcaaagctagcccagactaattcccattaacggaatctaactatacaggcaataaaaattgactgataaagtcaataaacgctctaaacggccaatcccttgggatagagacaaatatctcaggaactagtggatcaagcattccatcgaacaccttctgggtgcgggaatgcttgggatcgaattccagttgattagaaagaaataagcagtaaacacaactagtcctgaagggattcaatcaattctaaaacttaaccattctacagactacgaattccacaactactctatcccatccttaagaattctaagtcactactcagacaacatgctcaaagacataaacgcagataaatgataatattgcataagtaagagaaaaaagtagggaaacaagatgacaaatgaaatcaaatgcggaatctgaataacttggaaaaatctcgaattacaggttgcagaagtaaaagcggcgcacgagagaaaacagaaaataaaactgaagcaaaaaaactcaatgtcgactagatgtcctggtacagaatcctaagacatctatttatacaaaacgaaataaaataatagtagacgagccaataacctaatcgcccggcccatagaatgataatgggccgagatgggcttcgtgatccgatggaggtccaggccgcttcaaaacactttgtcttctcctcttctcttccttgtgctcagcttgtttggttgagtgcggatttgagtagactatgaagatgtgatcgagtgcccggtcgagtgatggtgttggtggtgagtgatgatactcgaccagggggtcgagtaacgtggtagagtgaacggccgagtgtggtcaggtggtgtggcaaaggtatactcgaccaggggggacgagtggcgtcatcgagtggcctgagctgaggttactcgacccccgggtcgagtagatgggaagaatggctcc

SEQ ID NO: 35241 - DNA, 4711 bp, Arabidopsis thaliana landsberg
aagatgatttggggcggcgggattttcgacagccaccgtttacagtaacattgcggagggaaccacctttggtccaatatctgcggcagcctttgcagaagtagcgaggctgagtgaggctatagttgttgtagtaacagaactttgtgttagaggatccacatcttggacaactcggcgtgatctccgcgtttgcgtttgcgtttggccgccatataaacgatgatgtcaaggcctctgctctctccatatctctctcgctcttctttagtctatcggaatacgaatgtattatatacgcatgcatgaatgtgtgggtgagagtttgtgcatgtggagagtttgagacgcgtggaggctagagagtggatgaagtttgggggagcaaatgcctcgtaagggtgcactcactgttgcttcttgggggagacagggttaagggttttgaatctttgatagatatttaaatactagtatttgttttttttatcataagatatgaataagaaaatagatcgtcttggagattgtttcgaagggaactaagaagcctatggcctctttggagagatgggttattgggtgtacattgagctatttgtacggcttagtttatggatgctgcacgattaatatatgtcttttaaaattaatagaatgtacttacaatcatattaagtaaaatattcatatcaataagtactaaaccatgagttatctatattgcaacattttctattcacattatattcgcgagaggacgatgaatatttggccagagtcgttaagaatcagaacttgtagataacgaatcatagatagtcataattatataatagtatatagtatgaaaatggtatgtaaggtatgcgtaacgatctgtgaatagaaactatagaacgagaaggtgaaacaagaagacacaagttttgaagaacaaggactgtctctatttgtctacttatttgacttgaatttatttgatttattaacccacagaaaaatggggattggaaaggaaaatctgaatgggataaagagcttcttggatcatgtaaatattggcaatctccaagaattctatgtagtaggtcttacgtttttctatatatttgtattctaaaattcctgaaattagatcaccatcacactacatgttggttttagagtaatagctttacttctcaccaaaaaaaaaaaaaagagagcaatagctctacatgagaaactctttgcacattgcacaaaaaaagaaactcttgcaaaacttggtgaacattgacgataaattttgttttagaatatataggaacattcatcagaaagtcttgcataaacatgatgaacaacaatgattcagattgttatatagcatatcaaacattcgatttgctattaggcctactaagtctccattgcgtactctcatcaacaaccatctcaatttcattttcataacccattttgcacttgaactctttcagattcgcctcccacacactataactcgagttcttcgctttaacatccaaagaaacctccttcttcgtcaccaatgtattcgcataactctcgaatggaacaatcttttcccgtaacaaagatctcctctggggatcactactctcttttctcgcctcatccaaccactcttttgcttgctcaagcttagcccaaaagcaagtatcttgcgttgtgctcgcgtatctgcttctcacacactcctcaggcactttaactcctttctgccatttatcaatcacctcataccttttaggtctattcccctccaagtaatgcccgccagtctttatatctctgtttttgtagaaattcgcaatgtcgagtggctcggctaagagttgataaaattgagatgcgtaaatccatttctttcctaaatgaaaatcaaaaggtaactcattcgtctccaccattttaatcactgtgtcccaaaacttagctagtcttatgcgactcatgttcactttaaagtctctcttcaacgaatatcgtttgaagaaatcgtagtaacctagctgctcttctgatgcatcgcaacgatctttgtaccattgaatctcgagtcttgctggcaagacactagcaagctcattggctaactcagctgacctcagaataggagcccgaacaattcttgtagctgtttctatacattctttgactaaaacgccacttgtgtcatcgttagagaaacctagagcttcaacggctaacgcaacaccagcttggtagctattgtcggggatactcccaccaagaaagcttctagatttaagaaacatgtgtgaaagtgtgaacacatagtgtccgtacctctgatgttcctcggtgttttgagttgctgtggtgttgaggatattaaacatcagacgaacagaaccagcgttgtctagacagacacctcctttgtcggaacagaacaagtaagttccaaagggccagaattgttcattgctgcttctaggaacgaggtcgtggatggagaccacgtggcagaagttgtgtgctaaacgtgatcgtgaaattgaggtggagagagattggtttccgagcagaggagagccaaaggtgatacaaaagacgcggaatgacggcggagaagattgagatagaagccaaagtgcggtgaaagcggccaatgcgccgccggttgaatggccggttatcaccaccagctttttacctaacaattccaattccaatccttccttgatctgcacgttaatgcagtcgacgttactgtaaattggttgactaacaagaacaaaactgattatagattaccttccttctgagtgtacaatttcctctaataatgtaaactgatttagagactaaatttgccaattacttggtttaaccaaatttgaataaaaatcagttaagacacctctctagacttaccatttttacaacttatatctacattaatggtcacttcttgttttttctactcatcaaaaccaataggaacttgtttttgttcaagattttcatatccttagagacaaaacaaaaacaaaaagtattcgacgaaaaagggaataaaatacatgatggtgacacaataatcatgggttaaaaactttttgagcgcacatttataaacttcgccgaggtgtgttaaagcataaagcgtaaagctaccaattccattaacattttttgttttttttggtgtcaaaaataccaatgacgtttcactcactaattagtaaattttttaaatcacttgggcggacggacgtgatggcatacaaaccaaactttcaattgacttgcttatgatatccaaaggtcgcgacaatgacatattccaaatggtggatttggaataattgtgtccacgaatctttttagaatttcttacaagaaaataatttttatttattatctattgtctattgcctattggggtaggtggtggtgatagtttataataatcttttaaagggacaaaaagaacctccatttggattataattcatcaaaattcagagggcagagatatttaaataaaaaatagtaatgatcatcagttctactaaaaagtactaaaatacgtaaaaaaaatagtaactttaataggtaaaattcgttttcgcaaatccaaacgaataaaacttatgatagaattttgttttttttaaaaatcctttgtgaaataatttcccatattagcatttaatgatttttgtatttttctctcgaggtattattaattgaaattcaaatatccacatgccttgaagataataaataggttaaattgcatccaatagaaagaaaaaaaaacagaggaagagaaaacaaacctttaactgaagaaagagtttgagtatggcagcgtcgaccataggtagaggttcatcggaggataagccggggaaaagaacatctccggtgactggcaagcccacaagattccccaactgaatcatcgataccgccggtatagcaacgtatgtaatcccggcgatgtcatggatctttatactcccgttgcaatttgcggtgttgcatgaactccaagaatcggtaaataaaggagtcgatatcattaccgaagcttgcaactcactcgtctcgaatcgacaatcgtccatgattggatatcgagtagagagttgcacaacgatgatgtttatgaagttgtaaatatattacaagcaaaaagaaattatctatgtatcttcttggcttgctcctatgtaatttcttggttttggtctttgctaagacgtcttcttcaaagtctcttactttaacatcataatttagtaaaattgtactggttttataaaataataataaagaaatgctgtgaaaggtaggtccattctcattttttaatcattgtgtgtagaggacaaaaaaatatgtaaatatatagtagaagaaaatgcgaatcaaagcatgtgatcctatgtaatcggaatggtttagacttgagcataaattgacaacttttgatatgcagaaactttgggaagaggttatctatctatctttcatggaaattgcagagaaatcaacctacatttgactcagacattttgaagtttttttggctaagcttttaaaaggaaccaattactttcagtttcagcttaacatgatatagttatacaatttggcccatataagtcctacaagttagacccaccatgacttgaggagattttta

SEQ ID NO: 35242 - DNA, 656 bp, Arabidopsis thaliana landsberg
  unsure (1)..(656): unsure at all n locations
aaggctagggattctaaagggtatagcttcagctcttaatgtcttacacacagaagctacacaaggtgttctacacagagatatcaaagcttctaatgaaatgtaagacacatacttcacaggggggttaggaggttttggtatggctaggtttcatgaccatggagcaaatccaacaacaacaggagctgttggaacagtaggatacatggcacctgagctaacatcaatgggagcttcgactaaaaccgatgtatacgcatatggtgcattgatccttgaagtaacttgtgggagaannnnnnnnnnnnnnnnnnnnnnnnnnnnnnnncagcttctggtgaaatgggtttgtgattgctggaaaaggaaagatttaatcagtgctcgagatcccaaactgagtggagaattgagacctcaaatcgagatggtattgaaattagggttgctttgcacgaatcttgtgccggaatcgagacctgacatggtaaaagttgtgcagtaccttgacagacaggtttcgttgccggatttctcaccagattcaccgggaattgggattgttactccggtattggtcggaggaaactccaccgtgatctctaacattacatctccggtgactgagtttattactcactcgattcaatacg

SEQ ID NO: 35243 - DNA, 5163 bp, Arabidopsis thaliana landsberg
tttcttcttacataaagacacaacgtgaacttagaacctgaaacagagattaaaaataaatccattcgctacgagctagaagattctgcttcattgctccaccagaagctaaccgagagactcattgttaaggacctgacatagtgccaccatttgggagggatgtacaacatttcaccttcttctagaatacaatccataaactccaactccatggcctttgggaactcggtttcgtcgatattgtctagatcaaccttcaaccatagtttgaaaccacccagttttggaacagaagaatcgagtcagctttcggttgtatgtttaatccaaaaaatgagatttgacttcggaatgaaaaagcttacctgactagagttgcagagcattgtctcagagtaagggtaaagttcgtcttgcaggaaggatgggtaaagccttatatacttcttgccaacaacctgaagaacagatgatatcaaaacttcagtagaaggagaaagcatctaagtaaagaagtttccgtaaactagaaacatatgaattgcaggccaaacgatttctttggttagtcaaagagtcatcaaacttcaatccagcgagaagatcaggctttattatgcaagaacatcaaagaagaaaaaggttgttaaacacttacagaacatacatatatatatattggatagcattaaagacagcgagcacagacaagagccatgctcagctcacgtaaggaaaagatctttcaccgtagttacctgagcaagtatattatgatgtggatcatggtgtaacggagtaactgtcccagccgggccaaaccatgcattaagtgattggagttccccaccaccgacaaaacagtaatcaggaatacatatatcatctctcagttcatttatctgcccattcgtgttaaaccaatagccataggtttagtatgacacacaccgagtacagacaaacatatacatcaaacatctcggtacttatatacctgatcaaacaaaggatgctgggcaagataagtaggctccattggagacgatttattggtccgcatccgttcaaggaacttagaaaatgtcacaagctcttgcttccaatcagaacacaaatagtttttccccacctgaatagcattttaaacttcaccagctttcagctacggaaaaaattattctgatccaacccatcttcttattagctcagactaaatagtggtaataagactcatatctctatgaagcaaaaatgagaaatcttacgctcgtgaaattgtcatgttcttattctgattttatgtgataatctaacctagatacaaatcttatttcaaacctagaccctaaacccttttatcatacagttgacacgactctatgagattcaacattcttaagaagaaccctaaaaaaatatggacatggcaacttagagcagcgtaggagccaactaaagctaaaaccatcgtttaatgactactaatcaacactcacaagctaactaagaactaagtgaagaaatgatggctttcacctccacgggaacggtgcggttaccagcaacagcattgaggtagtccaagtgattccacttggtcctggctggccaatgagccatagaattggttataacaactggtgtacctggcagataataatcacgcagaaacccctccaaagataaaccagacctcttctctactcttttacaagttaaagacctgcaaggtagaatcttaaggacctgcaagtttcaacaacaacaacaacacaaaactaaatcaacacgaaacaattcaaagtctgattctcttcacagcacatctccattttcatttagagcttatcgaggtttcaagatatgagtcttacaagtaattgtagattagccaaaacatgtctcacctcattgacgtcgacgggaacttccgggaccaatctctcacctttgaaatctccagaagcttcttcaagactcttcgtcatcttacgagcttcagaggagaccaacaaaacagaatcatgaagatccttgcggagaagcatacctcccatgataagacccatatcaagcgcaccaagcgcctcaccaaactcgccggcggcgaaatggattttagctacgtggagacaagccattgagtaagcgtcgcgccaaacggggagaaccgagtgccacggaccagagtgaagttgctcccaagccatatcacgcgccgcctccgccgcgctttggtcaccggccaccgctaacaccgccatgcgagcataagcgtaacccccttcagcagaaatcgattgcagcagagtttgcgattcggcgtcaagcgtcggagttgggagacggaggttgttgtggtctccggaggaagcggtggtagctcctgacattgggatggatcgggtcgggttttccggtcgggtcgggtcgggttaagtggtatgtggtgggagatattttagagtgatgatgagttggggaaagtgtaagcgaaaaagtggaaagggaaagaaagatattttgaagtgatgattaggatcagatatttttcgtatctataactgtattctttctaattttgaaaacgaaccctccaaaatagtacaatttattcaaccactcctcttgtttatttctttctattttggataaatcttttcataaacccatagaataaaaaaaatcaaaatactattttcaacatagaataaacctaaatttatgctctgaatcggttttataatatgcctacgtttagttttattttgtattgtgtattttatgctaaaatctatgtttgtggttttagtttggtagataagaattatagtattatgttgttgattggtgtgacatacacattttaatttgttaacttgggtcaaaatatcatttgttaattgagcacttacaaaatggatgctcaattaacaaatgaaatctcacataaaaacagtcctaatttttgttaacttttgggtcaaaatatttttttcccgctgggcctagtaaaagcactctttacatatgattttttttccagtgggcttactgcaaacacactatgctttatgacactgatattccaaaaattaaaatgcaatgaaacattcaagtcccaagtattttgttttgcttatgctatgctttattggaaatcaattcataaaatgtaaacttgacacagaaataatattgaatttttttttttgaccgcgaaataatattgaaattatactcagtaaattgtttataagcagaaatggccctaacaaaatgaagaccacaagcccaaaataatatatggttcagtaatagtatgtttacaagttaaaaaaatatgtaaacatggttactcaaacaccttcccactatgagccataaccactacaatcccatgcttggccagtttggcccataggccatagccgactctctttctaattaaaaaaatcaaataattaaaattcagtggcagccattgtaaataagtctcaactacaagatttatttcacaaaatggctgcaaaaatgtatatgtagatcatttgttttaaaaataaacatgttgatgttgcaatttactattgaatatgaaagaaaaagaaataattctatattttacgatttaacccaacaaaaagtgtaagcgacccatagcgacacaactttgtttttgtaaatatatatacacattgtaagtcaacttttcgctcttaaatttttatgcttacgaaaaaagcttaaagattatattatattaaaagataaaaacaattgaagacattaaaaaaactatattgtgtaaactagttgaaataggttactcacaagtcacaactctcctcttcttttctttttataagataaatagtcctagcctaaaaaaaaaactagtcctagcctcctcctaggcattcgaatactcggattgaattccaatcatattcattcgaatttccagattttggattttgaagtttaggtttcgtttggatattttaaatgtttgatttggtttcgagtcatgttcggtcggttatggttttcatatttagaactggtgataattcaaaaatatttagatcattagatagatacggggaatccatggatacggttagtattggttacattcttccttctttaattatacataatatcttggagagatgcatatatgagatatgtttaagtttcgattaagctggtgaaaacaaaactactcgcaaaaattggtaactcgtttttatcctcatattgaagatattatgtggtcctcaaaatcaggaaacctatgcccgcaaggccgcaactaccaagctcctttgtcgaaaacatgcaagagattctttcattctaagtttctaactttctaagcccgggtagtaacccaagttttatttcttccagattttgggcttttctagtggaccctctctacttagggctttctaatactttggtagcagaaaggtagttaatccagcaattagtgtgttctaggtgttttttcttttcttttctaatcatcttattagattaaaatgatccccttctatattagctgtgaagatatatctttttttttgtcaagttgagagctatactttatgagtttacttttttgtttatccactgaaaactgaaactgtataataaatatattgtaaaacatttactgcatattaataattatgtttttgttgatgtatctattaaacatgatgttgagttacgttcccattttgtagttggtttacctcaattgaagcatcgggttacgcagagcgcctggctgagctagagggttcaatacaaaaaaagaagtgggaaagagagttcgacgtgctttacattctacgcatggaatatttagttgtgatgtgtagcatatgatagaactagttagtttatttttttgttaaaaggctttagctagttagtttagctgaaaacaattttttacccattttatttcactaataaatgtatatgaaagggttatacatatattgatatatatatatatgtatatttttatattacatccaaatttccattagctaattaattgacacctatgagcaaatacgtcattcttcattcgttgccctatgtattaaaattgcatcattcttcattggtggatta

SEQ ID NO: 35244 - DNA, 1630 bp, Arabidopsis thaliana landsberg
  unsure (1)..(1630): unsure at all n locations
ctctctttttaagactctactttgattaatatgagaatgtatttattgattatttgttacttaacagagggcatgttagtcatttatatatatatgagaatgtgaatgatccatcgaaatgatcaaactaacaaagctccatccaaatgatgcatttagatgaattagcaaatgatcaaacaaacagggcataaatcatcttctggttataagcttaacaagctcaatagcttcttttaatcttctctcactcttttcttttccagtctgtcccttaacgttcctgaaatcatacacaatatctttagattagaacatgtttaattcatactttccttatctggatctgacccaaagtttctagacaagaaaacgggaaagacgaaaaactaaccgtttctcgatgtttgccttacgagttagctcctcaactaaggcgtgtaaccgttttaccagtgcaggaagctttcgaactgcttctacgcctttatggctactgcatattttcttcagaacatctgatgcaatgaaatatgcttcttctttgttcctgaatcgagaaaaacaacgcaggaatgagaaaatatgaaacttcaacttaaaaagaagacttgagaactaaatgaagacctgagtagttcccagaagattgtctgaatggaacctttcgtgttgattagctcatctgccatttgtggataacaagcaagatgtcccaaagttgatagtgcatgttttgaaacttgttgatcagggatgcttctgcttgcagaccggatcaatgttagcaacttgtctatagctccagcttccacaagctcttcacagcatttgtcagagtatttggttgccgattctgtagaggaaacatgttatgggttgttcacatggttctgtaaataacggaagctgagaaactcacccaaagtttcacaaatgtgaagaatgttgtggatgtttttcatgctcagtagttccgaaagcgcagaaagaagcttgtttatcaaccgtttcttgtcatctatgtttgctgcagaagtttgcattcgcactctcagatccagaacttgagccttcgatgctttgcgcgtgagataacctctccagtgtgactgagatatataagggtaaaatgaaacttgaaactgttagttaaaaagaatattactgaaagtgcaggacaagagataaaagtagctttggtcatatcttacttgaatcatgacaatgttatgtctttccacagaagtttttcgtctggcaaataaacctcgaatatgactctgtattaagactgctgattttattctcatattctttgaatggagaaattctctccaccaacgctgcactttaatgacggaatgtagcatttttgtcatcccaaagctgtgttgtggaagtcttgaaacgccttcgtcaactctcaatagagagtagaagctcctacgatatttcaatttgagtaaccattagtaagctgaagaaagcataatcccagccagaaacaattatatgcaatcagctaaaagtaagatactgaagaaatagcttaatcaccttgaagcctgcttcgaacaatttgtcccctaacaagccgntgaacctgtgcatgcttgcaacgatgaaa

SEQ ID NO: 35245 - DNA, 2607 bp, Arabidopsis thaliana landsberg
atgtcttcatctgcactcgagtatatgtcgctgaaaaatttgttcatagctgcatctccatcaagcttctcatccttctcctgcgaaattcaaaagtgataagcagaaagaacaaagtacagcaaagcctctagtgttaaggatgagaagttagcgtttgtggaacctgtttcttcacttcagcttccaacttgtcccagtcttttgctggcttagaagatgggtacactggtctctgcgacagcgctgcatatgcacataaaatcaaatgagaagagagagagaccactttgggttcagtttgtttaaggttttacgattgtggttcagaataaaatagtaaacgtaagctggtatcttctgagacaaacctgatgagacattgggtttgggcaaaacactttgccctttaccatattcaagggaggcccaggtgattatctctgctttcgcaagacggatctcaactttggtcgacaatacttcaaatctgcacttctctggtattatctgaaaaacacccatgaagaaggatttagtaaaagtgtgtgtgaaaacaccgtaattacatatgtcaaataaaatataccttcccgaacaatctcggctggagatgataagcttcctctccagcaacatcaatgacaacactcagctgcaccaaaataaagccaagatagacatctcaaatcaatacagagtgttaaattacaaagagagatagtttctgaagttcagataaaagtcatgaattctctgattgaaggatactcacaatctgctcaccaaactcgacagttacgttctccttaggtacttttttggcgaaaattgtcaccaccgcttcttctggtttctggtagaactcgtgcctgttgagcaataaagttatgagtataaaatgattctggaaattaaagaagaatttacatgttagataaccagactacctgaacatcggtttggcaggtgctgcaggaattggaacaggaggagcatcagcttccgttgctagtggtgttgtagagcttgaaggcaaactcggtggcatcggctgaaccaaatctttctcttcttctgaacagagatacaaagactatatcaaaattatagccctaggcgcagacaaatacccaaaatcgtttagtaactaatttcttaagctatggagttgatgtaacatacctgcaatacgaagatcgcattcatctatcatcttcttaaactttggttcattcggtgcaacaaaagctcccttttccaggaactgctttagcagtgctatattcttctagcttcatacaagcagtgctgcgaacacagtagcaaagaatcagaagatagaattataattccaatcaaatttgaacataacatcaaatcattcactacagagagatggtgaaaatatcatacccctttctgagataggcttttgccaacgttggctccaactcaatggctttgttcgcatctacaacagcttctgctcatagaaaccacaaaaagataaaatatcaaatcaaatcatcaaacaacaacaattcaatcaaagtacagtaactacaattacaattactcaaataagttttcttatccgaatcaacaacctcacaaaagaaaccctaaaactaaaactaaaccaaaccaataacaaaaatcaaaactttgttccactatcaacagatcgaattaaagtaacgacaaaagaacaagacccagaactccaaaagcgtcaacgaagcaatacatctaataaagtttcaatctttaacgatgatattaacggtaaggaagagagttatatttataccagtgaagttatcgattttgatgttggcctgagcacgatcggcgaagaaggcggcgcaattgggatccaagtcaatggctttggagtataagtcaacagcaacatcgaagtcatcatctagaaaagcttctttagctttctctgctaattccttcgccattgattcttatcagaggatttgagaaaacacaaacaagtcagagagagagagattatagagaaagagaccgattctattcctctaggctttttttttttttgctgtgtttgggattttttttttctttgagtaagaacgttttaatacctctactaggtcatataaccaaaaaaaaagaaggtaatttccttttgattttattttttaacataagattgattcttgataagtccagattttttaacaaataaattagttgacaaaagaataatactgaaaaaaggaaagaaaactaatggtaaagatatttatagagaactacaataatttaaaataatcattttataatcattttgtttatatcgtaatcgtttactcatagtttagcaaatacaatgtgatttgtgaatttagactatgatatattttaacaacttatattttatatattgagtagattaggatccgtcccatacacagatttaagtattttaagttgataataatctagtaaagttaaaatatcaattatcaaacttttgccaaatatttacctttaaaaaatttttgcaacctcgaaaaatccatctaaaatatgtacagatatatttgtcgtgattactgttacaacgtc

SEQ ID NO: 35246 - DNA, 4130 bp, Arabidopsis thaliana landsberg
gaagaagtactcgatcacaaattttcacttgaccacaatgttttctttcgacctcctgcaacagagccactcaggttcaccgacattttactcgaccgacggagctctactcgacctcttgtactcgacctcagcctgattcaatctaagccactctattcaacccgtgaaagagaaacttggaaagggttaaggttactcgagtacttgattgtacttgtccgtttaggtctatattgtctgttgctaacgattttggctttattgttctctttgaaactaacctattgatattggaattttgacttctaagtcttttgcatgataatcatgagtaattacagtggcagttcttcagttgatcctgactacaacatggatgagaaagagtcatcgtcttcaaggccagagagagaacaaagagaatatgatagtttcagaagaaacgctgagatagcctgtgggaagcaataacagagaggtatgacagagatgtatgagcttatagatgaggatctggaagacgagtacatgcctgagcttgctcgcagagctaccaaacttctgcacaaacctgatgtattgcccgctgaggaatatattaggctcttcaaattaaatgagttttgtagcacaaggtatccatgctcgaccacgcttgcacaacttggattgttggaggatgttcaacacctataccatagtagcatatgaagaagagacaattcaattcctataccacactcgaccttctctgcgctgccaaaatcgagttccccgcctcgttcaccgtcgaagtctcaagaactactcggttacaaacgcaagagtcgaccaccaaattgtggttccatcctcaccaattctgactcgccgaagaagtactcgatcacaaattttcacttgaccacaagttttcactcgacctcctgcaacagagccactcaacttcaccgacattttactcgaccgacggagctctactcgacctcttgtactcgacctcagcctgattcaatctaagccactctattcaacccgtgaaagagaaacttggaaagggttaaggttactcgagtacttgattgtacttgtccgtttaggtctatattgtctgttgctaacgattttggctttattgttctctttgaaactaacctattgatattggaattttgacttctaagtcttttgcatgataatcatgagtaattacagtggcagttcttcagttgatcctgactacaacatggatgagaaagagtcatcgtcttcaaggccagagagagaacaaagagaatatgatagtttcagaagaaacgctgagatagcctgtgggaagcaataacagagaggtatgacagagatgtatgagcttatagatgaggatctggaagacgagtacatgcctgagcttgctcgcagagctaccaaacttctgcacaaacctgatgtattgcccgctgaggaatatattaggctcttcaaattaaatgagttttgtagcacaaggtatccatgctcgaccacgcttgcacaacttggattgttggaggatgttcaacacctataccatagtagcatatgaagaagagacaattcaattcctctccacactgcaagtggagctctaccaaggtatgacctctgatgagttgaattgtgaaggattgggattcttgagattctaggtgtatggtcatgagtataggttatcaatcaagcgcttggaaggattgtttggtttccccagtggaacgggtactatgcccaagtatgatagagaagagttgaaagatttagggatcaccattggcaactctgtaccggtgaattcttctaggtcaaagagcaatcatatacgtagccctgtcatcaggtacttccggcgttctatagccaatgtcctctactcccgagagatcatagggattgttaccaattctgatatggagatgatcgatatggctctcaaaggcactctccgccaaaccaagaacaaaatgtctctccaaggtgaaatcaatgacacacctctctctatacttcttctgatccacatgtgtggattcaaaagataggctgtcagcaataaccacaagagagcacgaggtgctctatgcatcggtggtgttgtgacaccgattcttatcgcttgtggagtcccaatcacatctgatggactcgagccacaggcaatgggtatcgagcatctacgtcactgcgaattcctggagttcgcaatggttggcgacttgcaccagttcaggtttgagcactctacagataagagagctagcatccttctccctagccctgaggttacacggataatagagggagataacattgattttcggcctgagattggaaacctctactatgagaacgctccgccattggatgaggatgatcttatagaagaagctgctgaggatgggatggatgaagacagagtagtggagttcgacactagcatgtatcattttgatgaacatgtacctccagcgagggagagcaaatgctttagtgaggctcataggaacaacagtaagctgcagaggtggtgcaagaagcaggataagctgctcgccaagtgtttcaagactatcaagtttctgacagataagttgagctgttcctcttctactacaactattttgcagggacatcctcctctagagatgccatcgaggagatttgatgagcctgagcacacgcctgagcacacgcctgagcttagtgagcagagagtctcacttgtcccggctaggcattcgtcattcgactcccgggagcactagagaagaaggatggctacactcactcgatctagcagcagatcacgcctaattcactcgaggagatcactagaccgcggtgctggccgcagcagaagaagagaggtcgagtatcctcagagcggtgctggccgccaaagagctgatgaggtcgagtacccacctactgaagctgataaaaaacagggcggcttgtctatgtccttgagagcaatcacaagcagccattgatgaccaactccgttcactcttcgactgaggtaagcgtctcactttaccattgtattatatcatctcttgtaatttgttctttattttttttttatgattggatttgtcctgagtactgtcttgcaagtttattcacacaatatactgtgtgatttaagtttgggggagggctcaggaagtgtgataagtgtgtattttgcatgttttgagcatccatttgtcatcactttagcatcatatcatcactgttttataccatttctgatcatttgacatcactttgcatgtttaggatagttttgcatgcatgttgcataattgtgttgtttttaggtgattcagagctgttgacaagctaattggatgatgcggacctgatcatgtcaaaccactcgacccgcaggtcgagtagacgcttcatgacctcaacagaacactcgaccccctgttcgagtagaggccttcaccatttcacctcataactcgcccccgtggcgagtgtctttacctccaccacctgaccatcactcgatctcatcactcgaccccgaggtcgagtgtcttcacctccaccacctgaccgtcactcgatctcatcactcaacccctaggacgagtgtcttcacctacaccacctgaccatcactcgatcacgtcactccacctagaagtcgtgtatctccatcaccaccactcgactacatactcgatggcgagctccagagtcttctccattccgaactcaactataccctcgagcacaaggaagaaaagaagactccagctaatcactcgacctctcacttgaccacctgggtcgagtactgatcttaatccgtcccaatactgcgtcgttttgagtattagggtttcggaaatatttcgctataagtagcatgtactttatattttcgtgaatgtaagttttattccgcagacactgtgttcttgacattttgtaatctgaatttctcttaatctattcagtatttagtattcagtatttgttcttgattttgtttactgttgttcatcttgttatcattctgctattactctgttgctatcatgttttcattttattcaatttttattctt

SEQ ID NO: 35247 - DNA, 3444 bp, Arabidopsis thaliana landsberg
gaagacacggagagcctcagtgaatttcccagttgttgtagctttgtattcggatttgagcttctcgtctagcggagagagagcataaacaagagctggtgggctacggacgttgggactggaagactcgctccatccacgctcaatggcaagtggaaccacaggacatgaagaaaaagcacgcagatagctatggctgccattgaacagatctagaaacatcgatttcaaaggtgtaaagttcttgataccaagctgtctgtggagcagacgcattgcagtgtcgaagcttcccgctgcggcttgctcagcagcaagagaagatttctggctccagctctgacttacgggcataccttggggaggtgtcacaaaaacagatgaacgtgcattagcagaggctttaggagtgtcaagctctggtgggagcaccaagtcttcaagtccccatccaccttcctcgtcgtcttcttcttcacctgcttctgcaccatccaatatggcttcgatgtctgtgttctccattccatcaacatcgaatttgtcaagtccctcaccccagtcgccttcaacatcttcttcttcttcatcaacagcccctctgtttgcactctcaaagtctccttcaaataatccttttcatcattctcagaaaaggcaattcaccaccacacatgatgggagacggtggcattaaaagcgatggagtcttcccttcaggcaatgaaggcacattgtctcctagctcaattgctagtcgctcagcaatgtcagttaaaccatgaaccgaagctgtgatataagctagaggcaaatgaccagcattctctagtatcttaacacgctctttaacatctcctaggtagagtgcattgtgaaactgacccattacattgttcttcacctctgcaatcttcatcaactttgacagcttgtctaaattgccagtaatgagatatagaaaagataacctctcaaagttctttgtctgctggtacgcaaactcaacaattctagaatttccttgacgaagagcttccactccgagtctataccagtggtctttctcattaatctctgtagcggatgcaacagctacactgatgttgccactttcaagagccaagttgaatcggatcctctcgtcttcaacaaagtgtagggcaacttcaggaaatcctttctgctgaagataagcgatcatagcctgtccacatagctgggagttctttatcatgctcatgacatgatcatatttctttctcagtagtgcaagcttgaaaatgtattcggttgcattaatggtgaaagccctgtttttcccatcccggtccaagcaaaagattgtatttccagaaaccttggtgatgtagattgggacatccagggttctgatgattccactatctccattaggcagacagtacttgatgtggttcagagtagtgtaaatgaagacaccattgtcgtcccatgctccacttttcacacgtattgtctcatgaagcgtgcactgtaggacaagttttttgctcgcaataatgatagtatgtttgctgagcaaagcaacactctccatatcgttagaccaaacaacgtacctaacaaacggtgtctgaagctcaccaagaacaagcctttgttgaaggtcaaatataaccactttatcctcagatctacaaagcaaatttccagtcccagcataaaagatagcatctgtgggaataggtaaagaactctttttaaccacctcattctttagattcttcactagcacctggctggtgcttttctccagaacagcaaaccgatttcgagcaatgaacaccgtagaaccccctgtccccctctttgcatcttgtacaacatcactcctgccaacgctatctttcggtatgatgtacaactcgtaagaaccaccatccagatctgagcagattaagactgcatttttctgtcggactgtaggataaagacttcggactttgattcaagcttggggtaccaggacgccgtataggaataacttgggaatctttttgagttgaatattcatagttccgcagaaatctatctttggcatagaataacgaatcaccactcaaagcaaatgcaggacgttctctctcaagtttgaaaacaatcataccattgtcatgtcctgctgcaagtagattaatctcagggtgaactgcaagaatccagaatcggtcatgctcacgacgaaaagtttggattccagttcgcttggtagcatcccagacacggatgcttttatcctcagagtttgacacgataatgtcctgttttgcatggaacataacggatgaaacgttattcatatgacctcgcaatgtatccacctcccaagctttagtttctgcaacaaaattgaaacgcatcagtacctcaatgattcataaaattaactttctgtgaagaagaagacagatatccataagaaataccattcatacgccacagctttacttggcggtcatcggcaccagagacaatgagaggaagtgtgggatgaaaagaagcccagttgactcctctatcatgaccttcaaggacgtacttaactatagcatcaactccaccaaaaagatcactattcatctgagtcaacttcatgatatcatcagcaggagatacagtcttcttcctaagagcaccaatatcccaaacacgaacagtctcatctaaggaagctaatacaacgaggtcttctttcggatggaaagaagcacacataatataatgattgtgaccagtcaatacaaaaacacaagtccgtgatagccagttccatatacgaataatctgatcgtcactaaaatggtcaaaatacaaaatctaatagaccttaaaagtgttcttatggtcaaaatacaaaagaaaatagagaaagtgacttatacattaacgagtcagcacctcaccttctccagaaaatcatgacatcagactgcgttcttccatagctttgattcatgtacgcacctagggttcaccaaaatcaatcgaatctttacgataacttgttcaaaacaacaaatctgtaacacatacatcatttgaacaacaaaagagatgctaaatcaattcaatataacagcaataaagatactctttgaagttcaccattccgttcttgtcccagtccatttcctctgcagacataggaatcaaaatcaatattcttggttcagtgaagaagaaagcttgagaagaagagggagggagtataagaataaaccaaatctcttcattgcaatccgcacggaggatcgttttcctgattcatcaatggctcagaccttctcctcgcggctaacatatccgtcattgttctcgtcgaggaacacaaatgtgtcaacaagcgtctcgaatgttggttccagctttggcattcccattgtccatttctatgtcatcaca

SEQ ID NO: 35248 - DNA, 2535 bp, Arabidopsis thaliana landsberg
tgaaaggcacgaaggcagagcacgccctcgccagagaagaagcttcgagcagccgtccaattagacattgagttccttccattgttgaagaagaaggctaaaatggtggaggagatgtggtagtacgatctgggacgttgttcgagctagatcttctcgattgttctatttgttgtaacgcactcaccattcctatctttcaggtcttctcttcttacttgacaactcagagttttgaatatttgttgtggtctatgattttggggaaaatgttgtttgcttttggtgattacagtgacttaactaaaaattcatgctttacaaatttcaatttcattacagtagttggatgattttggggaaaatgttgtttgtatctgaataactaagtattgtgagttttttgtgtctcagtgtgacaaaggacatatagcttgttcttcttgctgtactaatgtaagtaacaaatgcccttactgctctttggcaattggtaactatcggtctagaataatggagagagttgttgaagcattcattgtccgatgtcccattgttgctggagaagcgtcgagtaggaggctacgagttccctccattgatgaagaaaacggcgagaatggtggaagagatgtggttgtgccatctgggacgttgtcccagctagatcttctcgattgttctgtttgcagtaaagcactcaagattagtatctttcaggtcttgttactacttctcttcttcctggttgatttggagttttgaaaactgttatgatcttaggatcacgctgattagctagaaactcatgccttacaaatgtaaattgccttagagtaattagatgattcagaattctaaaactttgtggttgcattaggaagatgataattgaaggaaatgaagaatgtagtcatgtggttatgtgtgagcgttaccagtttagatttgtgtaagcttgtatttggttctagtttcatatgcctgtagtccgagttactaactctgtgtgacttgcttttcagtgtgacaatggacatgtagcttgctcttcttgctgtattgaactgaggtacaaatgcccatcctgctctctgcctattggtaactaccgatgcataataatggagaaagttgtcaaagcaatcattgttccttgccaaaacgccaaacatggctgcaccgagacattctcctatggcaacgagttagtccatgagaagaaatgcagcttcgctctgtgctattgtcctgcagataactgcaactacgcgggtgtgttcaaggatctctacagtcaatacgctgctaaccacggatccttatcgacaagtttcaggtggggccattccattcatgcatgcatgatcttcgagtcgaagagttatgtacttcagaaacatacagatggtccattggttgtgcttcagtgtttcaaggaaccacaaggattgtttttgactgtgaactgtatagcaccttctgctccagtagttggaaagttctcctatgagttatcctactcgacggcaggtaacactttgacgtttagatcgtcggagatgaatcggattcagaaagtgagcttccaaactccggagaaggacttcatgtttattcctgaatatatctttaatccgacgggtttgtttaagggtacttgtatttgtatccgcagcctagaagaagaagaagaagaagaagaagaagaagaagacaatgaagactaagaggaggaatgatcatatccttctaatgtatttcatatcactcacctgccgaagttctcagtctctcttttgttgtccttttgcttagttttgttccatgttgtgaggttgttctgtaatgaaggttatagtccttctgaaggactaggtttgattcttctaactttctctgatgatattcacatttggtgagaacgtttttgctagtctaaggaaaactcgttgatgtcgaaaatgattcaagaagtttatactatgttgttgtctttcccatctctgaatgtttcaggtaatcaatctccaccatgataacataaaaagcttaatagctttattgtttaaaacctggaaaggtttctaatcaaaagcatcaacgttttcaaaacaacatcaggtcttccgatgaaaatagaggaaattcattcccccaaaagacttcatcatccaccaaataatcattaatatcatattcttggttcatgatatggttagcttcgtcctccatgagaacagcttgttcaccaattgttgcaagttgacgcataaccgattcagatacaacttggtcgaagtttatcatttcagagccatacgtattatcatgcaccccaaaggctttacatgtatgttgtcccaaataagtggttctgtaaactggaggactgtcttggatcatctgcacccgctttgtagcatagcagttttggtcttttgcataggcacaaccccacgtaacccctgtaaattatcacacttgtaataacatgtctatccatagaacagagaagagcattgactctgtttt

SEQ ID NO: 35249 - DNA, 2094 bp, Arabidopsis thaliana landsberg
aaccatcctgtttcaaaacttaactcctttcgactataatagtcgaggacacaatcccaacaaatattttggtgggtaagtaaataaatcatgtttagtcataattgtaagtttcatttttgtccttattagtcaaaatacttttaacctataaagaagttgattgtaatgatgcagaattgcttggggcgatggtaaaggtttggagtttgagtaataggactggcaacattgaagacgttaatggttacaccctcccgttcaagatcatggatcgctagtgagtgatttatatttatattgtttatacataatggtctgcatagttttgtataaaaatatttgttcatattttattgcaacagcaaagtggtattgtcgtgtgaggctttcaggcagaccgctatagactttgaaaaaaactttcgcatgtatggaaggcccaatataattgttgcagtagggtggtggagggttctaaggtcaattggagggcgaacggagtgaagattgtgagtcatgaatctacatccaaagtttttcctaatccagaattcctgaagttgaagaaattaaaatggtgattgattaatgggtgcttcatgaaaaaattgattatattttatgtaatatgtttctacagaagcctttggtttcagattgtaataacatttatgatattttattttgacaatcctaaatatttggatgattcttaatttgtttgtagttttttgttaggaacatattctaattaaattcattatatccattttgattcattattttcatgtaaaaagaaatctataaattatgaacacattatataatacgtagaatacaaaaaactaaacaggtaatagcaaaacagaactattaaaaagaaacacaaatctttaaaaaaaaattcggttattaaatattaaagactgtctatcaaaacatagccacaagatgagaatacataaatctttaaaataaactttagtttctaaatagtaaactctacattatttcataggcccggcccaaggctaaagttcatgaagctgatgctttaggcatcacaaataaattgtaaaaattgagtgcatcatttcaaatttaacttgtggcataatggtgtaatgtactaaacgtccatgagatgacaggtttgagtttcttctttttctttttttttggattttcatttaagttttgggggggggtgggcttaaaattatttttgctttaggcatggaaatggtttgggccgaccctgttatttcataatacattacatgctagacaacaatatccactttccgaaaaatttctaaagtaaatatctatacactacaacttttaccctaaacattataaaataacactaaaccctaaaccctaaatcctaaaccctaaaccttaaacactaatccctaaatcataaactctaaaccctaaacaataaacaatatagccttaaaatataccctaaacattataaaatataccctaaacactaaataactaagccctaaaccctaaatcctaatacctaaaaacctaatccctaacactaaaccctaatccattccacctaaatcctaaaccctaaatcctaaacaatacaaccttaaaaatataccctaaattcataatgtataaagccaaaaccctataacccatactttaaacattataaaataaaacaccctataaaataaacccaaaacactaaacctttaacccttaacccttataaatataccatacacacttaattagcagccctatatcctaaaaactgaccctaaacccttaatcttaaaccaaacagccttacctttatccatttacttaaccttaaaaccctaattattaaaatataaacaattaacgttatccatcataacaaagccacgcggttggagaaaaaagtccctataatttattcatctatacatatcaacgcggtcaatatattttggcgggatattcccccccccccccgaaatatttcaaaatcatattataaataagtaaatgtatgattaggtatcatatgctccaaatacctaaaggatttatactatgctccacaaaatagtt

SEQ ID NO: 35250 - DNA, 920 bp, Arabidopsis thaliana landsberg
tattgtgcaattagaaggacctccaaaaactagaagggacaatatgctacaaccaaatctaaagtcaacattcctcacatcacaactttgttatactttttttggttcttcttttattaactacaaaatttgaattacatgccacaggttaaacttatgaattatgatgtagacaattataacgagaaacttacaaattatatttcatgttattaaaatctacattcacaacgataattaacaaaacatttaatgtacaattagatatcgattaaatactaaatctctctctatatatattttataccatcaccatcatcattattattaccacatataatttgaataacgaagaaccaatcaatcattgtttatatgtgattttggatggtgttgttttatcaaccgatccagagtattgtgacatgtaatctacctattcaattatacatttgagtatgtactggtaaatgaaatcacacgtcgcaacttatacttatatacagggaactgtctatggcatacttggaatacacaacacaatagagaggtctatccatgaataaagcacaaccgctatttggttcactcatccacctagaatatatttccttgatgtatataaccgtatcaaagactctataacctaatctgtgatagagagcataaacacaaaggtacccctaaggactgactatttatcattcgtctctgacaacaccagtactcatttatagaactagaatggctaaaattggtaaaaatcacgagcaactacggctggatatatttacttctgatctgtaaagcagggggatcgatccaaaataaaactatatggcagatggtccagtgtataaattaaatcttagagtctatccaaagttaagctgacttatacacatacaataagacgaaca

SEQ ID NO: 35251 - DNA, 3514 bp, Arabidopsis thaliana landsberg
cataatttttataaggtacatcatacgctaactttttactactacaggcgattccagattcgttgacaaccttatctgaatatctgaatcatctcagacaagagtttgctgctaatggttagactaatttttaaatgtttggttgtgtgtccaaaaacaagtctcgagagtctgactgtggtactgtaatttttgcaggtagcaatgctaataacttgcaagattctgaaaattcagtgggcaatgtgcaagattctgcttctactactggagagagtcggattccaagaccatctcatttggcagaagtgctgcaatcaacaaggcaattgttgatcggtgaagtagcagattgcttatctgtatgctcttttacttttatctcatacattctttttgagaaagccatttgtgtctttgcttattttgacagtcttgaccaatgcggaaattattacatcaatttatgggactcagataaactcttaacagaacctcctagccctgtagacttattgtttccgacttttagtaccctgggaacaactgtatcttcttcgtgaatgttgcaatgttagaatattgaagttagtaaggctagttcaacattagtgacatgcagggtttttgctatcttttaactgactgacttgagctggcattagttaatcaaatccagggaaacaaagaataaccgtttcgtatctctcttttgcagaatctttcgaggcagctcgtggatcatgtaaatgtgaccgatccgccaacccgaaggtcgtgccagtcaaacatgcttcaatcaggatccctcttggagagtttaggcatttcactcctggagcttggccgcgccaccatgatgcttcgtttgggacaaacacctgtgcgtattcttttgctacatattgtggatctaaattttgcaatttttattattgatgcattagtttgcatatgattttgttcacagaatatgatacacccatacatctatatgacacttgttatgttacatgtcaggatgatgctgttgttgatgctggacctgcagtgttcatatcccctacagggcgaaatcccttgccggtctatctatttgttactttcttttaccattaccagtgtgtccacttgtcctgctcaccttacctttgtgttacctttaacttttgtagtcacactcctctcggctgggcacgagtattggaagcttacaagcaggaaccgcacattctaacccctttgcgggacaatcacttgcctctgccccaagaaatattgagataagaatacgtacaggtgctattcatatccgtaatttcgaagtattaactgttctttcctgctatatattggaaaacttcatattaagttcctttttttaatcttatatctggattcatcttggtgatgtgttatattaggatcttgggtgcccgccagtgggaccaaccagagagaggaaagtactacacaacaaacccctgggcagacaatcccttctacacccagcagcactactgatcctgccccctcaacgagaggtccatctgaacctcttcgaaatcctgtggccttagttatacctgttgttgctcgatatcagcagatatctcttggtggacgtagctctactggattggatggtgtacatcagcctgttactgaatcttctaggcagccacagagcgtcggtactccaggaagagaaggttagttctaatataacttccctacactattgtactgatttatttgttgaattgtcgataagagaaaacttcacgtctgttaccttttattactgggttgtctcatattatgtttgatttgatgtttcccttggttgttttggcttcaatcttcttagacctggtagatgatgtgttacctaaacgcaggatatgtcataaatctttgcttctatgaaatatgtaggtgatagcagtgcttctcctggcggtcggggtttgtctgaattgagaaacagaatccatcagtttttgaggcccttatctcgtcgagaaaaccaagccgggagcacggagtctcagggtgcagcaaatccctctgccacagcgtccacagaaacaaacgaagcagttgcaaatgcacaagtagagccagcaactacgacagatgaagggaatttcatatcgagtgttcttcagcagatcatgccgtttatatctcaaaacgtagcctcctcaagctcaggtgaagctgctacaggcagaggcagcaatagtagacaagcctcttcgagagaggcagaggtaccattgttttcaccttttaacatgttacttatttagttatttccttagaagccttatgcaacatgctaacttgtcatttacttgtggtgaattcgtgttggagtaattagatagtgaaagagattttattatcgtagagctttggttgtgtatagaataatacagatgggtaggagtaaaagtggtaaaccttatcaaatccggtgcttaggggttagtaaaatctgataaatggtaactggtgagaatatacaaatgtgttaatgagtgtcggttgcggataaattcgaggtgcaggaggaggaaggtacagagcgagggaattcaactcggagacctgaaccaccatcaccttcagagtcaaaacgtcagagggtaaatatgaagatccatttggtttatgattcatttggtttgtgtttcatttggtttgtgtttacttaaacatgtgatgatgtttatgcatagagagtgagagattgttggagcaaaagcgaagagtggagaagcacactttttgaagaacgatagtctttttttttttcttttcacttgtggtaatttattctgagcttttgattgttcgttcaaatggtattggtggtgttagccaaaacatctccatttttttctttttttatctccactgccaacattttcagagtttgtactcgaataataaacataagtgcatatacatagattagtactgaattatataggggaggctaaagcatgagagtcaaaagtgaagtttggtagccaaataatagactgtgtttaaggaccacaaggacaagtttctccaatggaacacttaagcttaatgtttacaataaatgtggtcgaggttaactcttcggtggacaaaaaaattggttttgagcatttttaacttgcaggttaatttgtcattctaacagagctccgagcaacaatccggcgaaagcgagaaccacaactttgcgacaaaacccctgaaacagaaaaaggatttaagctttcggactccatccttttctccaatcctagaagctacctgacccattgcaaatctctcgattgctcaagattccgacgttacggctctacgatgttggatcccacaccaagcaatccaacactctcagatcgaacctcaaattccagaattggtgacctttaagttctccaaactagggtttcaacgaatctggttcgaggacgcaccaacatgatggtttgagaagttgatt

SEQ ID NO: 35252 - DNA, 2140 bp, Arabidopsis thaliana landsberg
tttgagccccatactaaatctagcctttcagacgggacatgaacttcgcatattggcgtaactgtgcagttttaccttttcggatcagacaagatcagatttagaccacccaacaatagtcagtcatatttgacaacctaagctagccgacactactaaaaagcaaacaaaagaagaattctatgttgtcattttaccggtggcaagtggacccttctataaaagagtaaagagacagcctgtgtgtgtataatctctaattatgttcaccgacacaatcacacaaacccttctctaatcacacaacttcttcatgatttacgacattaattatcattaactctttaaattcactttacatgctcaaaaatatctaatttgcagcattaatttgagtaccgataactattattataatcgtcgtgattcgcaatcttcttcattagatgctgtcaagttgtactcgcacgcggtggtccagtgaagcaaatccaacggtttaaaaccttcttacatttctagatctaatctgaaccgtcagatatctagatctcattgtctgaacacagttagatgaaactgggaatgaatctggacgaaattacgatcttacaccaaccccctcgacgagctcgtatatataaagcttatacgctcctccttcaccttcgtactactactaccaccacatttctttagctcaaccttcattactaatctccttttaaggtatgttcacttttcttcgattcatactttctcaagattcctgcatttctgtagaatttgaaccaagtgtcgatttttgtttgagagaagtgttgatttatagatctggttattgaatctagattccaatttttaattgattcgagtttgttatgtgtgtttatactacttctcattgatcttgtttgatttctctgctctgtattaggtttctttcgtgaatcagatcggaaaaatggaatcttttttgttcacatctgaatccgtcaacgagggacattccgacaagctttgtgatcagatctccgacgctttcctcgatgcttgccttgaacaagaccctgagagcaaagttgcttgtgagacttgtaccaagactaacatggtcatggtttttggagaaattaccaccaaggctaacgttgattacgagcagattgttcgtaaaacatgccgtgagattggattcgtatctgctgatgttggtctagatgctgacaattgcaaggttctggttaacattgagcaacagagtcctgacattgcacaaggtgttcatggtcatctcaccaagaagccagaggaggttggagctggtgaccaaggtcacatgtttgggtatgctactgatgagactcctgagctcatgcctcttactcacgttctcgctactaagcttggagctaaactcactgaagttcgcaagaatggaacttgcccttggttgaggccagatggtaagactcaagtcactattgagtacatcaacgaaagcggagccatggttcctgtacgtgtccacactgttctcatctcaacacagcatgacgagactgtgactaacgatgagatcgcagctgatcttaaggagcatgtgatcaagccagtgatcccagagaaataccttgatgagaaaaccatcttccatctcaacccatctggtcgttttgttatcggaggtcctcatggagatgcagggcttaccggccgtaagatcatcatcgatacttatggtggttggggtgcacacggaggtggtgctttctctggaaaggacccaaccaaggttgacaggagtggggcttacatcgttaggcaagcagctaagagcattgtagccagtgggctagcgaggcgggtcattgtgcaagtctcgtatgccattggtgtccctgagccattgtctgtgttcgtggacagttatggaacaggaaagataccagacaaggagattcttgagattgtgaaggagagttttgatttcaggccaggtatgatctccattaacttggatctgaagagaggaggtaatggtaggttcttgaagactgctgcctatggtcactttggaagggacgatgctgatttcacctgggaggtagtcaagccactcaagtctaacaaggtccaa

SEQ ID NO: 35253 - DNA, 1140 bp, Arabidopsis thaliana landsberg
  unsure (1)..(1140): unsure at all n locations
agaaaagatagcaagtggcagtagctttcgtttgtcttcaggtatgttctgaagtctttcttggacaagtctctcaacagattcaatttcatcttgcccagtgaggaaaacaagtatgtcacctggcttctcctcaaaatgaatctaaaagaattaaattgaaaaatcagtcccagagttagtttactagaacattcgcaagtccattccacaaatactggtagaggcaggatcaatatttagatcaccaaaccaataacctgaaatatggtgaccaaggtggcatctacataatctgattcaggatgaacagtgtaaagaatgtcaacaggaaattgtcgcccctgcacatgaacagctttggcaccaccgaaatactcagagaaaactcgtgcatccaaactggcagacataatgatcagcttcaacggagataactttctgccttgatacccttttaatacaccattctgctgaggaccattcgcatcccttgttgttgtctgtacttgtgatgctacattaccaaactcagttttctcactaacaggctgtgaccgagtacgctgtatttttttcagcaaagccagcagaacatcagtatgaacactcctatcatgagcttcatcgacaataatgactgaatatctagaaagatgcggatccaacagcgcttctctgcagtttttgatttttcagtttgttagaacagagatcagcaatagattttcacaatttcataaaattaggctacaattataagttgttttattttgtttacctcagcaataatccatcagtgaggtatttgaaccttgtcgaaccagaagtagtatcatcaaacctaatggaatagccaaccttttggcctaactgaacctcacattcctcagctacccttttagcaacagtcacagcagcaatacgcctcggttgtgttatcccaatcatctttccctctcgacagaatccagcattgtagannnnnnnnnnnnnnnnnnnnnnngagaaaaaaaaaaaaaaaatgatcaacatcaatacattcacttttaatttgccaacaagtgtagttgagattaagcaagcatacttacgagtagtcttgccactaccgcttcaccaacgattatcagaatatca

SEQ ID NO: 35254 - DNA, 1336 bp, Arabidopsis thaliana landsberg
caaaaatatttaattactaaaattcaccatagttggaaacaagatccttaatatgactaactaaacctatttcaattaactagaaatgcttaaggtatcatcaattttttttttttgaaatctccttttgttcatatatataaaagaacagagattttgttgatgtttaaccgcataataaaaccctttcaaaaacaatttgaggaaaaaaaattgtaacaaagaactgtgagataattttcttacagatcttgtctgattgaacaatgatttcttgataagcttactctttccgatctgtcgtgaggtttttttcagacaagaacaaaagatttttcctttatctctctctctctgaaggaaataaagataggttctgttgtttttgaccggtgactgttttggaagtgtgtttggtttgttaagttgttggatatttatcagctctatatttttcttcttctgttttaattatttcttttacagcttttgtctatatctaggtattcatttttcgaaaatataaattcttcatctcgggaatggcttatatattccataaagaagattgtaatacatatccaaaataagttgtcaaaaaaagagttgttgaagagttgaatttcatgaatatttaaaacagtcaaacagaattatataactttttatcttcgacgactacaagtctctgttatatcttaatttacatgtgtcgacaaaattgaatagaaatattgtcttctaaaataaaacatcctcggataacacgtgaatcatcttttgcttttgtcgtgcttttaaattcgcttcgtcaatgttgacgacgttagttaacgccgacacacgggaaagaacacccaacgaccaaactctcttatgatctcgaatctatctacgggtcctcttgtctctagcttttaaaagtttctataacaatttgggcactttcgttatgaaatgttttacaattgttttagggttgaatttaatgacttgtagcttgatatttgagctttttgtaacaccacgatctcgggtgtctcttattgggcttcttcgaggcttaaactcttaacgtaaggcccaagtatatcaactctaaatagcctaagccgcagtattaaggtatatacggtgtgtgtttgttgccgtgatgaaaagaaacaaaaaactggtcagaaccctgagctaaagccgaagcctacgtcaatgaaaaaaaacagatttggggtacatcttcgttttagcgatgagatagtgtataattgtatatgcttacaagaaaaaacccttttgttcaaaaaaaaaaaaaaaaaagcttaccaagaaactttta

SEQ ID NO: 35255 - DNA, 2280 bp, Arabidopsis thaliana landsberg
aagatcagggtgtctctctgctccgctccaatgtaagtttttccatatcacgtaccactcctggtttaacattgctattctaaccggttagtagatcttagttcagtaaaaccggcctatagaatagtgttccggtttagctaagaagtgtgtgtgattggttcgagttttgtggggaatatggattaggtgattgtgacgtttttgtccatggagttgatagtggtatgaaggacaaaagagtggattggtaaaggacaagttaggaatttgggtgatatcaaaagatgacactataatttcaatttatatttgtttattagtaagtagaaaacaaaagtgtcacagcttttgtaagcgtttcaaaagtcaaaattaataggacagtttcaacctttacttagcttctgtagtttttgacttttcaccacttcctttttttttgttgggtctatctgaaaagttggttttgacttgtttttcttttaaccatgaagcgttactgtttggtcagaatggcaattctcgtaaataaacactttagctgaggttgttttggttttgtcaactctacaggcaatgaacgcgaatcagagtagtatgctaattcttcaggagacatgcattgacgcatctggagcgcttgtagtatacgcgcctgtcgacattcccgccatgcatgtggtgatgaacggtggtgattcatcctacgtggctctccttccgtccggtttcgctgttcttcctgacggaggcattgacggtggtgggtcaggtgatggtgaccagcgaccggttggtggtggatccctcttgacagtggcgtttcaaatccttgtaaacaatctcccaacggcaaaactcacggttgagtcggtggagactgtcaacaacctaatatcatgcaccgttcagaagattcgtgccgctttacaatgcggaagctgatcttgatcaagactggcgcgtgcgtgtgtttctttttcttaatgaattgtgaatttttatataacttgtttttttggtcttgtactatgggagggagggggtgtcgagtcaagaacgaaccgcgcgagtgggcgagatccaactcctttgtcaccgtgatgggaccacgacgtaaaagggttcgggtccgatcacggtggagtagttggtggttcgggtattgactggggttggaaaccccctctttactctttttgtttgtgtttgttatcttgagtattattattatgtagcgcgagtaagccacacgcgtggggtgtgttgtggttagaaaacgcgaactgtgagatgatgatgttatgttggatgggatctgtatcgtttcaagttaaaaaaaaaaaaaaagctgtctctcgtggagcattaaatgtattttgcaggcatattcattcatttaatgctataccttgtctccttcctttgcatgatatggggcttacgtattccgccattttcgttgcgccacgtcattcccttgacagactggtgcgatgaaccagacgttacgccgtcgttttctcccttctgtttgtttggttcttttctctttctcaatatgttgtttttaagttgcagacaggaaaagaaaaacgtaagcaagtgaatttaaatagctgtacggtggtgggctttattttaaagccctggcccgttatggctaatgattcctagatcttataacattaattgggcctacaacaatatcatgtgccattatttatccgttcattttgaaaagactttagattgatactgcactaataagcccataaggcaagtgaaaaatgtcatctaatcccccaactttcaaaaaatgaccattttatacatcaatttcgtatgtggccgtttaaaacatgaactaaacgttgattaatttttaaaacatgatctttcgttgaccaaactaaaatagacatgccgttatcaatcattaacgaaacttctaatgtccgttatcatccgttaactttattagtcaagtttcaaattgtggccattttaaacatcaacttcttatttggccatttaaaacatgaactaaacgttgactaccatttaagacatgaataattcgttaaccaggccaaaatagacatgtctttatcagtagaacctagaaacccgttaatgactgttaatctgtccaaaacaacgtcgtttgagaataatcgaaagaacataaagatttttcccatatgaaatctccatatcaaaaagttttaagcagaacccaagatcatagtttgataagtagatcgtggcagtgtc

SEQ ID NO: 35256 - DNA, 2474 bp, Arabidopsis thaliana landsberg
cctatttggttccttatgtttagggacatcaaacccaaaacatcatcttcttgtctccaaatccaaacaaatgctgtgtttgtcacaacacctaaaactgtaaaccaataattccaaaaaaaactcttgttaaattattgtaaaatctcaattattcgttttgtcctcactaccatgttttcttctcgttgtcccttactttcagaatactaatcaacatctctttactatttttttcagattctatgtatcggaagtgatcgtagcgattgaatatcttcacatgttagggattgtttaccgcgacttgaagcctgagaacgtgctggttcgatcagatggtcacatcatgttaactgattttgatctctccttaaaatgtgatgaatcgacttccacaccacagatagtgctgaaccggaacaaccttcctaatggctcgtctgaccagaacgagatccaaggcatggaccaccgtcaaaccacatcatcctcttgcatgatccctaactgtattgtccctgctgtctcttgcttccacccgagaatccgaaggcgcaagaagaaaaccgatcaccgtaacaacggtcctgagcttgtggctgaacctgtagatgtccggtccatgtcattcgttgggacgcatgagtacttggctcctgagattgtttcaggtattcttcaaatcttcctcattctcatttcccctgtttcgatttgaatgatttttaggtcaaacgtttttcttcttagggaagtttatataatgtataattttccgatgtggtatcctaacatgaaacgtaaaatgtggatggcaggagaaggacatggtagtgcagtggactggtggacattaggaatattcatgttcgagctgttctacggaacaacgccgtttaaaggaatggaccacgagttaactcttgccaacatcgtagctcgagccctcgaattcccgaaagaaccaacgattccaagcgcagccaaggatctgatctctcagctacttgccaaggacccgagccgacggttagggtcatctctgggtgcaacagccgtgaaacgtcacccatttttccaaggagtgaattgggcattgctcatgtgtactcgtcctccttttcttcctccaccttttcgcaaagaacttttgtctgatgacatttgtccggaaacccatgtcgactattattaataacttaattagcgctacgtaattaattaattttcttcagatataaattatttctaagaaacaaaatcagcctaatactagtatagttgcactttatgaagaaaaaaagcttagtataaatgcgtttaattaacgtttagacattctttttgtaagttcttcaaaactagtataattgaaggaaaataacttggtaaattattaatgtcagctgcaaaaaaaaaaaaaaaaaacgatatacgcaacacagattcaaaactaatgcaaaccccgctattggatttggcaacacaataataatatacacgaagcatctcagccatttattctcagtgtttttgtttaagaaaacgctaagcgctaaacggacggagacttaatgcctatcacattgaacgtttaatcggatcttaaacaattttaggcggttaaagcgtttataatataaacattataaatatgattttatacataaatattatataaaatatcgagaaaaaaaataaatatgttaaattgtaaacaaaaattagacaaaatttatatttaactatatcaaatattatatgaagatttataactattaaatagaagttatttaaaacacacataaaatcgtttacaatacttgacaacatattttaaatgtcggcaattgatttttttccgattcaattcagtaatttttgttcaattgcctcctatcactcaatgaagagaaataataatatataagtctatgagatcatcacgacagagaactatggaaatgacacatactgtgtacggtgaatgtatataactaaatatccattggagggactcgcttagtctttggcatgcttgatgtgacacgagtattgaagaagaggagcaaagaatgggctcttaaacatcatatgaagatgtccgtaacacctcttcttcatattcacaatgatctcacaacactctttgtccaatgcgaaattattcttcgcccaactcgaaaatatttgcgagaaacatttctcgttcgctttcgacccatctttggacaaacatttctctaattcaccggattgcgacacgagaacagactcaaacggacgacctggaagtccagggatgttatggagtcccgggatgttaggtattgtgattcccggaatgttcgaaaacggtatgtgaggtattcccgggatttggggaatattatggaacgagcccacatgtgaaggacgagtgttggggtcctgaataggatgagcaagcccgaccaaccttagagtcaccg

SEQ ID NO: 35257 - DNA, 1380 bp, Arabidopsis thaliana landsberg
cagaaccaaactcaccaagattacagactaaatcaagaactaagagaagatttaagacataccttggagtttcctctgccattttcgaacctttttatttctgggttttagacaaagaatattaataattggcgtttctttttttcttatgcgcatgcagtgaatgcacagaaaccatacgaagaaatgtggaggcaaacgaagccacgtagctcagaaattgatgttcatgggagattagacttctaatccgacgccgttgttttagtcttgcattatttaaagttgaagacgtttgtatatttacctgtgacgtcgattttcataatttaccagtttttttttcttttttttgctttatattgacacatatttgagataactagttaataaaggcaatttgtttggaacaaaccgttactgatgatagttatcatatttgggcgatggttacaaacttacaagttatgtttataatttattttattattattctattcgatttctagttacttcaagatttttccagttgttaatctgaactgaaatttacttcaaaaaaagctgtatttatttagtacgtagagtttttcatgtatgattttagtggagtttattatttacggacaaatctgtaacgtagttaacctatgcgataatcgttatttccttcaattcggtgaggaataacaataaaacatgttcttttatagtggattgcggcataaatgcgatgttagacgttatatttctgtaaattcgacatcatctttttctagcatccttatcttcaaagaatataaagacttaagacctaatctagttgagtaaggtatgagattcgagttttttcttttccaaattttcgtgactataagtaatattaaattatgaagtgaaattgcaatctatcaaccaaaagcaaagaaagagaggggaaaaaaatggctcaattggctgctttgtcgggaaagcaagctgatgagtacttgaacgcaaggccaaaatatcctacaatatggtacaaagtgttggctggtcgaaccagcaaccataaggtggcttgggatgttgggaccggcaacggtcaggctgctattggggtttgttttctttctaaaacaatagagttactttgaaccttttgaagttttgatacatttccttcaaaatacttcaagccacgatcaatttttatgtgaagcctaaatgaactaatcgtacgtgagtcaaatatatattgtgtaattaggtcgctgagtactaccagaaagtggtggcaactgatataaatgaatcacaactccaacgtgcaatgaagcacccaaaagtcacttactatcacactccatcatcaatgtccgacgacgatctagtgac

SEQ ID NO: 35258 - DNA, 9066 bp, Arabidopsis thaliana landsberg
gagcctcttagcctgcacgcgatccggccagttgcgtgagacgttgttgatgatggtttgccagtccgtggaaaaacaagtgttgtagatggtcccgagattcaagcgcattgttacataggatacaagtcgcatccacccccatgttccaaagtgtcatcctgtctcccgtagagagcctattgtgaacggctaaccacatgcaaaaagcgtgtttaggaatggcttgagcaaaccaaacccctttataccaagccaccttatttgaaactgtgcgaatatgattccaagtatccttggtagagaagatgcttcgaaacctattctctttccctttccaaagtgcacagtcctcggcttggtttcgggagttccaggacagaacaagtcgctcctccactctgtttaagaagttagcgcggtgtcttcttcttctccggttaccccaagcttctaccacagttgcgtgcttatttatccccagatcaatggctcctcgatcccctgcactttcaatcaatcttcctaaatcactccaatcatcataccaaaaagaagtccgggcaccattgtttatttccactttacaaagagtcctcgctatgtcacgaaacttaaggatctttctccacatccatgagccgagacttgtattttcccttaccgcccaaaaagaaactttcttaaggagagagctttgtatccacttgacccacaatgagtcagcatgagatataatgcgccagattaactttaaacaacaaacatcgttagcttcctttagagatcttaaacctagacccccctcttccttcggtttacacacaaacgcccatgcgatcttagcttttgatgtatttagctctcctcctgaccatagataagcagagcacatcttatcaatttccctgatacaatcccgaggtagacggaaagctcccatccagaaattacaaatactccaaagaatcgagctgattaggttcaatcttccagtataagataaaaaacgagctgaccaagaacaaattttctgctttatgtgatcaataagagggagataatcagttgaagagaattgtttggtgactaaagggagtcccaaataccggactgggagagtgcccactgcaaaagggaaacgatcaatgacttcttgacgagttgtgtgagacaaccccgcaaggtagactgttgatttttccatacttattttcaaacccgagcacttagcgaaagtgtcaaacacgtcaacgattccttctatggacctcacttttccatcagataagaccatgagatcatccgcaaaactgagatgagttaaaccaatttgcttgcatcttggatggtatccaaatttacgctgacctgctgccttatctaaaagtttagataggacatccataatcacaacaaaaagatatagtgataaagaacatccctgcctcaacccccgagagctatatatatagcaaacggtcattcttatatatagcaaagaagtatacgatcattcttatttagcaaagaagtatacggtcattctatttgacctcggttcacatacttaagtgattaagtaaacagtgatttctagacattctatttgttaacatgaaaattcaatttttttgaaaaataacttatgcatcaaatcttcagacccaaaaattctataaaacaaaaactcaaaattccaaagatctaacacatatataccgcttcttccatgcttcgaacctatggactattaaagggggataaattgcgatacaacattataagataaacataaagacttgtaaaatccattagatctcgttcaggtgcatgagaatattgttataaaaatctacaaattttacaaatacaaataaaagagctttaggaacttcaaatagcaccaatgtttttaaggccaaggacaactcctacaccgatgatatgaccaacggtgccacaagccaaagtgtccgcaagcgtgaacccggccgggtcacccgtttgtagacctgagtcacgtgcctccaacctaagtccagctgtcgccttcctattggctgatggcgcaagtccgaatctccccgcgaacaacatcagggtcgtcgacgttaccattatctaatcaaagtataattaatcattgcttagacttaattagtattgtccatttaattttgttttatatctttaattaccagatttgttgatgaaccgatgaagtcacactttgcacccaaagctccatttcccttgcgtctcatgggctgaacacttgcctgggatgacaaaaacaccattccaaaacattcaataaccttagtttttgcaaataatattacttttgcaatgtcataaaattgattctaggttatgattaattaatctccaataaatctgccactaaaacatataaaatccaggaaaaaattgaccccaaaagattatagaagatcaaatcacattttgagaatctaagaaaactgaaaagtactaaccaggccttgtacaggagctgcagagattttggtggctcgaagaccattgaactgaggcaatgtagtcatcatagtgctagccattttcttagttgattctacaaatcttttattttcttgtgcgatgttttttttatttttgtttttgcagttttgttttcctctatacagtctttaaaatgatttaggcaagaatcatcgtgtggctttggcgatcacagaaatggattctgtttaggttacctcttgctgaggcgtcaagtgtctattggctgatttcaactctggataagactgtctcatcgtcatcacagtgcagattttctttcaaaacctttcattttgggcttcatgcaggcccatttatacttatattaaatcttagtacaaatcatggaacttgaatactatgatcgtgtggacttcaagcggtctgatttaaaccaaacacaaattacatttgaaacatttagtgctcgtggaaattggaaaaggctcgtgtatactataggtttagtggtactttcgtagttgtttcaagagacgaacttgccgtgaagaacactttcgagcttaattagtcaaattctttacccttttgtgattaattttttcaaacctatcccatctgaattagttgatcaatcagttatctttcatatattaaacaaaagcttaaattcgtatccataatcaacttataaataaaccgcatgaagtgtattttaaatgcaagttcaattgttcgtattaggttgttaacaaaaactataatacaaaaaaaatgaatttttatcgatcgagagtgacaccaaaattaaagattagttttcaccttttaattaatcaattaagtcaaaccatattagtctgaaatgtacgtcaatcatctacgtccatttattcaaaaatataatgagatatgtgagtttctttatttgtagccaagaacaattatttctgggtgtttattggatttcatgtaaatgttcttatccaaaagtagtaatatatatttcattagaaaaagtggacccgtttattaggaggaaagttcgagttatataacctaacgcaaaagccgacacagtagacgactcttgtaagagttgattttcctaacaaataatcataattaatttcattaatatatgttttgtatatagagcagccctaattattcaatccttaagctgccaagaataactatcatcatggcgtattattattactttgaccaactaaaatcattttgacaaaatgagattgtgttttgacttaaaacaaaaacctttccaagaggagatttaattagagttgctggatatggtttacctgaaccggaattctgatttttattagcaaccttcacttcactactcgcatataaaacctaaaccgtatattataccggtaattaataatcattcttccgtaccgaacaatgttttagtacaaggtcaaacatttattcttcgtcaacgcatatgagtatcttcccagaagcaacatatgcatatgttgcttcatatatataacacatagagatctattcaaagcatatcgatcaattcttgctacaacacatcacaactttatcatcatcatcatcatcacctcaaaaattatccgaccgataaactcagaaatggagaacgcattggtcaaaactccactgagaaagctaagaagaagaagaactaaacgggtctggagattgaagcagaagctaaagcttgcatggaaatctatcaagatccgggtcaagtcacatcttccgggtttcttgtcaaccaagaaacacctcttccacattaaatcacgaaaggaagaacaagatttgtctcaagtggcccagaggatctgcaaaatctccaatgactcgaccaaatcactggcgtttctacttcagcttccaaaatactcagccgacgattttcttgaccgcggcgatctgatgactccagctgcgtctccaagggaaaaaatatccaaaatgtggcgtgagcttcacggtagcaacaattgggagaatcttcttgatcctctgcatccatggcttaggagagaagtaaccaaatatggagaattcgtggaatccgtttatgattcacttgatttcgatcctttatccgaattctgtggaagctctagatacaacaggaacaaactctttgaagagcttggtttaaccagacatggttacaaggtaacgaaatacatctacgcgatgtctcgtgtcgacgttcctcagtggttcttaagctcggctttgggagagacatggagcaaagattccaactggatgggctttgtagctgtgagtggagacagagagtcgttgaggattggtcggagagacattgttgtggcgtggcgtggaacggtgactcccacggaatggttcatggatcttaggacgagtatggagccgttcgattgtgaaggaaaacatggcaagaccgtggttaaggtgcaaagtgggtttttaagtatctacaactcgaaaagcgaactcacacggtacaacaaagaaagtgcatctgagcagacgatggatgaagtgaagcggctagtgaatttttttaaggatagaggcgaagaggtaagcctaaccattaccgggcatagcctcggaggtgcgctggcgcttatgaacgcttacgaggcggctagagatgttccagcgttatctggtaacatttcagtgatctcgtttggtgcgccgagggtaggtaacttggcattcaaggaaaagctaaacagtttaggagttaaggtgttacgtgtggtgaacaagcaagacattgtacctaagctacctggtatcgtgttcaacaaggtacttaacaaacttaatccgataacttcaaggctcaattgggtctacaggcatgtcggaacgcagcttaaactcgatgtcttcagttcgccttacgtaaaacgtgattcagacttagggagggctcataatctagaggtgtatctccatgttttggatggcttccaccgcaagaaatctgggtttagggttaacgctaggagagacgttgcttcggtgaacaagagcacagatatgttgttggatcatctaagaatacctgagttttggtaccaagtggcacataagggtctgatccttaacaaacagactggccggtgggtgaagcctgtccgtgcacctgaagacattccctctccgttaccgaccggaccaaaacctatttatagcttatgagaaataaatttattttccattccattcattcgttttcttgaatctttagtccttgtgaattttggttacaacatttcagttcaatgaatatagatcaagctgtgacaataatgtatatatgtttgaaactactttaaatacaatttgcatcagctaaagaaatcagaacatcagagtagaagaatattaatgatgaaaaatcaagttgatgtttaaaagtagcttacaaagttacaagttacaacaaccatggaacacatacaaagaagaatcctaaacaaaccctaaaattcacacacataacaataaaagcttctaaaaaaccagcaaaacaaatctattagataatttggggattggattcaaattttaaacgcctgctattgcgttgaaatcttgataacgagacattgcgcctttgaactcgtgttcttctggtttgtgagagctcaagctatgcggaatgtatgctctgaaaatctcctctaggtctggactctgcttcagctcacggcaagctacctcgagagctgtgtgttcgaaccctccgtagaatttctggcggcacacatatccgaagatgagagaggtgataatgagagggatcacaagggccgtgtagaagaatgtcttggctcctaagtagccaaacattaccacttggaatagaaacaacgctgctagtatgcgctggtgaatatgcggccacattcttccatagctctcgtatgatggaacgtacactttcaacgcctgtcataccccgaaataaaacagttcaagatcacatttttgataacctaagtgtttatgggtatagtaaatagagagaaagtctgacctgattcctgaggactagccagcctaaaccaaagtaggtgatgccgaatatgaggataagaggagcaatgactgaatagcagaacgtgattgtgaggatgagcatgtctccgggaaccctagtcgcatagcttaagtctcccgggtaccaagcttctttgacctccgcttcggttttgcagagatacttctttttcaggtggaagattatcaaaggtatgatccgagacagctcaaggccataaccgataaagaacctgaaaaaaaatcatcaacataagatttagggaacaaacgaacaatacatatgctatttaagtcaagaagaccaaaatctcacttgagagcaacgtaggtcaggaagaaagttgcgctcttagggaggctagtagccaaaaggttaataatcatgtcgagtttgggatttttcgcgatatccttcactgtgttgaacaaagtcccagcaagggtaacaccaatgaagacattaaagaccgagaagtaaaagtacttccctgaagcagccctaatggcatggctctgtgaaggaatcccctcggctttggagagaaacaagagaagcttcggcaacatggccaagaaaacaatgagcgcaatctgaggaaggaaagactccaaaacggttcttatggcggttatctccacaaccggctttatgaacggaataatcctctgaagattcttaagagtggtgatggcagagacgaacgcgattggtatcatgtaaaacagaatggtcactgcaacaaagaagtagatgaagtattgccggattattctgctgaagagcttgatgttgagattctgccataggagctgccgtggctcaggagcttcggtcacagtccatttatcaaccatctggcagtgcagagactgagctgctgatgcagcagcaaccctggttgtgaagaaaaccactgctgcggtttgctgcttctcagcaagaaccgctttctgctctgtttccagtttggctacagactcgttgattagctcagtgtaatactcaatgctgtctacttgtttaccgactagcccacagaagccggttttgttcgtgggacggttattagttgctgctaatattgcttctgctcgcgcaagcttcttcttgtaaccttccaatttttcccatattttattaacctatacaacacaacaaagagcaaaggttaacatattaacattatgatgcctaaaaccttaaaacatatgactttcttaggccagaacaagtagataccttgctgttttctgttgcgacaagcgatctgtagaatgtctcagggtatatttctctgaaataagaatcaataaactctttctgtgtctgcccgtcaggtggtgcaggcatatccctaacaagaatagcgaattgctcgggttttacatcagcagacatcagagcttgagctctcaatgaagagacatgcttataagctttccacaagaagaaatatgtgaccaaagatatccagtaaacagctcctaggaacgcccacagcctcgaactttttttctgttcaaatgaaaggatacacattttgctttagactatcaaaaactgaaaatgaatcaataggcagaatggagttattgttgtgtttacttactgtgatgttagccattgatagattatcaagttggctaaaagttcctttgcttgtggtatctgtcgcattctttgtgttctttatgttgttgtctgtagcggctagaggcagtagagttggtaggagaagaagactggaacaagcaaatatccccagaactgcatcaaacaaaagccaattttcaagacatcataaacactttaccttcaccaaaatcactggctcgtatatatagacttcaaaaagttctatctactgattctaatttcaatcaccaatgtctaaaagtaaaacagagataacataacatagcaaacaaaatagtcagagccagcaatttacaaacaaaaaagtttccattttgaaacgttttttcccccaattgtctctaaagatcgaaactttattaggttaaatctcaaacccaaatcaaaaccaacagaaatcagcagaattccaccaaacccttgaattggaaccactaaagtaacagagaacagagatgaacagagagagattgagatcgaaccagtgctcaagaagacaaagtggacagcagtatcgacgccggataagttaacgacatcttgttcagaggaagtcaaagcttcacgcatccaagcaaaagggtttcgagtcaaggaggtgccttcccatggctccagccctttaaggatccgattcgggtaataaatgggagcatttccagatttgcgagaaagccaggtgaagagaagcatgagaatgccgaagataacaaaagatgtccctaaggacacaagaaaagatccaaactccatctgggtttagccagaggaatctctcaagctctctgtttctttctaaatct

SEQ ID NO: 35259 - DNA, 3904 bp, Arabidopsis thaliana landsberg
agtcaatcatcttatgaaaatcatgtttggtgttaatatataaagatttgatcagaccttgcaccccatcgagcaagaaaatagccgagatagagagagatcaccatagaacgtggcaacgacggctcttcttcttcttcttcttgatggtggtcggttgataggaaaaccctaagttctggttcctccttcatttcttctgactactttgattctttcctctgaatatcaattgaatctgaaaatcggaaacatcgatcaaagctaattcagtgttcattgcatatccctggcttctctagattttgcaattcaatgggtgcaagcagctagtaagacatgatcacatggatgagatgaataatgaagaaaacatataaactgtatcaaaaaaaggattaagaaaattagagagtatgcattacatgataaaattttgcagaattttattttctgaggttttgcgtttatattacaagaatttatttattatcttattatctaaataaaaattgatttttagattttttttttttgacatatatttcctaattataatattatatttcctaattataatattttctttcccctaattattagtaacttaaattaatgtttaaattttttgaaaaaactaaaaatttgaaaaaccttaaaagataattaatcttcttgaaacaaattacaaatctgagatatgacaatttctgatccgtccaaaaaaggtattttcgtttgtgaaatattctccatgttttgaacgtctagttcaaaaattgattaagtctctgattacttctaaatttcttgacgcaaagaaatctagaatttgagttcgattttcaatttttcgtaaaactaaacttcatgaatatgatgacaaaaaaaaaaaaaaaaaaaaaacgtcatgaatatctacaaaactcacctggcacagggacgggtttgaaggatgaatggtcgaagcaccaaatcgaagtcgaggaaattatcgcagaaactgagacacatttctagttgcactatatgggaattgttttggggattagggataaaaatgtccgaatatttcctcatttttggcgtcaacgatgatcaggtaccataattttttaatcgtcgtttatgtcccgtccgttagaatatctcagtgatcatactaataaacaaacaaaaaaaaagcgcctcggacatcacaacgactgagtaaataagacaacgttttcttgtgagacccatcagccatagtttatatatacaacttgttacatacaatacaacaactcgtcctattaaaagcttcaacattatcttctcattatatctcaaatcatgaaatatataaaatacacatacggataagaaacatagttgtatattaaaacatgaacttttatgtagcatgcatcatgtcttaatacagtcaaagtgttggtacctaattctaaactgattgacacgttatgctgtcacaattaaaaaatatgtacattacaagaaattaatacatgacttttgagttcaatattatttatgtagatttattgtttttggtctgaaacaccttttccataaaattagcaacttttcacagcaaaataggtggtggcaaacgatgtttcatcaacaaaagaaagtaagaaacaattgaataacgtttagggatgtgattttgttaaaaaaaaatatgtacgtccaacaaaatatcaaatcccacgatgtctaatgggtttgtttctctatctattggatcatcaacaaaatattctttttaattaatccacgtatccaacaatctataaatgggctagttatatgggccgaagcagacccgaaaattaaacggcacgttttgtatattcttatgaagaaaacggcatgatgtgttaaacgcgtaaacggcgcgtattctaaaccactcttccgggttacgtaagtcatttatccagaacattccgactactctctccctgagcttcggccatggcggttcgtctcgcgaggtcattggctgcgtcaccctcgtcacgtccatcgtgtttatccctcggaaatcgcttctcagcctcagatatcacttcatctgcgattaacggcggcgagttttctgatttcgttagagctttcgccttttattcgtcttcgtcctcttggtggtcgtctcccgatgatttgacggcgtcatcgaagaggaaagagaagaagactacagagcgtttctctgccgtgattgacgcagtccatgaccggaaactcccgccggagctacgtgggcggcgcgatttcgtaaggtatagtctctttccatctttctgtgctcacattactgtacgtattaggactttggaatcgatatgttatatagttagggttcataggtttcgttgagaatttaatgaaaattcaaatctctggacacgtctcttaccttgatttagcgttttcttcttcacacgtcaatttcaaggtccaagcgcaattcaaattcactgtttccatggttttgcggtggagtttttgcaaggcaattcagttcagagactaagcgagttaacaccaaagtcaatttctctctgtctgatgatgattcagatgaggaaactgaaactccggttactgaagattcaaagaagcaggagcctccacctcctccgtatgaccctttcagcaagaaaccggcgattgaggaaccagaggatcctaagaatctccaagaaatattccacaagatgagaacagagggttttactaatgaagctgtgaaaatgtttgatgcgttgtctaaagatggccgcacacatgaggcgttagagctcttctctcagattaaagataagaatcgaatgccagacgtggtggctcatactgctattgttgaggcctatgctaatgcaggccaggccaaggagactctcaaggttttcatgcgtatgctcgccagtggtgtttcgcctaatgcctatacgtattcagttttgatcaaagggcttgcagcggatggtaaaacacataaggatgcgaagaagtacttgttggaaatgatgggaaatggcatgagccctaatgctgccacttacactgcagtgtttgaagcttttgtaagagagggaaaagaagaatcagctagagaattgttgcaagaaatgaagggaaagggttttgtgcctgatgagaaagctgtgagagaggctctcgaatataaaagaggccaagtctttaggactgtcatcaaccttttatttgataagtagttgtagtgtttggtgatctttcaataggtagaacagctggcctttatgcgatgcgtctgagtatgttgctgagtcttttgttttttagatgttgacacaattgcgcagtagctttatgtttttccgtggaatatatgacattttgttgtcagagaagcttagcttgttgcttttttcttgcattgtggttttattaatctcccagatgagattcttcttcttgtgaaatatgttattgatttgacctgcttgtaacggatactaacatgggatgatgttgcaggtcagagactgatataatcaacgtggtcgagcaaaggatatggcattcaatggaagaaggccactttgagaacttacccggtaaaggcaaacccttgaacctccatacaaatcctcacgcagacccagcggaggatacattgtatcggattcttaacaagaacgggtttgctcccgaatgggtggagctcaacaaagagataagaaacaaagcaaaagaatggagagtttcactgaagaaagcatggacaatgaaactcgaggaagaccaatcgggatgggaagagagataagatttgctgaaaaacgaattgaaaaaaatcaataacatggcaagtattcaactacaaatcaagattctgtggcga

SEQ ID NO: 35260 - DNA, 5012 bp, Arabidopsis thaliana landsberg
catcaaacaggaacgggttcggttaatgttaaaggacaagacaccaagacggtcccttacagaataggctttagtaacaggggatctctcaaaaaatgattaagctttagtagaatgctaaaggtaagtctcaatctatgcatacagagataagatcccatctacccagagtacatcaaatgaagctctaatggtaatcctatctccaatcccaatacaagaactaaactctaccctttgcgttcatgaatcttttaagccctttttctaatcattcttttcttttctcttaactctaggcgaagcttcaacaccttgatatatctagcggatttggatttctttaacaactaaggttcctgtttttaacattttaaaaccaagggcttttgcccatcttcaatagctaacaagaactctttcttttctttacaaatcccaaaacctttactagactttttctgctttttttttagcttacttcacctagagtcctttaccttttctcatcaatgaatcaacctccccttttttttttttcttttaaacacatcccaacccaaagtataagcacccacctagtcctatctagtccgaaaaatccgaactagaactacatgagacactatctctgtcgttacgaacctaacactttctaccaagcttaatcggaataagacctctacaacactcacaagtgatatagggcttgaaagaaagtctaggtttgggtttgggttaaccgctctactaaggagagccagctacttggattaacaagagtgatcaaaatgaataagaaaatccaagtattttagggtatccatgagttcaaatttgatgcagacatgataattaaagatcagattcaggttccaattgatagggaatggtatcagatcatgacagtgtggtcgagtagagcaatctaggcatggttcggttttatttcaaattcattgactacgcaacagacaactagcaacgagggcactgagtttatccgatgaaccaaaatgcttacaaggctatctcatcattatcccctatgcatatgcaacaatcctaaatgaaacactctagactcgatcctaaatgtaattcaactacatgaacactcttttttttgtgaaatcattttctgaatttttcaaattttttggttattctatgccttagatgaatgcagactcaaaaatatacacaatgcaacacacacttcctgagccctcccccaaacttaaatcacacagtccattgtgtgaataaacttggaacagagtacgcaggacaaatccaatcacagaaacaaaatgaagaacaaatcacaacagatgatataatacaatggtgaagtgaggcgcttacctcagtcgaagaatgaacggagcttcgctcaaactcttgctttcccttgatggaggtatatgctcgctgaaatgatacatgcttgtgccaaaatccgcctcatctatatcatctgtctcatcaacatcttctgttgtagctccttcggtgtgactaacctcctcagttggcggactgccctcgaaataaagatcttcaagcgcaggcttgaagtcgatgttccttccctcgagaatctagtagcgtcaatgcaggggagaagaatgttggtgattctaatcgatgaatgctcgaacctgtagcggtggaagtcgcctgccatgtcatactccaagaattcacatcggcgcaaatgatccaagtccatcatcctcggtgctaaccctggttccttgagcggtactccacaagcttccagaattggtgacacaacgccacccacgcagagtgctgctctcaccttcttcttgtcgttcgtcaacggccacttcctgtatccacacagatggatcaacagaggcattactggtggtgcgttgttgagatcgcctctcaagacattctttccctttgtacggtggagaatccctgtaagcgcgaaatctatcatctccatgtccgtgttagacacggtgcctgtagactccctggagtaaaaacgttggcaaccgagcgctgaaagtagcggatcacaggactttggatttggttgctcttggaccgcgccgagtttagcagtagattgttcccaatagtggcccacaaatccttaagctcttccctgtcaaacctgggtttggttccctttccactagggaaaccaaacagttcttccaacttcttgatcgaaagctgataccgctattcatccactaagaacgtcaagaaccctaaccccatggtatccagctcaaagtccgtgagaccctcatacatctctacttacagtgtggaaagaaactcaattgtctcctccttatacgtaaggttaagacatgagtgtctccagataacacttctcgaacaaatgatgcacgtcctccagtaacccaactcggctaaagtctcatagcagggatacctcgttccccagaagtcattcatctcaaagaatctgatatactcctccactgtaacctcgtcggatttgttcagtagcttcgtctccttgcgccatgactctggctcatactcagttttgatatcctcatcaatcagctcatatctactcgacatcgccctctttcctctagcgatttcagctcttctttgattacgtcgagctgcagagcgttcaaattcatccctatagctctcgtaaacatgttgctctcactccggtctagtggaccaggacttagcttcatccacattataatcagggtccatagaggattttccactgtagttactcatgatgaaacctgaaaacagacgaaactcaaagataaacgttaatatgttagtaatagcaaaaccaaaaacacaatctaaaccagcgtaccggtcgagtaaaccggttgagtgaaactgtcggtttggaatttttttttcttttttttttttactttgagagttgttggtcgagtgtatggtgaacaagagcgggtgtggagatggtagcaccgtggtcgagtgttgaatgtgtagagggaaacgcggtcgagtggcggtggttgagcttcactcttcttgtctttgacaatcgagtgagcttttaaatggcgatggtggagcgagacgcacggtggtcgagtaagggagatgatgaagatggtgaggagagatcgagtgactatgagaggcaagagagacgaggtcgagtttggttgctgaatcgagtgaactggtgatgagtgagagatgatgacaagctttcgtgggggatgagagcagcggtgttggaaacgatgaagagatgaggagcttgaaggtgataagtgttcagcggttgagtatgtcaagctttaatggaggagaaaacgatttgattggttgatggtgaaggtggtctagtggttaagagctagaagtggtgaagccggcttggtggtagaggtcgagtgagtgaaatggagagctcgagttgtttccttggagagagggagcaggcggtgacgatggagaggcggtgagaagcggcgagctcgagtgatatcgcgaggtcgagtatgttgagagatggcgatgagagcgatgaagccgagtaagtgagagagcgggcggtggtcgagtgagagttgtgagggaaagagatggcggcttgttgtgtcttttggatgcaagaatgagaagaagaggtcgaatatatgaagagagaaagtgatggggtcgagtggtgatggatggatgatgatggcgttgaagacaagtgatggagagaagaaggggatagatttcgttatcaccttgtagggagcgtgggagacatggcagcagcagtgggtccctcatctgtctctttgttttgaatcatgactctatcttcactaggaaaatctcaggaaatcctacaatcatctgtaaacttaatgaactctctgtaagactctgtagcttctgttggtcgagtaaaatgatatttttttataaagaaattctgttttaaaatcacacctatactcgacctcctcactcgagtggttggtctccaggtgtaacagaaagatttcgaattttagcacttcactagactgtgtactcgatctctaggccctctgtagagtaaaagctttgaattttccctctatctccccgttgttcctttgctcctgagaaccacaaaaacaactaaaacaaatcaaaaataacaagaaaggaaacatttatttacagggatagtcatgggacttcctcccaagtgagtagtgtttaaactctctagcttgactcctcacacttataaagaagaacatgagtaatagtgaggatctgcataagtcctctctgttctcatcatcatactcaccatcttcccttgagaggtgtgcgacagaatactcaattcccctttcttcaaattaggcttttttctcttctagagggtaatctatctcttcagaccatcttgaagtgaacttttttctcgggatagtgttaatcccgcctttaggttgagcttccttctccatctgattcagcttactcctaagttcctcaacagagtgagctagcctctctatagtttcttcttgcgtatcagacctctttttaagctcttttattttctcagtctcatacccttcttctgagatcactctgtcatttccggaggtttttccatcttcttttgacccttgtggagttttgttgatgtcaaactgcaacttgatgtgctttccaaggttgagacttattttcccttccctgacatctatcactgctcccactgaagctaagaagggtcttcccagtattaagggatccttatgctctacttccatatcaagaaccacgaagtctgtaggcacttctactccattaatcatgactagtagatctttcagcatgccgaagggttttctggaagacctatccgcaaggatcaaagtcaggtcacaaggtttatactgaataaactctaaccttcttgccgcactgaaaaaaaaaaaagctgtcagaggctcttagatcgcacaggcaat

SEQ ID NO: 35261 - DNA, 5077 bp, Arabidopsis thaliana landsberg
  unsure (1)..(5077): unsure at all n locations
ttgcatattcagattcttttactcttcatatggttcttgaaagcttaagtctgacttgttttttactctagcttatgtgtgcggagaaaagccgggtctcatacctgaaaaaccattcatcatggaagagattcgtaacgaaaatggtcttcaattggatattaaccttgaaagggagcttatgaagcatagattgaaagaactcaatgaacaagattgttccgaagaagacattactctttccatgaaagaactcggaatggaaaggtgagtgttgttgatgattgaaatatccctatataggttactcatcagaatggaagaatataattttgttattacgttaatgattagggccaagcttcatggatggcctaacacatatgttttcaccaaatcaatgggagaaatgcttcttggtaaacataaagaaaatcttcccctcgtcatcatccgtcccacgatgatcactagtactctttcggaaccttttcctggttggatcgaaggcttgaggtaagtttattatggattaggaatctaaatattgataaaaaaagttgaaagtaggattatgttagtccatagtgattaaaaactcaagatttcttgttcattctttcttttatttttttaattcttactaattacaattgtccacaatactggtatttgtatgtagaactgtcgacagcgtgattattgcatatggaaagggagtgcttcagtgttttcttgtcgatgttaactcggtctgcgatatggcatgttattaaacatgttcctaaaagaatttacaaagttatatgcctcatttcttatatgcatatttaagagagaaaaaaaattgaagaaccaatgtttctatgcgccaagtacacatgctaaatgacagtcatgttgacagataccagtagatatggtggcaaacgcaatgatcacggctgcagccaaacacgctggaggttcaggggttcacatggtgtaccatgtcggctcatctcaccagaacccagtcacatttggagagattcatgagattgcggttcgttactttacgaaaaaccctttgcgaagtcgcaatggctcactcataaccgtctcaaaagtgaggttcataccaaccatggctttgttcagcctctacatgaccctacgttacaaactacctctccaggtactaacatgaacaagagttttgtccttttagctaaatagaaactcaactatatatgaattactaatattacaagtttttttttcttgtagaatatactattctgtttaatcttgcgattccatagatgcttttaaaggatagcgtacttaagctaatttgcccaaaaaaaaaaaaagcatacttaagctaattgtttcaaaaatataccatttaaaattatatatcttcttataaaaaatattatcctatttataccatttataatctattctggttaaatttatacaatttaacaaaaaataaagctaaatattttcttatggcatccttttttttttttttctggcgatagtgttttgatctgtattgttagttcttcatttttgttcaatcaatactaaattgtttttcacagatatttttctctaataacgttttgatcttttagaacgaaaactaaatattttctcatagatttttttttgtagtgttttgatatgtattgttaattctttctttttcctcaatcagttattaaaactagttgacataatatatccttggagaaacggagataaatatggagacaagaaccgcaaaatcgagttggtgatgagattggtagagctttatgagccttatgtactcttcaagggaatgtacgtaaattaacttcaaattttctgctgtagaatttaaanctctataattttaatcgaaattataaacttgaactataatattttatactcacataatattaatatacatatttttcttgcagattcgacgatagaaatacaaagagtttatgcgcaaaccagaaggaagaggagatcaaaaatacagaaaaattgatgtttgatttcgacccaaaaggaattaattggggagattatctcacaaatatacacatttctggactcgtcacacacgtgcttaagaagtgaaattttatttatttctgcatgtatctgcaataaaacagatcatgatggaaaatattgtttgtttgtacgccaaacgtaattattttaaaataaaacttattacctatttttaaataatggtctcccaattccaataagccttcgatatttagattgtaacaaatttattgttttgctttacaaagattaaatttgtgactttcaatacgttttaatgttaggagatttgcacaactacctttttttactagttttttgcaataatatctttctatgtaatataattttaaaaatacttcttctcttaaacaaaattacaaaataaccttcatctaataggaacatgtaattaaaaactgaaattttcccggaaaaaaaaatttttccgccaattttttttctcgtaacaaatttttttctgagccaaaacaatgttcttaaaaatccttgtaaaaatgttttggctggaattagatttataagggattttaagcagattttaaaatatttacaagggattttaaaagggttttaaaagatttacaagggattttgaaagggttttaaaatatttacaagggattttaaagggctttaaaagatttacaaaggttttttaaagatttttaaatggtttaaaagtgttttaaaagatttacaaggtattttaaaaggatttcaaaagatttacaagagatttttaaagatgtacaagtgtttttaaaagatatttaaagaatttacaagaagaccctttaaaaactcttgttaatattttaaaaccttttaaaatctcttataaatatcttaaaatacttttaaaatctcttgtaaatcttttaaaacccttttaaaatcccttgttaatcttataaaacacttttaaaccctttaaaaatccttaaaaaacctttgtaaatcttttaaagtcctttaaaatctcttttaaatcttttaaaacccttttaaaatctcttgtaaatcttttaaaccccttttaaaatcccttataaatcttttaaaacccttttaaaatccattgtaaatcttttaaaacccttttaaaatcccttgtaaatctatttcccaccaaaaaaaaagttttgcgaaaaaactatttagcgggaaattaattttagaatattttaggcgaacaatattaaaatttcattttgttaacctaaaaaaatttccaaataggagtaaaatggtcattaaaaaattaaatagggtagaaataaaaataattaaaaaaaggtagagttgaaaaggggcatcatgaaaagggcattagaaagaatttttcaattttttttagtgtttaagattgtataattatattatgatttttaattttaagattttctccgtaatatatcatcccatgttattatccacccaaacccgtcccacaatataacaccgtcccgtgaagttaaacttaattttgtcattttcttataaatttcaaatatttataaatttgaaacttcaaaataaatttaatatcaatatgaatattgttttgtggaagttttaaaccattacaattaaagttataattgacagaatttttttaaacataatctacagaattctataatcaagtgtacacaatatatatatctttaaatgattaaaaaatcacataaatatcttcaggattcaaatttaataattatttgaacaggttttctaaaatttatcaaaagccaaatatattgaagataaaaaattcaaatagggaaatatattaatttaaaagatacaaaatatttaacaagaaattgtgtgattttttaatcaaagaatttgatataaaatcttcaaaacgatccgatattgattcttagattgaaattgttaaaatttcaatacagtataccatttttatgattagattgaaattgtaaattgactcgaagtatcttaaataaaaatattattagaaaaaaaaagaacaatatgatttttagttatcacatgaaggatttatatggcaggatgggtttaaaggaaacgagtttacatagtaggacgagtttgaatgagacgagtttatatggtgctatgagtgtagatgggacaaatttggataccacgggtgtactcctagaattaacaatcaaaccacaactatacaatattaaaaaaacaaacaataataacataacaaatacaatttcaattttaaaattttagttacaaaaaatacataaaatcaatattataataagtgttcatcttctttgacacctctaaatgttattcttctttgatacatttaaatgtgtaattttaatataaagttactaaattacatatgttccacgggtaaaatttgaaaacaccaaaagtttaaattatataatcttcttaaaagcaaaataaaataaaatattattccgtggtatggtctatcacaagtcaaatcttagaagataaaataacacatattagacttactaatatcataattatgactcaataaaaagcatacacaatcttatcgataattattaatctacacaaacaacaacaaacaacaaattctcttttgtgataaaaaaaataaaataaaatatttaattcgcagtataccgcgggtcatatcgtagttgtatctaagaatccagcaattattgtatctaaagccaaaaacacaacactatctaaaatccctgttctttgtccttctctttgtccttctccttctcaatttccttctctttagccttctcctttcctttctccttcttttccttcttctccgtttcttctagtttttatcattcaaaagcaatctcataatatttggttttaatatatttcacaaaccatctatgtagaacaaaattcactcggtctattggggaactgtctctacacgggttctatgggctttgtaaactccgggttggtcgcgtaaaccacgatttggctcacg

SEQ ID NO: 35262 - DNA, 492 bp, Arabidopsis thaliana landsberg
atataagcgtgagtaatcgcatgatatcactaatcggcccatatgatacagtagggccctaagttagtttctgcaaggccgtgaatggacttttaattaatttcacgaataaaccggcacgtagtgctactctgaaaaacaaaaactgcaagaaaacccagaattacaaattaatgtgaaatttgatcaaacagagaccacaaataggaacactttgtgaaaaactgactatattttgataatcaatctgttacatcttactacgataaagagaaacaattgaattcattgcaattcaaacaaagaaaaaaatcaccatagctttagaaccttctgtacactttaaaacgaaatcaagaactcaaatcagacttaaaggaacacaattaatcacagaaaaggaagaaggtaaaaaagttataactcatatagtcttcgtgagctgccaagttcttgaagcagctttgtgaaaagaaactcgagcgccggctt

SEQ ID NO: 35263 - DNA, 4036 bp, Arabidopsis thaliana landsberg
  unsure (1)..(4036): unsure at all n locations
tgattccatcattggcggcacaaattgttgccctatgtgtggatggtcttcagctccgtctaaaaaggtttctatcagcttaagtgtttccctcttaaccgatctgtatagcaaagaatcacaatacaaattattccagtttttccaaacagaggcatctagaacgttatttctggtgcataaagccatccaaaccttaagagttttacaaaagatgtcttggaagcatatggtcctccctcagtaatgttggttgacacaagctcactgtacattctggtgcagccatggaaaaaataaaatgatcatccacgtaaaagaactagagaaagagaaccatgactattaacgctataaggatgcatcatggatttacctgtatacattcaacatatccaagaaaatcaaggaaatttgggataagaagtatgttcccagtgaagtagcagcactagtattagtctgcagggaaaaacacatgttattagttggaccttacaatcaaaccaacagttgtgtaaacaccaacagatgcacaatcttaactactataatgacatgaattcacgtgatggaatcataatgcattgtgaggaataggtaagaaatcagacctgtaggatgtttagcactgtacgtatcacaacttgatccttgaggaattctacactgtggcgtgcctgtcctatgatttctgcccatttctacattgtataggggaacaattttagccagatatgtaaacaaaaatagccacattttaattaacatacctggttggggagtgccatcaacctctggagatattcatctctcttctgaggatctgattctgcttggatcatattaccaacctggagaaaagagaaacgatgagatcacaacaggaaaatttgctctgattggcatgcgaataatatttctggaaaacttactgattcataaaatgagtgtatttgatgaggctcaagatcttgaacagttgttgcaaggcctgttagaagttcagatacaaatggttcattctctccaacctgaaagaacaacgagctgtaattaatatctcattcagaagacaatggatatactaaaacctaacggtggataaaaatacagcaatacatacctgtacaataacgaattttcgcttgcacttttgaactattttcaagaatgtatcacaggccatgtcctgaaagggaaacataagtatcaagtatctgtgattgggaaggtgcaaggtctataaatctatgaaagaatattcagtcaaaaaagagacttcagatagcttgagacgattataaataaactacagcaccgtaattaacaacttgagcatatttttgctaccaatatattctccaagagcttaaaaatatattattcatggattttaacagcgaataacacatcattttatctgagattccacctggaaaactgtatctcataatatataaactataaagattgggaccagctacctgaacaccaggatgtgtttcatgcatgaattcaaacaacttgttcacaactgtcttcaaaaacttccaatgggcccttaagaatcttggatactggccaacgacatancctgcacccagcgacagcagaacagagaggtcatacttaaccagaaaaaatctaacatcgccttgaaagaaatagaaaatataagatgatagaagtacaacaacctaggcagaaattcagctgtagtaacaaacttacatgatgttgcttgcaataacggctttattgtcttttcccttggtaatttcacataaattcaacaaatcacgaatgaccatcaccaaaaacctgttttcctgaagaaaaaatggaatttaacaattgttagcacagaattaacaatgtaaaccttccagagcaaagtatggagcagtcaggccgataatgatatctcatgaaatgggaggttaatgaaagaaacaattaacattgaaggttgacactgtcaaactttcttgaattaagttatggcatactagcccacagatggagaggtgcagcattacaaacaagaacttctacggttatgaaaagaatttgcagtcaggtgaagcatagcaaaagattttacctgatcttctgccatagatccggaaatagacccaatagcccagcacaaagtgttcaaattgttccatgcccattcctccccacttaattgtttgtttagcttcctcaacatcttttaaaggaacaatccgaagttcacatcagcaaaacagcatggaacagaccaaagtaagcttacatatctaccagaaaatctcatatcttataacaggtccatgttaaaattgctaaagttagcagtactaatatgataattcacactataacaaggagaaactcatttgataaaaagcatacttgatcataagactgctaatcctcaatatttcacaaattaatacgcatagaccggtatcatcatggtgacactgtacctgcttctcggtatcatcatggtcaaggtgtgagaggtagattaatgtctcccgcattatctgcatttgttcaaacaagaaatggggaagaaatcaaagaggatatccaaagaggattcaaataaataaaaaattccttgtataacatcgcactgttggtatatatctaagacatctgaagaaaagcagtatgaactggacaagaattgataccttatattggacaagaacatcattgtccttcatggtttcacgaacgatgttcccattttcatcttcaacaataagcacttcttcaggcttcgccatgcggttaatcattaaccctcttaatttggacattgggtgagaataaagttgacgccgctgcatgacttgagaaccaaggccatcaaccataccaggaaggaaaggctgggaaaattgcaagtcaacgcccaaggtgagtaaccaaatcaaagcaaggaaagtttaaccaatacaatatataactatagtatcaaccttaaataaatgtaaaaaattgatcatattagtcaaggaatccaacgtacctgcaaacccatcaggcttgcacttactgcagggttatcagaattatgatgcgcatcaaatagctccaacaccaacgagttccaatagtccaaacaaacctgctcaatccacaagcaagcagaaaacgtcatctttcagacacgaacaaaagcacataagaatataattaaggaaaaaattaacatacaactctatcaacagcaatcatattaacaaagacaatttaggtaccttaaatacttcagtgtcgtcaacataagatatattaatgagatattctagaccagcgagtaacaaagagacaacttctggcgttgattctaggactcgaatatgaaactgcagagatagtagtgaaatagttaagaaatagatgatgaaacaataattactggaagcattaacacaaatcattatacatatcaaaatttccataaacccaacctgacatatctaactcaacaaagaaagagaattacctttataaatcgaagtgaaaaacagtgccaagttctgggtaagagcctaaaggtaaagaagatatacagtcattatctcgaaatgttacagtaaaaatggaacggccagaaacctaatgcacagaaaaacacttgcctgttcttcactacttccagttgaatatgcctcagggatatttaaatttaaagggagaattgcctgcagacatgaaaacaagtatgggcatcaatcaagaagcaacagtaacatgaagtcaatctacatgtagtacagaaccagtaaaccaccataaggagtacattaactaattaaaagtaaaactctatagtaggacatcactgaacaaggccatgaaaacaaatagaagtaacaaaacaaagataacagcactacctgcaactgattcatgaaaatgctgtacatcttgacatattgcatatcgtagaagtccccacaattaagagatgcaacctgccagaaaaaaaaaaaaggtagttagataatgacagtaaaatagtgac

SEQ ID NO: 35264 - DNA, 2218 bp, Arabidopsis thaliana landsberg
gatcaagtaatcacccaacctctcgacaaccatgttgcattgtcctggagtcactggctcttcgtacagaccaaccaccattgattgtcctgttttcttgatcgtgattcccccagctccctgcccaagttccaattatattaatggttttgagtttcaaaccaaattcataacattaaatatttttatgataagcttataacttcaagaatgtaattatcatttcaagaaatgtaaaagtttaggagtgcaaaatcatcgactatatactatgtaccaataccatataatcgatgcttttggtaagactttgaattgcattcataacatcaaatactatcaaaatgattagagtattgaccatttttgcatgagattattctcttaatcatagtcggctctatggagtgcaatgggaggggttgattctcataaaatcgtaggcctcaattgttttaagcgtttgcatgtgaatcttttttattataaaataattcaagtttcataaaatatttttcgatcccgatcgttgctaggccttaaacgtcgattgtttcaaatgcaatggtatacatttgcatttaacatgcgaaaagtaaaattcacatatttaaaaatataaaacaatatatgtaaggatttcttagattatttttgtagaatgcaaacacaaacaatcgagcgttaatcctaaacataccttcttgccacggatgacagcattaggctcgccttggatgaccatatactttagccctgcgaggaacatacccgtgggagcgaggtgaccaggctcatcgaaatccttcataatgtctgtgatctcttgaggtttgaactatttgaagacaaatgaatcatcagacttttaacgttgaactaaatccggaacaatgaacttgatgcaaatggtgagattacaaatcaaagttgatcagctcatatatattatagatcactataaatatgtccatatatacgtaacggatagaaatagcaagtatcaaatcatatttctctacataaaagatttaagaccaacgaaaccaaaacatgatcgatcgataatagaggaggaggtaattatacctgaggaaaattagcgctctgagcccaaacgctaccatcatggccgatgatagcggcggcggtaaggtggtgaccttggccgtcgccgacatcacacatcaaatgctcatcaacgtatgcttgccacgacattctctctgatttcttcttctttttgcttttactctgcgaggttgggtattttggatctctctacgtatgtatgtgtgtgcaatgcaactcccagggggacttggtcgtctcgataaatagggagcgaagaagaatgttgtaggatgaagtatctgccgttggattcattagacacattctcagccgctcattttttattattattgctactgacgtctcgcctttgttatagcttaatcattcactacatgcacgccacgtgtcttttcttccctatgctaatttcctcctaataataacgaacaagaaggatttcaggaaataataacagtattaaactattaatatttgtttagcatatatgatcaaaagaccaaggaaatgaacaagattttgtaagaaagatgttgttttgtagctcaaaaaagactgtctcaatttgaatttggatctttatagtttctcgacacagtttggatttactctttgagacattgtgccgtaccaaataacaacatagacttagattctagctaaaagaaccaatgtatatgtctaaacgggatataattaatggatatcatgatcattttagtgaccgatcaaactattttcagaagagttgttgtcatttctgctaatttgtccctcttctgatcggtcgaggtgacgattgatctgatcatagctgatcggcgatcgccatgatgttttctccaattttccacatgcttttttcctttaatccaaactatattctcaaatttcttgcaacaaaactaactaaatgcatgaaaagactatgaaactagtgttttatccgatctatagctagttagctactcctaaattatctactagagcatttaatttgaatcgacaatacacgaagattagttaaatgatttttgttgtggtctactataatgcggatgacaacaagactgattagtatagtatacaacgaagagggaaaacattgatataacagggatga

SEQ ID NO: 35265 - DNA, 2173 bp, Arabidopsis thaliana landsberg
aaaattttcactagttgaatcattataatatcgaaataaaattgagggctctttttgtttatttgtcatttggttatttaatgtagggatacaagaaattgagggtttctttgggacaattgaaagctgcaaactttgatgtacttgaggaaaaatggacccttttgcgtctttaatgtcgatctctttctctctctcctatgtttttgtatataaatatgctataataatttaaagacgaatcccaagaaaagctaatggtgagtggaaggcaaaacacatggtgttcctctgtcatatcacaaaccaaacaaagataagaaacaaaaaccatgcaatagagtcatctcaggctactagttagtgtactcgtacatggtgtcaaataattttggcttagtcaaattcgttttgagtaactactagtatttattatttgatgtttataacaagcatgtatatgtttatgaaaattatgaaatgggtttgggtgataaattaatattgtagttatatatataactgtgtactattgtggagtttatttataaacatagaatgatgggtttaaaacaaatctttaaaacacgcggttaaaattacgaaatccagactgtggtcatttgattgtctgattaagagtatgctcagctaacacaacttggtgaagtagaggcatatgtatttgattcatggagattttaaatttcattatatcgttggctatatgtatatatgtagactgacctgatttctggataaaccagtctgtcgagccaataggtgtttatctgcatcacttggatacctgagaaagagaccagaaaatgacatcactctctatctttgccctaataaactcaatgtaatttattttctttatcttttcactatatacaatacaatcaagtagacgcaagaaaaagtacagactttttcctaacaagggcgtgagaatctaacagacaaaagaaaagttgatgattacatatcatcgatccagttttttttttttttacttggctttttttgttttgttttactcttaaagcaatttgtcagagaggtgaaaatagtacaaaaacactactcttttgctttatttccattttttcgttcactctcgttaacaataaaatagcaaaattctagagacatagtactaaagaaagtagaggtgaaataacgagaaaataaatactttttctcagcttttttcaaaattcagtttctctataataattaataaataacgagaaagaaagaaaaaattgacttacgggtgaaggaaatgttcgaagagccaagctctaagtatattgacggagcgttcaggcaaaccgcgttgtggccgccaagcttcttgttccatcatacccatttgatgaaacgcacgttgctgacgcaaactttgctctagcaaacgcaaacgcggagtttcaccttttgttaacccggaagaagagattcccgctgcatctttgtccccaagaagttcgcaactctgcttaagctgagccgcaactgcatctttaaggcatctaaaatgtcttgacatagctttttgagccaatgcggtatacggtaatgccgcaccgtggcccattactatgtcgaaagagttcacaaccatctgcatttgctcgcagtaatggttgtaccgtcggtccacctgccaacgaaacaaaactatacattatacaatccataaatatcaatatttgcctttttcttttaattaatgttattgttaactcgtgtgtgttgtgttatatgttcacgtgattattatttagtgtagattttatcacgggaacctatgcttgtgtacgagcatcatctaataaataaactaatgagattaattagttacctttaaacgagacaaaataagaaaataagatattatatagacaaattattgaccagagaatatacttcaatgtttgcgcaatcctaccaacagcacattttatcgtatcctcgagcataaactaaaatatttatttctagtgagaaaaaagcaaggtcaactaaaaagtagataattcaattatgggtaaacaaataagtaacgtcaagggttagctttaagacgtaactggagagtagcttatatggagaagggaaacgccaattacataattaatcgtaattattttatgccatttct

SEQ ID NO: 35266 - DNA, 2462 bp, Arabidopsis thaliana landsberg
gaacaacccagcatgacaaggaaacttttgatgtacttcaccattttttttggctgcaaccgcatcattacttcaatttttcctttgtcaacctctataccttttctgatatcttgtgacccaacactatgccttccttcaccatgaaatgacacttttcccaattgagaacaaggttcgtctcttcgcacctggtcaataccctgccaagattcaacaaacatgaggagaaagaagggccatagaccgaaaaatcgtccatgaagacctccaccatctcctcgattaaatctgaaaatatagaggtcatacacctctgaaatgttgcaggagcattgcataaaccaaatggcattctcttataagcaaaagttccataaggacatgtgaaagtggttttctcttgatcattagggtgaattggtatttgaaagaaaccactatatccatcaagaaagcaatagtatggatgattagctaagcgttcaagcatttgatcaatgaatggtaaaggaaaatgatcgttcctagatgcagcatttagcttcttataatcaatgtacattctatgaccagttataatactagtagggattagttcatccttttccttttaaactacagtcattccacctttttagggacgcaatgcactggagaaacccaagtacaatcagagatagggtagatgacaccagcatcaagcagtttcaaaacttcttttttcactacttctttcaagttgggatttaacctcctccgtggttcaatgctagagtaggattcattttcatgttggatcctatggttgcataaactaggtgaaattcccgtaatgtcagacaatgaataaccaattgctctcctatactttctaagttcagataatagcaggttcacttcatcatcatttaactctgcattaatgatcacagggtaagtagagtttggaccaaggaatgcgtaccttagacctttaggaagtggtttgagatcaacattcggtgccttgagttcagaccagtcatctgaagttggaatgatcagctctctagagtcgctggcagtcgaggtcgagtcattggtcgagtatgttctcgagtgtgcaggttgaacttgtgttgacccttcttcgctcattaccattacctctgttgctggtccaatcaattcctcaaagggttttgattcttccaacgctttatgggagtctaacagcttctggtatcccaaagttttcaaatgcagaaacccatcttcgccacttttggttaacgcacagttaagatgatcttcttctgccagctcttctagtaactcatcagctaattgatccatttcttcgatccaaaagagttgccctctatggtaggcttcttcattgcgcagtttcaaaggtcatcctaaagtctttgccaaggtttagatcaatcttccctttcttgacatcaatcatagctcctccagttgctaagaaatgtctccctagaatcaaagggtccttgggctcttcatccatctccaggactacaaagtcagttggtatctccacagctccgatcttgattggtaggttttcgagcaaaccatgagggatccttactgatctgtcagctaggatgagggatatattgcaggatttgtattgagtgaaccccaatcttttggcgacagagagcggcatgagactgactgatgctcctaaatcacataggcatctgttgaaagccaatggacctaaagagcatggtagagtgaatgaaccaggatcactaagcttcttaggaatgatcttcttctgtattttttgaattctctccacgatcgagtctttcagaaacttgtgagagtctgggattagcgctagagcgtcaacaagaggtatccgcaacttaacctccttaatattcttggcaaacatagctctatacttatctgccaacactttcttgtgacggccaggaaatggaagctgtggtttgtaaggacgaggaacaaagaccttttccttgttcttgacagcaactggttttggagcagttagtgatgctgctaggaagataggtccagttgttggtcgagtaacgtggtcgagtggcagatcgagtggttgctcgagtggctggtcgagtggttgctcgagtagtttttcagcttgatctttaccgagacttaaatcctctccatcttgatcttcaacgtcctcagtgactgtccattgttcctccctagttggaagtgcttttccactacgcagagtgatagcgtgagcatattcttttgggttctgaattgcttttcctggaagttggcttatctgttttggagcaaaggaagatgcagaatgtccctctaagtatcggactttggtattcagtgtttccaccttgacattgagatcattgtagctacagtccagcttgttatgtaactcagatatcttctttgccattttcatggag

SEQ ID NO: 35267 - DNA, 2510 bp, Arabidopsis thaliana landsberg
tctgaaattggtcccccacacctctaaatttttgaatcgtttgtattttttttgttactaaatacaaaataatgtaaaatttaaatttgtacggctggattctcttatccgatctatcgcatgccaatttcttcagggaccacaattagaggaaatcgttatcacgacacgtgtcctccgatatttttggcgccgagtagtgacgtcattattaatggtcccctccttccttgcttttttcccattcgtctactctcctttttctttaacaaattatcttttttttcctccgatattcttcaaaatttgttttaaaatcctttgcagatttgtgtaatttatttacttttgcttggtaccaaaaacaaatagagcaaaaatgagcaattctttttgataagcagaaaaaaatgttaggaacgaatgaagaaaaagtgatgcagctatttccttttactgtcacttcgtaattcgtatcattcttttgccgtcaacttctaccatctcttttttttgtaaaacgataaaactttttgttgtcgcagtaaatgttagtaatctgacctaatcccatttattatggatcaccaaaaagctggtactctacaatttaataataaaagaagaagaataaatataggaataaatcgtcttttttggtgtaagctacatataaaattcaaaccgtcaaacacacatacacatcgaaacccttatatttcattttctttctgttttagagaagaaagtttctataattgattgataaatctgaacatcaaagctaagaatttctcttctttttttcttcttaattcatctttccctctccgaaacagaaattcaaaaacaaattcaacacgaaaacgatggcgtttcataacaatcactttaatcatttcaccgaccaacaacaacatcagcctcctcctccgccgcaacagcagcagcaacaacattttcaagaatcagcaccccctaattggctcctccgctccgacaacaacttcctcaatctccacacagctgcctctgccgccgctacaagctccgattctccttcttccgccgccgctaaccagtggctctcacgatcctcatccttcctccaacgaggcaacaccgcaaacaacaacaacaacgaaacatccggtgacgtcatcgaagacgttcccggcggagaggagtcaatgatcggagagaagaaggaggcggagaggtggcagaatgcgagacacaaggcggagatactgtctcatccactatacgagcaacttttgtcggcacacgtggcgtgcctgaggatcgcaacgccggtggatcagcttccgaggatagacgcacagcttgctcagtctcaaaacgtcgtggctaagtactcaactttagaagccgctcaaggactcctcgccggcgatgacaaggagcttgaccacttcatggtaacttaacttctctttccttcttaccactctcaattcccattattttattccttttcttttcttttggaaaataaaatcattaaaaattattttcatcttttatatttaaaacggtttgacaaatttgaatattttgttgttaattatctccaaatttataaaagtaaattagagaagaaaatcaaaaattctttctagacttgtactttgcaccgacagacatgatcagtgggttggataaatcgtcagttaaaaatttggatattagttttgcacagtagtaatttgacagcataaggtttattttgagatagatttttgctgagtgtaagtgattgagcaatttcattgattgcagttacggatacagtgatctgacaaaaactagtttgtcactttctgtatctatatcccatattttactgttcatggacgtatttgtatgattgtatctgttgtctgaaagatatttccatgtttttgtgcagacgcattatgtactattgctttgctctttcaaagaacaactgcaacagcatgttcgtgttcatgcaatggaagctgttatggcctgttgggagattgaacagtcgcttcaaagttttacaggttagtttttaagacttctactaaattatcaactttaatttgtcatttagctgttatggtaacttttgtatttcactatagtatggtaaaaagacacaaggttcttttattttatttctcatttcaatgctgttttttatatatagtacctacttcttgaggttttaatttaacacttgttttgttgaatgagacaggagtatctcctggtgaaggcacaggagcaacaatgtctgaggatgaagatgagcaagtagagagtgatgctcatttgtttgatggaagcttagatgggttagggtttggtcctctagttcccactgagagcgagagatctttgatggaacgagtcagacaagaactcaaacatgaactcaagcaggtaactagtgaaatatactatatccatcattaactactacacatatataagatcaatgataacaaatccttcac

SEQ ID NO: 35268 - DNA, 4773 bp, Arabidopsis thaliana landsberg
agccgcgttaattatgtgttatcttttatctacaagaagcggggcttgggcgacatctaccttctcagaaagggagctgcatcaatggcgaccaataatgattttggagctttcattgagaaagttacaatctctccaacttctacttcctcgtcgcctccttctctacagggtcttactttcgccattaaagacatgtaagatatccaactacttacagtgtttcttctatactttcttgtcaatcaatttttgagcttattgcttggtttgatcagttttgatgtggaaggacgcgttaccggttttggtaacccggattggttaaggacacactcggcagctacttttacatttccagtagtttcatctctcttagaagctggtgccacatctttgggtattaccattatggatgaaatggcttacaggttcaacttcacatcttttctggtttaggagttcatgttttaagaaacaggatatgtcataacagaggctagaactaaaatatgactaggtttgttacgttttttctgagcatgttcttacttaatatgcagtataaacggagaaaatgcgcattatgggactccgagaaacccgattgctttcgatagagtgcctgggggatcatcgagtggctcagccgtagctgtagctgctcgtcttgtggatttttctattggtgagctgaagaaaaattgccaaaagttgtaaccatactactgatcataaagtatttttcttccctgtctaattggtttttgatcaatcaggaactgataccggagggagtgtacgagttccagcatcttactgtgggattgtcggattacggccatcccacggtgcagtttccactgtcggacttactgcaatggctcagagctttgacaccagttggtaacgaaaccgaaattccgagatgttaatggttaaactgaatcttgatattgatggatccaacattgtctttaggatggtttgctcgggacacagccactttgaaacgtgtaggttgcgttctcctgcagcagcatcacttgaaccccatcgaaccatctcaactgattatcgcggatgactgcttcaagctgtgtagtgtaccgcatgatctcttggtgcagcctctggttggatccgtggaaaaatcgtttggaggtaaaaagcatcacaagaacttgttgtcagagattattccttgatgattttgttacttaatgattttgttctgtatcaaggcaacactgtagtaaagaaggtgaatcttggagagtacattggacagaatgttccaagccttaaacatttcatgacaagtgacgatgtcactacacaacaagagttctgcattccgtctctcatggccctatcgagttcaatgagattgttacaaaggtacaacatttttctcattttacattctatcgatttctaatatattacataggcataaccaaagtttagacatgaattcaagataaaccacggtgcatggatctcgtcggtgaagccagagtttggtcctggaatatcagaacgaattgaggaagctatcagaacatccgacgagaagatcgaccattgccggtccgtgaaatctgaactgataacggctctttcaactttgctcggggtacaactaacttattcctttttctccaaattcagtttaaacacttacagtagaccggttttatgtaaatcataccaaattttgtaggagaagggtgtgttggtgattccaacggtaccaggtcctccaccgcatctccaagctaatgtggctgcacttgaatctttccgcagcagagccttcagcttgttgtcgatcgcaggcgtttctggattctgtcaggtaataacaacatcaatcttccttcttgtggagtctgttaagaactggtctgatcttccggtgtttttttcccatgataggtgagcataccattggggctacacgaaaatcttccggtttcggtatcattggtagctaagtatggctcagacggttttcttctgagtcttgtggattcccttgctgcatttatttgattgacatgtcataaacttaatgcactttgagcatatctattttgctttctgtttattatgtcatcgtagcatatctgaatggttttcttgtcccaaacccaacaatgtattaaataaattgttgtatatgttggacaattgtactatttgtcttttagcgaagtattaatgacaacttaatattaactagatttcttgttcttaatagtgatttttaaagttcaaaatattaatgtcaataataataggagttattgtaaaaactaaagaaatattagatgtcaaagaggtcttgtgaaaagataatttttataatataatagagtttatgtttcttagatattataatattaatgacaacttaatattaactagatttcttgttattaatagtgattttgaaagttcaaatattaatgtcaaaaataataggagttattgtaaaaactaaagaaatattagatgtcaaagaggtcttgtgaaagataattttttataatattaatagagtttatgtttcttagatattataataattttagctttaaatatgtaggaatactttttcaaaaaagactaaaaataaggttattgtaaatataattatagcgtggtacgagtatatgactaaaaaaaatctaattgtcaatgtacttctaaaacagaaagtggtgaatttagaaaatgtaattgctaacttacaatatatatctatatgtgctaaatttagagagttgtatttaataaaattaacatggttcagataaacataaactgaacataattttgaccaagaactgtatataaaatatatgcattgaactcttcaaacttctcaatatttcatttttctaaaccatttcttagttatatctagaagaaactcaaaaacttagtaaaatggatccgaatatgatgatagtaaaaaccctatcagagaccgattgttctcatgataataaattgattttaccaagagataaggttgagaacatagtaagaagcacgggagttccagtacctcgaatgggtattcaagtagaaattctagacaataccaattcctattgggtaaatcttagacaaagccaaagaggttattttatcggacgtgggtggggagaacttagagatgcaagaaatcttaaagcaggcgatgtcatcaagttatattggcaaaataccaaatttatattttctatgtaattttattttatttcttttaccgggaatgttatcttacattcaattcaatttcttaataaatctatttaactaatcttttgtctaataattatatcttggatggttttatatgtttcatacaaaaaagttgcatttcaatttgtcatctaaattatggatattttgttagattttttgttttggatcgatacaattgttagtcaaaataaattatgttttgacaaaataaaataactctcatgttatatataatagattgtgacctgcgtcttaacactaactcaaatgcttaccattgacgattatgttaacacatatatgtatactataaattctttatggttcattatatatgttgtttagagcttcagcacatatattaataaatcatttaatttgttgtttttcctatttcaaattatgtgtgatctacttaaaaaaattatctaacgaaaaaacaaacagcataattttaagagtcaaaaactataaaatagtaataatttttatgataaaatttgaaagcaatttttgtttgcttctacaacttttataacttttataataattaacccaataatcagcttgtatgggcgcatacctgatcatcaccttatagcgattgatatagatttatcaaccgactaattagcaataaataatttaaaatgcgatttgaatgatttcgtccacgttaacgacaacaaattcacgtagctatagccaacaaaatatgttataaaagcataaatgaactaccaatgtttgtttaatgtttgatatcgctatttaaaaacaaaacaatcacaagcttggtcaccaatttgatatatatccgatatacctgtacctgttgttcaaactaattcttaattacaacacaaaacaggcgcctaacttgcgcatggaagtttattacacaattattcgtagactcacctaacgaattgacttctacgccaacgtgcgtccatgcatctcaagatccttcttcaatcatacacccatgaattcgcacatatacgttgatgtatatgagattatgaaaaattcacgtacacattacatgtatcttatagacatcgctaagagcatagagagagagagagttgggggaaaatgggggccaaaagcaaaagttcgagtacgagattttttatgttttatcttatactaatatcattgtcgtttttgggtttgctcttaaactttaaacctctgtttctgctcaaccgcatgatcgcttctccttcgatagttgagattcgttattctttgccggaaccggttaaacggactccgatatggctccgactcattagaaactatcttccggatgagaaaaagatccgagtgggtcttctcaacatcgcagagaacgagcgagagagctacgaggcaagcgggacgtcgatcttggagaatgtccacgtgtcgctcgatcctcttccgaacaatctgacatggacgagtttattcccggtttggatcgacgaggatcacacgtgg

SEQ ID NO: 35269 - DNA, 7052 bp, Arabidopsis thaliana landsberg
  unsure (1)..(7052): unsure at all n locations
atttcttaaaaattcgtatgttttgggaataaaaatatgatcatttttttaaatcatcttcttattatgagacaaaaatttataatctgtattctgtagttgcaataatgttgtagaaaattcatatctttgttagcaaacataataattttgttggtaatattaagttgagaagtcaggtttaaccattttaatcgctgtcattttttttattatctttacttcattagaatctttttttgttgattagaaatttcaggttttatttcgtctttaaggaacttaaacttttgtgtaattataacagccaaagcctctgaagaatctagatggacaattctgtgagatatgtggagatcagattggtttaacagtagaaggagacctcttcgtagcttgcaatgagtgtggttttccggcgtgtagaccttgctatgagtacgagagaagagaaggaacacaaaactgtcctcagtgtaagactcgttacaagcgtctcagaggtaagttatttattaatctccctctgctcttgtgttgttcgacgaaatgcctctatgaaaatttaaaaaggctgttcctttttttagtttgaacttggagagtaatgatctgttttttggtttctgaaggaagcccaagagtggagggagatgaagacgaagaagatattgatgatattgagtatgaatttaatatcgaacatgaacaagataagcataagcattctgctgaggctatgctttatgggaaaatgagctatggaagaggtcctgaggatgatgagaatgggagattcccacctgttatagctggtggtcatagtggagaatttccagttggaggaggttttggtaatggagaacatgggcttcataagcgtgtgcacccatatccatcatctgaagctggtgagtctcatggaaatgttaacttacatatagatttaagaatgtctcacagtgatgattagttagggtcatgcatatctccatatgtgcaaataacataagtatgaggccttccagcttaatagtagatagggacatagtttcataaacatggactttgggttctattacattctttctatgaaattcatcagcagaccctttttctaacaatactttcctttttgtttatgtgtgtaattttaatgtggtagggagtgagggaggatggcngcaaagaatggatgactggaagctccagcatggaaatcttgggccagaaccagatgatgatcctgcgatgggactgtaatgcctccagaagatttatttaagacatcagttttgtatgatccggattcatgcttacaaaattttggatttgactggaaatggctgtaggatcgacgaggcacggcagtcactctcgcggaaagttcccattgcctcaagcaagatcaatccatatcggatggtcatcgttgctaggcttgtgattctagcagtttttctgcggtataggctcttgaatccagtgcatgatgctctgggattatggctgacctctgtgatctgtgaaatctggttcgctgtctcttggattcttgatcagttccccaagtggttccctattgaacgtgagacctatctagatcggctttccctcaggtaaaatccacagattctcaagtagaagtcttaaaatctatgacgttggagtttggatgtaaatattttttgtttatacaggtacgagagagaaggtgaaccaaatatgcttgcccctgtagatgtctttgtcagtacggtggacccattgaaggagcctcccctcgtcacatccaacactgtgctgtcaatcttggccatggactacccagttgagaaaatctcctgctatgtctctgacgacggtgcttcaatgcttacattcgaatctctctcggaaactgctgagtttgcaagaaaatgggttcccttctgtaagaaattctccatagagccacgggcaccggagatgtacttcacgttgaaagttgattatctccaggacaaagtccacccaacatttgttaaggaacgtcgagccatgaaggtcagtgtatatcacctgatctagttataccaccacccatcttttcactataatctaaacttcataagtgaaattgacatatgacagagagaatatgaggagttcaaggtcaggatcaacgctcaagtggcgaaggcctcaaaggttcctctagaaggttggatcatgcaagatggaacaccgtggccagggaacaacaccaaggaccaccccggtatgatccaagtcttcctcggccacagcggaggatttgatgtcgaagggcatgagcttcctcggcttgtgtacgtgtcccgtgagaagcgtcctggttttcaacaccacaagaaagctggcgccatgaatgccctggtaattttcttgatctgccttggaccaaacaagaaactgatctccgtgtcttggacctaacctgatacttctgtcaggttcgagtggcaggcgtactcacaaatgctcctttcatgctgaacttggactgtgatcactatgtaaacaacagcaaggccgtgagggaagcaatgtgttttttgatggatcctcagattggaaagaaggtctgctatgttcagttccctcaaaggtttgatggcattgacacaaacgatcgttacgccaacagaaacacagtcttctttgatgtaagactcaattcatatttttccaacttctggtctaaatgaaaatgtaccctcttgcttacactcttgtttgctacagatcaatatgaaaggtctagatggaatccaaggtccagtttacgttggtactggttgtgttttcaaacgacaagctctgtatggttatgaaccaccaaagggtcctaaacgtccaaagatgataagctgtggttgttgtccttgctttgggcgccggagaaagaataagaaattttccaagaatgacatgaatggtgacgtagcagcccttggaggtaaattatcccaacaaccttataatatcagtccattcttgcagtagatttcgtttatgttggaatcttgcggatctgatagtgttttttggcaggagcagaaggtgataaggagcatttgatgtctgaaatgaactttgagaaaacatttgggcaatcatccatctttgtaacctcaactttgatggaagaaggtggtgttcctccgtcatcaagtcctgcagtgctccttaaagaggcaatccatgtcataagctgcggttatgaagacaagactgagtggggaactgaggtaataatactgaatcgtagaaatcaccttcttatttgtgatttagtagctggccattgtaaaaaacgtttgtgtatctcgaaattgcagctgggttggatctatggctctatcacagaggatattttgacgggattcaagatgcattgccgtggatggaggtctatttactgcatgcctaagaggcctgcattcaaaggttcagctcctattaatctatcagacaggttaaaccaggttttgcgttgggcacttggatcggttgagatatttttcagccggcacagtcctctctggtatggctacaaaggaggcaaactcaagtggcttgagcgttttgcttatgccaacacaacaatctaccccttcacatctataccacttcttgcctactgtatccttccagccatctgtctccttactgacaaattcatcatgccaccggttagtaaaattatcagagaaaagcacttagaagctgcatcaaatgtgctaactatctgttttcccaatttttctttcagataagcacatttgctagtctcttcttcatctcactgtttatgtcgatcattgtaacgggaatcttggaattgagatggagcggagttagcattgaggaatggtggagaaacgagcaattctgggtcattggaggaatctcagctcatctctttgcggttgtccaaggtctcctcaaaatcttagcaggcattgacacaaacttcaccgtcacatcaaaggcaacagatgatgatgactttggagaactttacgcattcaaatggacaacactgctgatccctccaacaactgtcttaatcataaacattgttggcgttgttgcaggcatctcagatgccattaacaatggatatcagtcttggggacctctatttggtaaactcttcttctccttttgggtcattgttcatctctacccattcctcaaaggtctgatgggtagacagaacagaacaccaaccattgtggtgatttggtcagtgttattggcatctatcttctctttgctttgggtaagaattgatccttttgtgctcaagaccaaaggacctgacacttccaagtgtggcatcaactgctgaagcaaaatctttttcgtcttctgaaactttttctgtactttgtcgagagtgttttcacttctctctttggattgcataattggattttgtttattgtatattagccagtaaaacagatggatctgggtttattgtgagcgagtaatgcattgtaagaaaatttgaacaaaactactttttagttacacagtaaaagattcacagatacttccctcaagagacatgtagttgcagtgaaaacccacaaatcttgaatgcaaatttttaacagagagcctgagacttgttcttatatcgtggagttcacaaacaaaataaagaaacgacaacaaaagcctaaacacacgcacacatctcataacaacttctcaagctgaatatcatttgataacattaaaaaacaaattgaattgcctgagtttgtttagttaaactctcccctcttattctttcgaaacaccaaggaaccacaaggagagatgagtcaagtatggctcagcctgggagcctttgctcaagactggtcctaagctctgcaactccgagttgaactccctttcgaaattgctggtagaacacgtaacagacatattagaacaataccgtgataatgaagttcaaaaattctaacagcaacggcttttgtagagatagtgtagccattagtttgaaaaacaattccttgttactacttacaatatggactctgtaacggttgtgtctcttatcattgtcttctgtggatgagactggctattgatgtcgatagacgatgatatcaaccactgtgtggctgcagcatattgcagacacactgatttcaacttctccattttctgcaccatcagtaaatatgagtgtaaaatattgataaacattacactattattagtgcgttcagaatttttgctcttgttgcacgaaagagaagcacatcacactgttacatctgtcctgagaaaacataacatttagtggaacagcgacaaaccttaaggacgtcaggtaaaagaagcaagcatcctctcagacatttatcaagaaaaaagtcgtgatgttgtatcacctgcaagatgatggcacattgttcaatgaagaatgttttccctgcaaaccaaaacaaagcaggtctctacacttacctcatctacactccttgtggattgtagtctatcgtgcattacatgccaatttggttcgagaacctgaagagacatcccacataaagacaagcaaaaacaacattagaaaaacttagagaggcaatagttgctaaaataaacaccaaatcatctcataaagaattatgtctttatatacttctggtgtgatttctctcctctgttcattgatagtgtacttatttctccagaatcacgttttcaagaatgtatttctcgaaaaacacagttgcaagaagtgcctacatttgtaagtatggtttttacgactacagagatatctggattcaatatacagagtgtatgtcagcaattctagaagttagttttccagagacttacaccgcaaaatcacaatggaaaacaggatctatgaatagacaatcagaatctttaaaaaacaaaaaaatattcagattccattctattagcaaaaaaaaatgttttaaaaaacaaacaaaacaaaacaaaaagaacattcagacttgcctcgaatgtaagataatgtagaaggctactgatgaatttaagcatgctacggcagagaagcgatgatctaagaattgctgtacccttagagttcatagaccgaatcccctgtagaattttcacagcagtttgttagcgaagcaaaatgattaaaatggttttagaagaaaccaaaactgaaacaaattacaagctacacaatattatatcagtccttacttgatgtatctgccaagcaccacaaagctggcgttccacatgtttgcaatgaaaaagaaagcggaaaattaactggtactttgacaatgctttctttgatatgacaatagatagtggccattgaacctgaaacacaaagccacaaccaacaatcaaacaattgagtagccaatcgaatatgcatttgtcgattacttatataagtatgaatgatgactctagaaatgcattagtagttatatataacaaccattaatagccattaagctgtgttattacttatatatatctcgacgaacaaaatagttcgaatccagatacaaacaggtagttgcagacaaggcaagaaaggagcagaccttgtagctcaaggaaaatgtctctagaccagtgatgctcattgggtcctcaatactattgctatcagtgtccttgtgcattcccaaagtcgtaagcaatgaagctcgatcctaagatatgaatacaaagtgagaacatataatgtacaaactctgtaaattcatcacatccaggaaaagacaaattaactgctcaccacacaacaagtcaagtcttcgtggcgaggatctgctgcagccgctgtggtacgtagagcaagatctagcaaagactaaataatacacatccatttagattccagcaaagaagtagaggccataacgatttaataatggtaagaagctttgtccaccattttgaatcatgctctaaaggggaaaaaagaacctgcaacttttcaacagatatttcatgcacttttttgg

SEQ ID NO: 35270 - DNA, 2840 bp, Arabidopsis thaliana landsberg
tatttcatcactattactctattagtctgaccaagtgtctaaattagtatatctttttgtcggaacttgaagagcatttatatttattacttaattaaccaataaaatcttctaagggtgccattcacagggacgtggatccgcctctgcccactcagagtcacgcataggtatcacttgatacgacgaccacgtcgaccaggactgggccaaggaaaatgattctttcaattattgttgctttgtcattttccttcaaatttacaaacaatttcttttatggaagaccgaagcctagcaattataattgatttgttagatagttgagattttaagatttacatgtaaactaattttaatgacaaaactgtacgtcgacgtatcataaaaagaaaatgattgagttaaataacatgttacggttttttcatatacgtttgagattaatatttttttttgttaaagggtttacgtttgagattaatatttttttttgttaaagggtttacgtttgagattaatatttcacgtaattatttttatagaaggccttctaccaaaaaaattaaataaattattttatcagtagttaatttaaattaaccctaacaattatcatctcaatttcttatgaaatataaaccttgagcatttttctatttctatctcagattctcagtaaatcaaatattctattttcaaatttgtttttcacaacttttttttgaatatttataaaattccaaattctttcaagtaagtttggagacatcttatttttttttgtcatcatcatcaatatatgaaaaaacatgctaatctttaatagttttaaagccgtccgttgtgataaaataggtttatttggagatttggaccaaattcatgtaacatcacaattgtctctattatggccccttcaggcagccagtgccttttcggccgttagtcttgtttgaattggtttataggtttgttccaggaaagtcacaacgttcctttttgtttctcggtcacaacctttgatttagcaaaaatagttatatcatcatatcgatcgttgctacttttaaaataatcttaataattatgaatagtaaaatgactattttcttaattaagtttgaaaaaatgactattttaccaacacaccataaaataaaagggtactattcataaacaaaaaaaaattatttttatttcatactactcgaaagacaaagagaggcatgaccatttcaaacaaagaactgaaatacagatgaaattaacaattatgaggatttagttttaattataattttagacatattatttacagaactcaataatccagcagtgataagcttggcaaacaaactggcaatgggagaagccagaagctgcagccaaagcttcaaactcagctcttgatctctcttttcctccggaacattgtgtgaacattaacatgtccatgtcaaaggcaatgtttgcgttgatgtcaccattctctgcctcatcaggagtgactaattctataacaaccactttaccgttttgtggcagtcatttccaacaattcttaagaatcttcacacagtcttcgtcggtccaatcatgaagtatacgctgtaaaaacatatttaaacacataagtataaagtactagtaacatgtatacacttccaaaacatataaataataagttgttgagcttactttcaagatcatagcatctccggttggaatatccacaaacatatctccagcaacatgttccacaccgggataagagggtgcttgtgccaaggcgcaagttagatcaaaattgatacccttaatattgggatacttagatgttacaacaccaagagtgttaccaactccacctcccacatcaaccaacacatccacatctttgaagccttggtaaacttcaagagccttcttcaccaccgcaatggtaaaaccggtctggttaaatagtttgctgaatctctcatctgtacccatatagtcaaagagcttcataccaccatgtgcgcggccaaatgcatctcctccttctagaaccacgtctttcaattgtgccctgaaatttatgtatcgataggtaagattcattgaatataaagccacttcttgataaattataagacatccatgaataatgaaaattaccaagtattgaggaagacgctatcgaaattgacaatgacttgagaagcaagggatccaatatcttgaatgttatccttcaagaaaaacctgcaaattggctcggctctgtagaccctatcaccctttccttctgagaccttaccacacttgaccacagaatagctagcgagtagacgaagcatacggtccaataaaaccggagcctcagggttacgaggtgtagttggtagcttactcgctatctcagatggtgaaaggaacgagtcggtgcgagaggcttcggcgtagagagtgtcaaagacaccgagctcgagggaagccttaagaaccattggaaaggcggcagcattggcaagtctcacggccatcaaacccaactcgttatcatcatcaacaacaattggggttttagggttagagcttaaggtttcttcgaaaaggtatcccatttctctttcttttttttgtttctttcttctctttcaaggcactcgatctacgtgatcacactgatcaaaagtgaggaaatatgaattgagagagagtatgtgtttcttttttgtagtgttgagatgatgagttagtatatgtttgatgcatccttgtttctccttttatagttaaaggctttgatatttctctctttgttttacttattttaaaaatattttcacgta

SEQ ID NO: 35271 - DNA, 2341 bp, Arabidopsis thaliana landsberg
agtacttatctctcaattgtattaatccaaaccagtagattatagattttggtgataagtacattgtttctaaagtttgtatttgttatttgcgtataaattttcaatgtccacactaatagattgcttcttgagatcaatgagttgggacaccaatgttatgttttcctctgtgatatttaagtcactcatatgaagtgctttatgatacgagtacgagattatgaactcatatcactaaaaagtatattaagattcgacgagatgtgtatcaaacataccaacaagcagtggcgaaactaaaaattattttaatcccgcgcacaatataattaaaaataaaattaaataaaaaatattaatataaaaatagtttcttaaaaaaaagtctataaagttatcctacgttattctatactctgaaatcttttgatcactatctcatttgtcactttatcaaataattccctttcaacaaaacaaactaggcaatcgtttagaaactgatcacctatacggttgcgcaatgtagtcttcacaatcttcattgcagagaagcatctttcaacactagcagtggctataagtaaagtcaaaagtagcttcaaaagtcgataaacctttggatgcgtaagatatttccttgtctcgatcataacgcgtgcaagatctcctagactcttcaaattagcaaacctttcatcttctcgaatattgtcaatgtaaagaccaagttgatgctcgagtgatctctgatcgacatgagtaaaatcttgtggataaaactcagacaatctcagaacttttaactgatcaaactcatgaaacgaatcaatacggcttaaagaagcaacacaactaagtaattcagtgtttacctcatcgaaacgatcattaaactcttgaatttgcatatctaatacagtgtaaaaacactccacttgataatgatggaagttggtcatgttgcttctttttcttggcttttttggattaacaaattctccatccataataaccaactcaatgtcatgcttcttacaaaaagaaaaaacttcattaaccaaagaatcccatccatcatctctgagcttgcataattgttgcttggtagatttcactagtaacatagcattcaaaatgtcttggtctttcctttgtagagccactgataaactatttgtgagtccaagaaaaagtaacatcaactataagaatttttatgggtttttttgtttaattattttgggctaaaatattatatttgttttaattgaattgagttgaacattagagtagggcacttcacgttaggcccaaccctctcttgctgtgggtccgcccctgccaacaaggcaacaaaggcaacaatggaatcaaagtacaagtatgagtgtaataacaatgacgagacaaataaggtacaaggatcaaggatgagatgggatacaaaaagcacatctctgtaaaatagacaaacaatacaaggggtgatacgacaatttcagtaaattagaatgggctccaaagtagatgggccttcttctggtgtaatgggcttaaggagatccaggaaactttggcattgtaaacgccggcactttggtttcttctggttttggcaattccggcaactttggaaaatcgaacttgggaaattccggcatcttcggtaactctggaaacgtcggcaattcaggcttctgaatctccggtaacttaggcatctctggttttggaatctcaggtaacttaggcaactctagcttcggaaattcgggtaactttggcatctctggtttaggtagctccggaaatgtcggtatctctggtttaggttcctccaataaccggcgagctccaacgaataccggaacagaaagcaatgcaataagacatatgatcagaaatggtgaaagtagagaagcagagaaactcttcttcaatgtcattgtttccttgcaagctttttatctttctttctttctttgctttgtggtgttgttctttgtttttgtgatgagctttgatctttgattgaaatgtctatttaaatgtgtcttgtggaagaagagagatggagtttggtgagaataacatatttagagttttgaatataaaaagttcgtttaacttctctatctgtatatctatattgtcactttcaatctagctgaagtttaggtttaagtgttgacgtgttcatgtgtttggtttatacgtattatagaatatatataatcctcgtatgagaaagcccgttattatacgtttagcttttgtaaaaactttaattaatcttaaactaaaaagtaaattttagagatggaaagacagagtg

SEQ ID NO: 35272 - DNA, 1940 bp, Arabidopsis thaliana landsberg
tgacaatcaaaccaacatgatttctgcctttctttagctgaaacgcatcggtacgacccatacagtagggacaagataatcttccatgcgttgtccatcccgataacattcaatatgccgggaagtcactaatcgtccacattagcactgcccgcatattgaaattttgtttgctcgagtaatcaaacgtgtgtacaccttcataccacaacttcttgagttcatgaatcagcggttgcaagaagacatcaagcgctcgtttcggatgctttggaccacgcactagaatacttaagaatagaaattcgctttacatacacatatccggaggaagattgtatggcgtcaagataacaggccaaagagaatattgtcgcccagacaaaccaaatggactaaatccatctgtgtttaagctaagatacacatttctgcactcgttagcaaagtcagaatatacagtttgaaagtgtttccatgcctttgcatctgatgggtgcgttattctccgtctgcagttgtatgttgagcatgccatctcattttcgccgcagttcttttcgattgatataagcgtttcaatctatcagttattgacaagtaccacatccgtttatatggcactcgcgtccttccgccagtagtctggtatcttggcttcccgcaaaaccaacattcctacagatttacatcatctccccataaaatcatgcagtagtcaatgcatacatcaatcatttctgatggtaatccaagactcaaaaccaacttctgtatttcatcataactctcagcagatatattatccggtggcaaatattcctaaattaattctgcccatgaatccatacagtttccacttaagttattatcagctttaatagtcatcatcctagatgccaaagataacttagaatgtccttctctacatccctcgtagattggttgatttgcagcatctaacatatcgtaaaagtgttgagcatctacgtttggttcttcactaatattttcaggaaatgaagcaatagtttcatgaaatgcatccgtaaccatatcatgaaatctattttcttggttatgcacataaccaaattgatcaggtacttgctgaccataattcgcatcattattaaaattactaggttgctcgacaccataatttgtattactagttcctgcgctatctctacaaccctctccatgacgtaaccagacatagtagtttggcataaatcctttattataaagatgcttcttgactgcattaaattccaaatatttctcattgagacacttacgacatgaacagaatattgtaccgttctcacgagcaaatggttcgtttgtcgcttgatacatgaaaccgcgcagtccgtcgtaatactctctcgtcacctccccggtcgtttgatctctatgattatacatccaacttcgtaatgtgtaaatctcatgctctccgccccaagacattcttatttttgtaataagttttatttcgaaaatatttttttttgtttgtaagtaaatgttgtgatttgagttatgatttcttagacattacattggctatttatagatgtcccaaaaactattgtgagggatttgcaaggcatttgcgggagatttgcaagggatttgctaggattttgctagaaatttgcgagtgaagcccacctaccaaccagaccattgggataatttaaaacgtgctcacctaaccaaccaagactcgctactccgtcgcaatagttgcgacagaataaatgagcgtagcaaattcgtcacaatttgcgggggagacaagttacctgtaactcccttgcaaatttgcaacgtttttgcgaggaatgatgctttccctgcagtttcctcgcaatcgtctcgcaaatttgcgagggaagtgttcgtcgtaatttttgcgagggtgtagcgag

SEQ ID NO: 35273 - DNA, 3966 bp, Arabidopsis thaliana landsberg
atatggatcgggtttgctcgctgccaatctgggcctatcagccactgtggccactgataagataggtccacttcatcttccggcctaagcgtcaatctttccttcacagcttcaaccatttttgcgaattcatctctctctcggagctttacggccaagcataacccatctaacttggctacgtgttcatagcatcatatttcatcttttttccattctccccgaaccagcctaacaaccatcgccatgttacctgttcatatccaacactaaccgtaatgttagcggacaagtgtgtcaacatcggcaaaccctagttatgggtgcactagttattaattacctgctacctatgtcgaacaaagtaacacgagcattaactacgcacctgagtcttcaattttcttgatcttgttatcttctaagcattaaaggtaaattttacgctttttattgttatgtggttttcattttgacgctgaagcaactgtgatactggcgtaataaatagccaaacacgcaatccaaatcatattcagtttcatcattacgattctgtttatttttactttttaaggatgcggcggaatatcttggcagattctgttaaggcatttaatgctctatatctttttcagttagctacggatatctcggacttatagaggtatagttggaatattcgttttgcaaaattaatctcacccaaaagtcaaatttacatgtctacattcttaatttaaactcccctatgtatatatttttaactgacccttttattatattcaagccaacctgttacaacagtggaggagtccacatgaacagcatattagattaaagcattattacaaagactttcaacaaaagtagacttcgatgatcatctctgtaacttctttgcgagagtaagtaatatgagagatcactataagcatccagcttatgatcaccttcaaaaaacttgtcagttcatctgatacctaaacaccagcacttagactatgtaccttcgtgattcaaacttcagagcaagtagactaaactaaaaagggctaaaactaccagctgcaactgagattgcagagaccaaaaagtgtgacagaattttcattattgaatacatcttttctcagacggctaatgtctatgaaggcataagatcaattatcaagttcaccaatcaggaagatttcaaagttaacattcatttgactaaccagtggcacaaatccaccaaaaagagcctcaaaagacaaagatatgctatcaaggatgccatctcggttcctattctatacagcatctggctaactatcaacaatcggacaaccaaacccatctatgtgttaaacccgaaaaagaactaacatatactcaaaaaggatgaaggagaatcctgcaagtcctacttatgatttccatctgtctgttaaaccttgctcgaagtccgagactgttaaaagtagcgagtcttggagtgactaatgttgagaagtctgtctaggcttgaagacgccccacaggtagtactttgagttaaaagctgcaaacgataatcaaccctgttagctttaccgattcatgcgaataaacgaatgattacagacaaaaaaaatctatttgacttactccaagaatcctttggtaacatataagatgtgaagagtagaagttcagcatcattaagcacacatctcattgcagaatcattcttcttcattttatcaacaagggaatcaaaaaccttttcatcattactggaaaccaaacacaaaaatggtcagacacttttacaacataagcatagggagagaaaaacaaatcagtgtttcatgtatacctttcactggaagggaagaaaaaaagagcaacactttcatccttaggtcctccattcttcaaaaaggtttttggccatacttccaacctaggaagtatttcagcagagagccgaccctttaatgaacttgccgtttcatggactttagggcaagctaagctcgatacatgagcaacaatcccatccattctacattcgtttcctcctttaacagacatcaatcccctagaaattgatataacagaatcagaattcaagcaagtgatgatgcaaaacgatacaactaaagagcatttttttctctttacctccatatcggtattttgataggttgtgctctataatgcctagatgtcaacgttagaggcatatttgattcagccactctgcaagaactactcccatcagctaactgaatctgtttgtttccagaacttaattttctttttttgacagcacaagaattatgctctggcacactagatgaattagcggtctccgaatctccaactaaacaagtcaattcatgaagttttctgctatctgagctttcttgtctcttagactccatcgtttctttagttggtgaagaagaagacacctccacaggttcaacaacattggtagtaccctgaagctcatggtcctcaacagctaaaaccggtggcgaatgattgatgctctttttcttcttcttcttcttcttctttttctcactcttcaccaagatttgtccaagatttgtagtctgatcaacttctttgcgatcattccttttgctggtacaagagctatgatctggcatactagatgaatctccagcctctaaaacagattctccatttccatctaaacaagtcaattcatgaggttttctactacctgagctttcttctctcttagacccctccaaaggttcctggagcacattgtcctcagctaaaaccacaatgggttgatttctactcttcttcttcttcttcttcttcttcttaacagtctgatcaacttcattgcaatcagaatcactctcagtcttatcacaatcctcacaaatccaagttatgtattccgtaaatggagtcggtgttatccctaagcaatagctgaagaacaagagaaataggtatatgcataattcaatcaaaccacaggagaaacctaataggcacaatttgatcgacgcacaggggaaatcgagaattgaactcaccggtgaatagactcaaacatacaagagtcacaaaagacaagtgcttcttcaaaacctatgtcgccacaagtttgacaaacaggtccctgaaaatgaaaaagatcagatttttccagttttaaaccaagatttaaagcagccctaagtgaaatttggtatcaaagtaagcaataggttatgtaccttgacatgtaaagacattagagaagactagcgagtcacgagagattttccaaggtcggaggaagaagaagacgaagagaagttaacaattttgctaaggtttagtttttttttttctttcttttttctataatcaatttgggccattaatctccaattatagggtttaattctggaaaaaatatcattaaatccttgacatattgaaaacgttgatttaaatctttaattctggacaaaacgaataaatattaaacttatgtttactgtctaaataaatactttacttttgttgtggccatattagaaatactgttaactaaattaataaatcttattaattcgaagtattatagtttccaacaacagagccacgtcgttgtgttgtaatgactaaaataaatccccaaatcaatctaagatccctaaaccgaccaaaatctctaaccctaaatccccatataatttgaaactagggacttaattgattcgttatgacaaaaagataatgttttattattagagaaaacgttatcgttttcaattaacgagtctgttaaaacacaataaactctgataacagggtctattaacctacataacgtcatgcctaatattgtcagatcaataaacttttggtatttatttaaaaaatcaacaaaagttgagtatttatttggaaagtcaatataagtttgatatttattttgtttcatcgagacatgag

SEQ ID NO: 35274 - DNA, 2495 bp, Arabidopsis thaliana landsberg
  unsure (1)..(2495): unsure at all n locations
gctgagtttatgtttaattatataaactgtcgtttggtttgaactgttgcgatggttaaaaaagcctagtcttacccaaatctgaaataaacccgtcaccaaaaatcggaaaaaatcttttatctattttttataaaaaatacaaagtaacaaaaagcagatatatatatatatatatatatatatatatatatattatttttggtttacataaaaacaagcacattctaacactgacgaaaatcatgacgaggacgaagcagagtctataaaggaagaggtggagatggagaacgactcctggctcgtgttacccaactccgaatgagctctccaccgcttaaatatatgatggttacgaaaacgacgacgtcgtaggatgaattctctggcgatctgggtttagcagagagagcgggaagattctcgtgtttcagtagccgcagttttaatggcagaccaaactcagtcgttcccgattaatgctcacccgtcacaaactaattgttgcctatatatatagttaaatttctgaatctattgtagcccatttggttatgtatgcttagaatgttctaaaggttagggcatctccaacgcacacaaactgacacagtttctcagttatgtttttttaattagttaataataaatatattatttatttgaattttaaattataaagacaaaatctgaccaatcataaagaacaaaatattgaactgagtttctcattgtttctcatattagaaacgtatctcattctctctccacctttttcattactttttatttttttaatcttcagatacaagaaactgctgctggagatgacctaaaaaccgacccaaaaagtatcagaaaattcccgtgtacaaaatttaatccaacggtcctccttccatctcctttcgcaaacgtcgctccccactcaaacaaaaaccaaaaaaaacaaaactatcttttagaccccaacaaaaacaaattgaaattcgaaaacagaacaaaaaaaaaaatctctctcaatctctctcagatctgaatccatccatcaccgatctctaatggcggcaccaccagcatcatcctcggcgagggaagagttcgtgtacctcgcaaagctcgcagacgaagcggaacgttacgaagaaatggttgaattcatggaaaaagtcgctgaagccgttgacaaagacgaactcaccgtcgaagaacgtaatctcctctccgtcgcttacaaaaacgtaatcggcgctcgtcgtgcgtcctggagaatcatctcttccattgaacaaaaagaagagagtcgtggtaacgatgaccatgtgaccacgatccgtgattacagaagcaagatcgaatctgagttatcgaaaatctgtgacggtattcttaagcttcttgatactagacttgttcctgcttctgctaatggagattctaaggttttttaccttaagatgaagggagattatcataggtatttggctgagtttaagactggtcaagagaggaaagatgctgctgaacatactctcaccgcttacaaagctgctcaggtttattctccgatctggaattttgttggatctcatttctaggttaaatcatgatttgtgtgaatctgtgtttcttttgtttgtttgtaggatattgctaatgctgaattggctccaacgcatccgattcgtcttggtttggctttgaatttctctgtgttttactatgagattcttaattctccagatcgtgcttgtaatctcgctaagcaggtgatgagaaagtttctgatctatttgggatttgagtcattgtgttggtactactctatgtgtattgatattgagatataacaggcgtttgatgaagccattgctgagttagatactcttggaaaggagtcatacaaggatagtaccttgatcatgcagcttctccgtgacaatctcaccctctggacttctgacctcaatgtacttgtctctctttacactcatcattgttagcaatatcttagtgattgcatcatgcagttaagattcttgttggttttcgcataacatttgtgtctaatatctaatctccaggacgaagctggtgatgatatcaaggaagccccgaaagaggtgcagaaagttgatgaacaagcccaaccaccaccttcgcagtgataaaatcagatccatggaatgatttgcagacaaaaaaatatatggcttggttctgtgtttttaaacagaaaaaaaccttgtagtttccttaaacatgggctgtagtttccttaaacatggatttgtagtagtaattgtagctgcatgatttggttatcgatggttaaaactctttgtgtgcttctcacatgttttggtgttgtcgttgttgccggtttcactatnnnnnnnnnnnnnnnnnnntggtccggtctaaaagtggaaaacttgcttccttctctgattggggtttagttgtcttttagattatgcttctcttggtgg

SEQ ID NO: 35275 - DNA, 3370 bp, Arabidopsis thaliana landsberg
ccttggatacacacaaaccttttccccctcctttgagaggacaatcaagccatgctgtgcacaatggaagctcggatataatcatgtcattgcgaagataaatgttcccggattcctcgtatacataaacctcgagatagttgacttcatgtttaatagcagcacagatgatcagtgaatcggttggcctaattgtcaagtcatcgtgatcctctgagtcatagtcaccctaggggatatcaagatcagtatttactattgagtctccacaattagtaagagaaaaattaatggtgtttcttacgtcagtatcctttaggtatggatccatgtcattgcttggataataaaggtctccctgcccagagctaaacagttcaatctctgagtccaaacgcaagaatgaaggaaactgtacattagcatatatgcaatgaaaatatgcaaatatgtaggaaaaacagaagaaagttatataccatcatcctcttcatcatagttatccatgtcgagttctttcaagaacttgacaacttcatcagcatctgttgaagaagaagaagcaaccttgcttttcccaaaagattttgctacagacttggcatgagtaacttgagcattctgaatttcatcgtccatcttttcttccatacaaggagattcagcagcaacaggcatagcctttgatgcctcttttgggatccatgaaagtgcaactatcgtcattctgcaaaaatcaaaagagatttttacttaataagcgcagctcggttaggaaagcagagaacgccatgaagcaactatgaatgaatcagcaaactagagatgacttttagggtctgtaaacttggcaactaaagagcttacgatccaaaaaggtttcaactttaagaaagagagactccaattcatctatacaagactattgtatatacaatgcactatacaaatgaactatatactatgatagcttactatcagaaacgaaaaccacacaacaacgtaggactcgtcgaagaggagaatccaagaagcttgctctgcttgggaacgcgcggcacaaggaggcaaggaggataaacgagaaacgcttgaaagcaattaaaataagggtttcctcttaacttgccatttttctgttttaaagaaaaatcacttttttattctacagtgtttcattttcatatctcacacgtacgaacgaagaatggagagcgactccgagatggtagcgttgcctctgttaccgactccgatagaatcgaactacagggcttgcaccattccttatcgattcccttctgataatcctagaaaggctactcccactgagatctcctggatcgatctcttctccaattccatcccttctttcaagtttgcatctctctctcgtgattctgttttgcattttatgttcaagctttgatttttgtgatctaggaagctcatatacctttgaaattactcggattttggattttatccgtcaattcgatcaatctgttctattttggttttacgattgttgtgacttttcatgaatttgggctttgtgacatcatgaagaaactctgattgtttattgacgtttataggaaacaatagaaattctgatccaaccaatttaaaaattcaaactttcagtgttctaaagttgttttgtttgattttttttgcagggaacgtgcagagagcgatacaaccgttccagatgctcctgttcgagctgaaaagtttgccaaaaggtatcttcttttttttttgtgttctcacatgtgtgttcatagttgcttaaaagaggcgctcattcgctcaaaagatcaattttggtttgatttctcgcaggtatgcgaagattcttgagcacctgaagaaagatccggagagccatggtggtccactggattgcattgtaagtatagtttcctcttgtaaagtaaatgcttgtagagagctttgttgttcatgcatttatttttgcagcttctctgcagaattcgtgagctgatactaagagaattgggatttagggacatatttaagaaagttaaggtgtggttttcctcacaaggattttctcaaaaagcattatattctcttgcactctttgctgatcgaaagagttcatttaggatgaggagaatgcaaaggcaatatcactatttcctgaagttgtccgtttgagtgatgctattatcgatgaaggcaagcgcatagagaatctggtcagagggatatttgctggcaacatctttgatctgggttctgcacaggtatatgtcatatctttcttttcatgatactcttctctgttttgttgagtatcttaatgagtggatcttatgtttctttattcacatattgaagcttgctgaggttttctcaaaagccggcatgtccttttaggctagctgtcagaacttggtttcccgaccatgggtcattgatgacttggataactttcaagctagatggctcaagaagccttggaagaaggtcacttctttaacttctctctgttttgtcctaactatgctttatcatgacttcaggagttttatcgcaggacacactgatttgttttatttctctctttttcatgccaggctgtgatatttgtcgataattctggtgcagacataattttgggtatcttgccctttgctagagaaatgctacgtctaggaatgcaggtgcttcctcagttttttttttttatgcacaactatggacattttgttctctggtttggctttttgattgtgagaagttgtttattatgtatatttctaagttgttcctcattgcaccttcccttttgaaggttgtactggctgctaatgagcttccgtctatcaacgatgtaacttatatcgagcttgcagagatcttgtctaaggtgatgaatagagtcatttgggtactctcgtccattacagattaaagaaactcgaccctgactgagtcttaatttaccagctgaaggatgaaaatggacaattgatgggtgttgatacctcaaatcttcttattgcaaattcagggaatgacttaccggtatgttattcaaaagctcgcacaagaagattgaacttcaagttatcactaattcctgtaaaaaatttcttatcctttctatcccgttgcaggttattgatcttgcaagagtatcacaggaggttgcgtacctctcaagcgatgcagacttggtcatcttagaaggcatggtaagaccttttaatcgcgtgaagttggtgaacaatgtgttatctagtcttaggtatcaacaaactgactccttgactgtcctgtacaggcccgtgaattaaaacaaacctttatgctcagttcaagtgtgattccctca

SEQ ID NO: 35276 - DNA, 841 bp, Arabidopsis thaliana landsberg
caaaaaaaaaaaaaaaatgttaacataaggtaaaatgtcaaaagttggtcacaagccactaatcacgaaccttttggaataagttattttctactttaagaattgttcaaatcaacattgcttcttctttctcagtttttataaaacaaatcttatgcatgaatgaagtcagtaaaaacacacccactagaccagatctaccgttgatcccaatttaggctgactttaatcaattctagatcactaaaggcttagtttttatgatgatcattttaagcatacttttgaaacttcattcaaacatagaacgcatgtttttgtgcttattgatttgtaagaagtcatttctaaccaaatcatcatcaagaatggtggtgactgagaccatgtcataaagtgttttacccatggatttaaccacactgtgatggttacaatgggtggggatatatgtcgatggattctttcacctcttcgatcagagttttaaatcaatattatagaatttgagactactgtttatggactatcaagttgtcactggttcttaaagattcgtcaacattttatttatttatttatttttaagattcgtcaacattctctaacattttgaaagaatttcacctgtttcgtaataggcttaattattttaatcttattttctttattccttagtggttaaagtttatggattctttttctttcgaacatttaacgacaaaaaagcttgagaagaaaaaatgaaaaacacacacaaaactgttgtattggtaggaaagacgcgtatacgcggagaaatgttcatggaccactgcaggatctcattcattattcatag

SEQ ID NO: 35277 - DNA, 6203 bp, Arabidopsis thaliana landsberg
tcacacaatgtccttgttcaaagtcaaattatttttgtttgtgtccctacaaactataaaatatctgcatattcaaagaacgatgtggaatttgtcaaagacagactatatatatgcgtaggacttttgagaaaagaaaaaaaaaaaaaaaagttagtttccagcataaaagataacatgaaatttagatcattttttatattttgaaatttgtaaatatcttaatatggctttgcattttaaccccataaatatgtaaatttgttacatatttagtttgcatacttgtatttcaaagtcactagctaaataaaattaaaatgtaatttgttgttgaaaatcatcaatgatacatgtttcaagtaaaacaacaaaataataatcgattgaataacactagattagaaatcgattacaaagaaacagaaacagagatattattattcttttaaaaaaaaaaaaatcgattagaaaaatcatcttaaacaaccaaatcattgatatcttataactaacagatgacaaatgatagtattttggtcctagccacaactttaaaatattgaaatttctttcttggttgacaatcaatatatatttgtcaattattttaactttttttcttccaaatattaaattgaccacaaagcattggagtttcatatatatatatatatatatttgttcaatactcgcgctaatgtgaaccagttttcaaaggggaagaacatacgcaatttctagtttaaaacttataaattcttctttcttcagtctccctccttataacaacttctctaatccttaaattattcttgttatcttttccaaaacgccttctctctgtttttcttttgtatgtttctaatgtaccgatcattaatgggtactgcaagatccataatctcatttatgctcgtgctcttcttgcttttgaccatccctactcgagctcaaagaacaacaacggagactccaaaaacagagtttattttccgaggttttagcggaaaccaatcaaatattgtgacaacgggagctgcgacgatcaaacccgacggactattgaggctcactgaccgaaactcaaacgttaccggtacatctttctaccacaaacctgtgagattgctggagactaatacaagttccacaaactccacaatccgttcttttagcacttccttcgtatttgtcataatccctacaagctccagcaacggaggttttggcttcaccttcacgctatctccaacccctgatcgtaccggagccgaatctgcacagtacttgggagttttcaacaaagagaacaatggggatcctaggaaccacgtattcgcagtggaattcgacacggtgcaaggatcaagagacgacaacaccgacagaataggaaacgacatcggtctgaattacaacagtcgtacttcggatctccaagaaccagtcgtgtattacaacaatgatgatcacaacaaaaaagaagatttccagcttgagagtggcaatcctattcaagcccttttggagtatgatggagcaacacaaatgctaaacgtcaccgtttatcccgcgagattagggtttaaacccacaaagcctttgatctctcaacatgttccaaaactgttggagattgtgcaagaagaaatgtacgtcggattcacggcatcgacggggaaaggtcagtcaagtgctcattacgtgatgggttggagtttctcaagcggcggagaacgtccaattgcggatgttctaaacctctcggagcttcctccgccgccgccgaataaggcgaagaaggaaggtttaaattctcaagtcattgttatgatcgtggcgttatcggcagtaatgctggtcatgcttgtgttactcttcttcttcgtcatgtacaagaagagactgggacaagaagagactcttgaagactgggaaatcgatcatcctcgcagattgagatacagagacctctacgtagccacggatggattcaaaaagactggaatcatcggaaccggaggatttggaaccgttttcaaaggaaaactgccgaattcggatcccatcgcagtgaagaagataattccaagtagcaggcaaggtgttcgagaatttgtcgcagagatcgagagtttggggaaactaaggcataagaatctggtgaacctccaaggatggtgcaaacacaaaaacgatctcttgttgatttacgattacatccccaacggaagcttagactctctgctctacactgtaccgagaagaagcggcgccgttttgtcgtggaacgctcgttttcagatcgctaaaggaatcgcgtctggtttattgtatcttcacgaagaatgggagaagattgtgattcatagagacgtgaaacctagcaatgtcttgattgattcaaagatgaaccctagattgggagattttggactcgcgaggctttacgaacgcggaacgctatcggaaacaacagcactcgttggaaccatcgggtacatggcgccagagctttcccgcaacggaaacccctcatctgcgtctgatgttttcgcgtttggcgttttgttgttagagatcgtttgcgggagaaaaccaacggattccggtaccttcttcttggtcgattgggttatggagcttcacgcgaacggtgagattctcagtgcgattgatccgagactaggatctggttacgacggaggagaagcaaggcttgctctcgccgtcggattgctctgttgccaccaaaaaccggcgtctcggccgtcgatgagaatcgtgcttaggtatctaaacggagaggagaatgtacctgagattgacgatgagtggggatattcaaagtcttcaagaagcgaattcggatccaagttggtaggatatgtttcgtcgacctcaatcaccagagtttcttcgacttctcgtatcagtcagtagtggataaagcacattcacttttttgcttcgaattagtcaaatcgtttagcttcaaaagaccaaaacatgatttaactagtacttatgattaatgaacaatagtataaaataaatttgttggaatgtctatagctaaaagtttctgaaatgaatgtggcggggaggtaaaaccttaatataacacagattagtcatactatcaaaaaaattaaaattagtattttgtaacgtcacaaagattactcatacagttatgatttttttatataaaattactgtatgttttgcttaacgtcatcatttttgttatattgtccggattatccatttttgatcgttgaaccagccaattctatattcataattgattatgacgaacctcattcctcaatgaatatttttcttcaaaagaatattagaattacaatcaattcatcgaatctccacgttcaatagtttgaaaacattttttgtagttgtttcttcagtgcatacgagcaagtaattgaacctgctttttttttgtttcctaaactagtaattgaacctgcttgttatgtgtcataatcaacgacaaaaataataattcaatgtcctcccaaattacggaacagtgacagtgagacacggaatcaatttcaaggagacttcacaagacaagtctcccatgttcatccaaatcccacgcggtgtgtgactatccttttttttttttttttgtctgtggacttatttgtttttctgtacggttctcctttttcattgtccaaatcaagaaaaaataatcacaacataactaatgggtcggtcttgtactcctgctattgggccaatctgtatatgcgacaaaaatacattttgaaaatgtacgacgagtaggtatagtaaataaggaaaagcccaatttaatgtcatgggccaaacatgtaaataaaccaaacaagcaaaagcccaaagtcgattcagtatcatcatagctctgtttttacataagttacaaatagaatctcacatgataatgattttaagatgaggagaaggtatcgatgatggtggtgtggagtggatcactgaggtgagtagcccaattgttgagtggacctttacctgttgcagccgcttgaaccgcgaatcccaagaaggcgaccatcgcaagacgtgcatgcttgatctcagctaactgaagttgagcagtcttctccgggtcagccgctaaacctagcgggtcaaagaacttgcctccggggtataaacgcttctccgaatcaagctcggcgttgcgctggaactcgatgtagccgatcactaacacctcgatccatatcaatgtcgagatcgagaaaggtaatggctgccccaagtaggacgatccatctacaagctccacctgattgaataacaacatttcaactaatatttaaatatcactcattgaacactagacttgaatattcttgactgaacagaaactcaaacagtccaatcgtaacgcaaactgtaagaaagagagagagacagacgccaaagcaaacgctacatcaactaaattgtacatacatttctatctgagtcgcaaacaaacgcaaacgcaactatttgaatactaatttattagcatcttcgaaataactaacttataaccgattatccaagtggagaagggagtggcgttaccttgccagcgtcttgccatgtaacgccggtaagccattcgacggagagagcgccgagagtagcgagcatcgcccaccgtccgtggatgagttcgcattccctgaatctctggattccgaacacctcactgtacggctgaaacggcgtcgatttggcgtcggcagcttccgtacgggttccgatcacgtctccggccaagttcttagccagattctggtctagtgaatcgatatcgaattgaagatactcggccggtttgcctaaaccgaagggatcaaaaccgtaatctccaaccaaggaaccatcaagccagtcaggagaaatggcgcctgggtaccatagaggccggtccgtagtcaccgtctttttggcactctttttgggagctgccttcttctttccgaaaccgaacacggctgtgaaccgacctgaaccgggatggataccgggagccacccgagtacccatgatggaagaagcagctgcagcagcggcggatgttgcggccatctccggctaattgggttttgtgatattcagaagatagagaagaaagatccgtttcttgatacacgattatagatgcgtggaggtgagtttcggagctggcctatcttggaaagacgattatgaccgttggatcgattcacaaatccatctgacggtgagtaggattactaatcttatctattaaactctgcgttatctggtgatgtttcaagtccattggcaataaaatctagatgaggtacaatctgattgggtcaaataatttcttaccccagttagaagaagccacgtgtactgcggtcttgtgcttcactcaaattgctggtttccggttcagccaattcgatccataccgaaaccaaattactccccaaaacgatcaaaacaagtcggtttgactgaaacaccaatcggttactgtaattcatagtcagatagacagatactaatttaaacgaaccaaaatgtgattaagtacccttaatcagcaaatatgatatcgaatttttgatctaaatgtcaataaccaatggttgttatatacaaacccaaatctgagactatagaaagatgaaaaaccaactaaaaacacataaatattatatacaaagtggacataaatagatgaaatttgtttgaaagaaattgctatgtgcataacaagaaacagagagaatgtaatgttcaccgaggaagaggagcataagggacaagatttggatcagaagtaacgagaggcaacttgtcaatgtatatcaacaacctcttcagattctccttgtaaatcgctggtaaatctgcaatctcggcgctacaagtgtatatccatagatcaccagaattcactcttttcaagctgcctcgacagaacgggcacgactgtgaccgtgcacgcctattccaaacaagagattctataacttgtaagaaaaaggctgatgaatggtgagagtgagtgaaaagaaggaaaagctttatataccagtttctgtagcagtttatacacatggagtgattgcacgtaggaagaacaactttgtttcgaatctccaagcagattccacatcttctcc

SEQ ID NO: 35278 - DNA, 2334 bp, Arabidopsis thaliana landsberg
actgctctttcgctcaaacccctatgtctcatgtgcttccctctatttgtgtttacatatatttttgtgcgaaactgaaaatattttttataaaaaacctatacgtaatatttctaatctttaaatttcaattatgtggcagtatagaaaacaaagtcgtataaattctatcgataatatgcattatatgcaaattctaattcggacggtgacacaaaaatatcgctagtataaaactaagctacatgtcatggtgacatgattttttataaatgtttgtgtaagaaaaaaaaagataaacattgttcataaatgatgcttttgaaacttcttcgtaattagacaaatacagtcatgtatttgttatagtataaactttgaaaaaaacagggatacgaatagtgttatgttagaataaatgtaggagcatgtatagtggggaaaagatgaatagaaccatcgttttcggtcattttgattctttatacgcttctttatggagagagagaggtcaatcaaagaatctgaaagattgatcttatgactttgtcgataggtccatgcagggaccataaggaccccaacatatgaagatgttttgctaagtattgaatcatggaacaaatcaacgaaatagtcaaaacaaaaggtctatctagataaattataaactgctaattgctaaatcgatattacttaataatgactaaacatgccgaggcaaacattaaatttggattagaattgcatgttgcatgacaaaacttatatatgtattcttactattttcttaattgttcacaaaactatcatctatatctatctttctatctatctatacaagtgatggtacacacacatgtcctaccactctgactctaccgacattatagtcctgagttattttcttccaaaaaatctatgtcctaatccccatattgatatgaatactatactatgagcacgataactccgggatataatctgagacaaggaatcaaaagctattctgaaaaagcatgtaatccgttctccagtgtatgtatctctggttttttactcgttctccattattaatttatgacgtttaagaaagactcacaaacaagatgaataaatgatacaaggggattttatggcatatgcagattttgttttgaagtaataatgtaacaaatcgacattgaagtaccttccacaatgcgcactatgcacaagaaaagactcgtcaaaagcaaagcaaaaggtggggatggctcttaaggtcaacagcttaagaatcttgaggagtctcgaatctagtcggtgtatcgatacccgccatacagcaaagtccactgatcaagatgagaagaaaaacgattccctgcaaaaagaaaaagaaaaggacgagacataatcaaaggcttttacgaaattttaacacattgaattaaattatcttccagctagatatgaccaagatgctcattaaacttgtccattctatgatgtttatgaatctttcttgagaacgatgaataccaaaaaaacacgagtaaaaagagtaattaccactagtatgccctccaaaagtgatgacttaaatttgcagagttcatcacagccagtagcaatttcaggagtactgtttcctttagcagtttcagctagaaacctttggagagttttgtaagatgtgtaccaataaggatcagaaacataaagagctgtatatttactgccggattgttctacagaactaacaagttccaagatgctttcacctgcagaataggtcaaagaattgcttaatttcctagttctcaaatgatatctaattgttagtattattttgtaatgatctttccacttacgctctgaacgtgactgtccagcttgactattcgattcagaaccctcggaacagagcacaaccaagtcagtttctccttctttccttgtttctcttctagcaagcaaatgatcctgtcaattattaatgagtattagaaagtgaagttaagggggtgataacactgggaaggcatgggattagggaaaataaaaacttaagagcaatgagtattactttgaaagactgcaagtctgaaagtttctgaattgttccatcctcaacaaagcacgaatctgagaacacgatattgctgactcctacattgttgggacaagcttctttaagccctgaaagtaacaaattctccatcctttcttcctctggagcagcaatatatgggaatgccaatgagaagttggaagctgtaaatagattctgttgaaacaaaaacttggatgttagagtattgtaaactttatatcaaacaactatgtcag

SEQ ID NO: 35279 - DNA, 2084 bp, Arabidopsis thaliana landsberg
gaagttttttgtggcaaagctttgatccatttcttatccaatgttgtggttgagggactgtctgattctttaagagctgccctttgacatacccagcttggatgagtataggttcccggagaggaatactgtctggaagcatacgggcctatgctcctgtaacccgatctaagcatacctgagtaactcgtgctgacagagacatcctcacccatcaatctgcttgatgcttgagtgttttgaaaactcaaattataactctttaaaattaccttgccgctattgaggatctgcttgacaccattacgctttgacatattgattgcgtggctcctcggattgacttcagaaagcggtgtgtagccgcactctccatcattagtgtttgttaaatatgctttctctgtgaaggtctcatcaaggcctaacctagcaggaaagtacttgtggcgtttctcattaagcggtgcattgtctttggcaagtgctgcctcaattaaatgcttcttttcactggaaaattccactaaatttccaagtaaaagatcattacctgtagatgcagatttagagaaactagtacataaacctgaccgatcaaaacttctacaagtctctccattcgcatcaactaggtcaccctgtagatctagagggaaccctaagatcgcctctcccacatgcctttgtctatttaaaactgatttttgcatccattcggtaggaagtggatcaaaaggtgattggaacaccaatgtcccccggtgcatatcagctgacacaggttgagaaaaaaaagtacatgctctgtacggagtctcactcgaagtagagataaacgtttgtatagcttgagccacatattcctttctctccaaatccgatgcatccgtcactctttcctgtgaactaagatgtggtccaaggaaacaatacaagtgagagtttgatcccgcagggggacacttgtaatgatgccttgtttccgaatgcattactgttctagactgatcagtcgacataaccatcagttgcatgtcatttacagatgcctgattcttcctttgagaaagattttcagagagactcaacctattcatttccaaacagcagagttgtaaagagacggtacttttctccagctgagaaagattcccactttgatcagagaacctcacatgagtttttgacttatcaggactcctcgcaaagcatactttccgttttgccttgaaaattgcaggaatctgaaactcagaatcatgatctttactgactaatccagccttcttgctactaagagacataacaccagagctttctttaattccaagactgcattttccaatatcatccactttttgttctttgcattggttaacctgaagatacaatgacaccgattcactagtgttagtatacacggatgcttcacataacatactaatgaactaatgcaaagccaatggaacatagagaagcaccaattgatttagaaaattgcaacataagaagattttataatttgctctccttaagtattgactatcgagtttaatcctacacaaacgtctccagagatttgacatcatctgtaataagtttcatagatttaaaagttatttgtataagaaccttgttagtgaattcccgatcaccggaatctttggatttcgtggttttgatcttcttcttgtgcaccacataatcttctgctaactggatcttcggcgccgtcgcacaaatttcgacgatggagcgctttttacactgtctagtctttgctttggccttccgacgaaaggacggatcagaatcatcaacagagaccggagatttcgtaagcagagaagcaagctcatgcgaccaccaccggaacttggagacagtaatgggaggaagaaaagactgaataagatctccggcgaacggccagcattttcgttcattatcactccttaccttctccgtgtactctctgcgatttcgccaaatcagaaaattcaaaactcgacaatgcagcacattataaacaaaaatcaaagatattataaagaaatgtaccaaatcacctgatagaaaat

SEQ ID NO: 35280 - DNA, 1541 bp, Arabidopsis thaliana landsberg
agaggcatcactcaatcccctgatcgagcagagattgtaatggtaacacaaaccactcgatcacaagccggaggaaccaccaaattaacaccactcgatcgccactcaacccatctactcatccttcactcaacccatctaatcatcctgcactcaaccagacaacctgaagataaggaagagacgagaaggaaagacaccactctatcgcaagccggaggaacaatcaaatcaagaccactcgacttcaaccttgttgggccgttcaaccatgtcttcacatcagactgctcgatcgcaaggtggagttcatgaagcccaatctaacccgtcagaccactcgatcgcgacataaagatttgaagaccactgttttattttcttatctattattatttttgcttatgattatatgttaggtcggttgaggtggttatttggtggtgagagctgacctagagacttttgattgagtgagaagtaattggtgtgggtttgatgtctcaaaatgttattgaaaaatgatgagaacaaattagacatatctctcagcaaaaaatggcttaaggtcatttttggagattttaaatatgatattaagatttgtagatactttttttttttgtaaaccaaggtttatagattcaagaatcatatttctactaagaagtgtaagatacatgaaacttagaagtagaaggaattcaaaggaaaagggactaaagagagagtatttatggtggctggggaggaagtgtgatagatatttgtgtaagaattaatgaattaatgaatttaatatgcaagtttacccttaagtcaatttcatttacaagtttacccttcaagtcaatctcgtttgcaagtttaccctccaagtccgaattatgcaagtcaatcccacaatctcaaaagtcacccacaatacagccctcccgtgtattgatgatgtgacactcgataactctttttgaaaacataagggctttgtgcaaaaaaatccttaattttttattttttgcaagataaacttccatttcaaataaataaagttcataccacaatctggaaaatctcctgcaacatagccctttcgtgtatcgatgacatgacagtcgataattcatttagagattttataagtctatcgaatatattactttaatggatataatttaattgagttattgatttgagttttaaataaaataaaaccaaaccgataaccaaacggttaaccaaaatatccagaaacttaaaaaatatcccaattaatacccataactataattataaactcaaaatattaattatttttagaaaaacaatcaaatactttaaataatcaaaatatccaaatattgttagttatatttttcaaaattaaatactcttttacaaaataaaacaatattgaaagtttctttctaatatttttcttctttgtatttttttttttgttaatcttggttcaattaggttaattttagttattttaaaagaaaaaacgaagcagaacgaatctgataaaaatttggtta

SEQ ID NO: 35281 - DNA, 2352 bp, Arabidopsis thaliana landsberg
  unsure (1)..(2352): unsure at all n locations
caaccaaaaaacatctcgtgtaaaatagaagtttcgtgtaactatcgactgctactacgatgccatagtcatgctaatcatatgcaatgcgtcaaaaaatgaccttaccaaaaggttatgcatacgcacaaaaatgaaccaggagaagttggactagatataaaaaaatatcgatggaaaaagattggaagaggtaataacggattatgcaaaggagaaacaatcaaaacaaagagttatgttcgagaaaaagctacaagtcatcatcgagaaggtaatcaataattatcaaggagattactaaaggctattgagaatgtcattacttgtcgagaatctttgtaggattgacaaagaagtaataagtactaacgttaatatcttttttttttatataattttgagaaataaggagagtatatcaagataaaacagaccatctgtttttagcttaaattagatgaattaggactaagcaaaaaacctgggatcgattatccgaactgaaacagatccaaaaaattagaccgaaaaccaaacctgaactcgaagattttttttatttgatcctaaattcctctatccgaaaaacccgaatccaaacatgatccgaacctgaatctaaatatccaaatattttatttaaaatctaaattttacgtaaaaccccaaattttacccaaaaaatcgggtatcaatcccaaaaaagggcttaaaaattcatacccaaaccgatattttggatttattctattaaatcctaaattttcctacctaaaaaatttatacttgattgagtttaccgaacccgaacccgacccgcttctctgaatgaccacctttaatattttgatgaacttattttgctttataaaaaaaacaggaaaaaaagagtacgtcaaaacctcaaagaagagaaaatgacgaatctttttcttaaaggatgaggcaattgtatcaagatacgaggacgaggttggtttgtttaacattatcccaaacaaagtttactgcctaacccgtcactgccacgtgtcatccggatctccttttggcttcgtctgaagacgttcgatgctcaccggtcgcgtctttatcctctcatcatcatcctcgaaacgtgcaacacacaaaaaattgactataaaagattgcaaatttctctctaaatatctgattcaaacgcatttggtaggctgagagaaagaaagaaaaagataaagatggatcacgcagcagatgctcaccgtacggatttgatgaccattacaagattcgtgttgaatgaacaatcaaagtatccagaatctcgtggtgatttcaccattttgcttagtcacatcgttttgggttgcanattcgtttcaagtgctgttaataaggtaaaaagtttcgatctttagatgattttttgggtcagtgctttaaaaaaagatgtcgctttcgatntatgttgggtaaaaggtttgatttttatgggttgttgatgaatgatgatctggaaattctctttttctagatatgtggagttgtctcaatcgtctttagtgttatttaggatggcccattgagaaagttgtaatctttatggttgtttgttgcaggctggtttggctaagttaattggacttgcaggggaaacaaacattcaggcaagttttgtgtgtttcttcttcttgttattttggtgtctctgagattccattttttgtggtattagggtgaagagcaaaagaaacttgatgtgctctctaatgatgtctttgtcaacgctttggttagcagtggtagaactgtaagtgtttatgaagttgaaatgatatagggatgttttcattttgtgtctcctcactgtttttggctattgaaactttgtggtagtctgttcttgtctcggaggaagatgaggaagctacgtttgtggagccatccaagcgtggaaagtaagtttagaagtgatctctcattgatttagcttatgaaaatgttattgtttagcgtaatctgattattttttgttacctataggtactgtgttgtttttgatccgcttgatggatcttcaaacattgactgtggtgtttccattggcacagtatgtttcattatctaacccaagttttccttttttttaacattgaaagagggcttggatagtgaatcatgtgaaaaagtttgtcgttttgtgtttggtttcattgtgtgtagatttttggaatttacacgttggaccacactgatgagccaaccactgcagatgttctgaaacctgggaatgaaccggtgcctgcaggttattgtatgtacggaagaacctgaatggtactgaaaatgagattcccaaaggcaaca

SEQ ID NO: 35282 - DNA, 1577 bp, Arabidopsis thaliana landsberg
tactttaaatagcagaaaattactatttcattagtatttcttatgtccatataaataatatactatagagcgaaagaaaaaaattatcatatccacaatttcttttcttgtaatgtaactttattacaaccaaaaaaaactttatacattcagatatgaaaagtttagaaatgattgaaaaaactaaagaaatgaaattatttgcggtacaggggaaatcaggccatctaggcagctcaacttcgagtaccaaaccataccgtattaattataatcactaatctataaaaagtgagttttatgtttatgcaatgtatatacacaaatacacacaaccgcgtatgttaaagtttgaggttatctgtatctcgatcaaaatatgaatagataataacaacgaaaaaacgacttttgatccatggaaacatctctacacaaaatgtattcccccatccatacagaatgataacccatccacatcttcgtagtcttaacatcgtaacaacgaaaacattatttactcagcttagaaagaaaaaatcgagttcttgtgaaatttattcatacatgcaaagtaattaatgaaacggcaaatattgtctatctcagctgatttctttatcgatgttttataactagcatttttgttcatctaaaattatcgggcattataatatattagcagttttaaaagtcatttggttcaaaaaaacttcagaaaggttataagttaaagaaaattgaattcacttataacttatactccatgaattcacttataaattgaattcacttaaaaattgaattcacttaaaagttgaattcacttataacttatataagttaggagatttgaaaataaaataatagaatgtttaaaccctatagactacaaaagaactatttcgtagattgtaggaaaacccacaggccacagggggatagattcaacgttataacctccagaagacatttattagatttggggccaaaaagtcaatgattcactttcataaaccacaaggggtccgacccattgtttctttaccattcaccagtaacacaaattttgttttatatatattaacctattattaaggttaattataacataaaaagtagtaaatgacgaatcacagatctcaatgaggcttcctctgtctctgggatcctaatgacaaatctgatgtgggtcggtgtccaatccggttctttctcttttgccaccattcaaggccatgcctcgccattgattcgaacctccactgctacttttttactggactataaaaacattgaagtaaaaatatgcaaaagtaaaaaaaaaacatatgatcttttgtcatcattattattttccctgacaagtaatgaaaggaattcaaatatatttttatgacgataaaaaaaaaaatcggactcaaagaataacctgagacccaataggttgttggtaaaaacctgatgtctgaacaagtctgggtaaggtcagaagaaaaataacaaagtcccttttgttagtgcgcacctgtctagcaatgtcactcattaattagtgtatcgagaaaactaatggt

SEQ ID NO: 35283 - DNA, 4326 bp, Arabidopsis thaliana landsberg
caaacactatccactttttcttaaatttcttgtaaaccatacaaaacatgttgtgtgtttctcaagcatcaacaacaaccctttgctcaaccatggatcaaacctcacaaccttcttcttcttcttcagccacgatccggctcggtggtcgagccattgaccgtcataacccaatcatacgtgacggtcggagactcactccttcaccttccccaaaccttaatccctcttcttcgtcttcttctacttatcatactcctcttatgactagactaggtctcgagagtagtgaacaaaaacggttagcgaagaggaagagcaagaaaggtgacagtgatgttggtaagtcaccggttagttgttttagcagtgacacacctcagggttcttcaaggtacttattgagtaacccggttttctttgacgggtttgtggattccgacccgattccaatacctattgatgaaccggagataaccaaagctgatgatttaaataattttcatgaagatcgactcataataaacgcctcaaagtatctatcaacttctgcttctttcttggagaagaagcaacccgatttcttcgaggggttcttggattatgaaccggttctatctcccgataatcctttctctgaacccacaaaagcttctcctacagcttctctgagctctcttgaagataaagatgtttcgtccccggatttcaaattttctcctcctcctcccccacctccttctcctgctcagtcgtcgccgccatcaccaccgaagaaaaactcatcttccgatcaagtgagtaatcgaacaaaaccataatatttaatcatgagttaatgttttgagattaaacttgacaatctttctttcgttgcttaaaggtggtggttttgagagtgtcacttcattgcaaaggctgtgcagggaaagttaaaaaacatctatcgaaactgaaaggtaactatcaactaaagtatttctattcattaaaattgtattcttgatttgtaaaaatactctgttttttggtcctttgatcattgttgaacgcaggagtgacgtcgtataacatagacttcgcagcaaagaaggttaccgtgacgggagacgtgacgccattaactgtgttggcgagtatttccaaagttaaaaacgctcagttttggcctgagattattcagaagtaattctcttcttttttccctctgttttcttctatgttcttatctttactttggaaggcaaaacttgtgaagatggtactttcttttgtgcctttatttgtgtcggttatggttaaagatcagtattcagaaatgttttatatgaacacacttcataatttgtttttgtgatactaaatatctagtattattcaagtattggaaaaataaaaattgataagcagtactagcttgtaaagaccgtggggcaatgaataatcacttatctatcaacacaaaacttgaaagccaaacccaaacattagtaaaactcaggaggatggttcttgcaaaaaaagggtagatactcctgataagttattcgatcactaattgaaaataatgtcaaaatagtgtcttgctctatttgtgatttagaaattttgattaaaatctatcgttatctagtgtcttgctctatttgtgatttagagttattcttttttattttatttacaccacaccaaacattttttttttttaatccaaaaatctattgtattaagccttttgaaaagagataaaaaaaaaaatccactttaattcaatgcatatggatttacaccaaaaaatattgttattcaatccatccatatagatttacatttacaccaaaaatttaatgttattcaacccatttacaccaaagactaaattttatttatttatcctcaaaaaagggaaaaacaaaatcaaaggtttgttaataattgtatcttgcatttcttttttctttgatgacaggacaaatttatatccatataaaataaaatcatgcatatctaaaaaaagtattcaaatggataaaccaatatattacttacaacaacaatgaaagaaaaaaaattcccctgcattgtggttaaaatgtgaatagcttttatggcataattgaaacgtgtttcttctgcttggttcctacggattggattggaacgttttgttggaattggatcatttttagtcaacatagcttttatgaagaagaaaaatatgaatcaatttacaaaataattttgtttactactaaaaagaaaaatatttattgacaagataaagacatccaaaagtttatataaaccttccaaaccatatcaacttgtgtcagtgtgtacaacaaagtaatattgtgatggcgaaatcaacttatgttcttgtggtaatttcttttggcctcctcttcgcttgtgtcattggaaccactcaagatgagaccagccgtttgctctggtctagaccatgggctagaggactggctgattcaccaccacaagatccacataaaccaaccatcttcggcttaaaaccatggtcaccatcacaacgcctgattttcagaatgttaccaaaaaacgttccaatcccgccatcgggacccagccgaaaagaaactcctccatctccgcctagatccgtatgatactcgttaaacctgctgtagtaaggatcgcttatttataattcaattctacatgttgtaaaatttggtatgtgaatctgatgcaaagcttgtaaaatggtagtagaataatttcgcagtgatcacaaataaaagttcaaaatcacatttctaagcatattcaaacaaaaacacaaattttcactgattcttagcgaaaagcttgttagtattgagtacattagcatttaaatactctttgtaaggatgattctcaggaaccaatcttctaaactctgcaaattgcttctctgcttcatctttcttcttcatcaatgtataaatcaaaccttgacatagatatggtctaaagtctttaggctcatctttcaccaactcttgataaaccctaagtgcttcaattggattacctttgataaccctaatctgagcaatcaacaacatgaaatctctaaaatctttcttgttctccttcgtgcatttctcaatcgcttcgttgattctactctcgatctctgataatttcgattcggattcggagtaagccattactaatccgtgataagcttctacacgaaatggatctttagatagaacctcttcgaatcctttcgtcgctgaatcgaaatcgccgccgtaggtttgtacctgagcttttaggatccgccattcttgttcttcgggttggatttcgatcaaacggtttagaatctctaaggcgtggtcgatgtttttggtttggaatttgattttcatcagtgattgaagagcttcgacgtcgtttggattcttagtgaggtgcttctccagcgctgcttcttcttcttcttcctttggacgcgacgagatttgatcggaagtgagatccgccgccgtggatggtggaggaggaggtgagacgagagttgctgcggtgacgggtttggtggagaggtggagggaagcggagagtaaagcggcggctgttgttaaggtcacgcaggtggttttgaggaaagagggtttagggtttgatgaaaacgaagaagctctgatgacgcgagaaggaggaggtttatgtaagattcggtatgaaacaggtttaggctgcggtttacggtgagtgtcgagtcggaggtggagtgtttgatcacagtagtgaaacttggccagagacaccattgttgagaaaaacaaccctaacgccggcgatgagattgagatagatagaagaagggaagaagaagaggaaaattttatttttacagaattaaacgtcgtcgtattatttattgggcttagaggttgttttgtaagcttaatgggctgggctctttgtataatttgttacacacttaaataaaatagttttaaagattattgagtttaattatgactgttttaagtttataaaatgttaaatacaagtcaaacttttaaagaaaacattatgatgtcaaaatccatcttaaaaaaaaactgcatatactttttaatttcgactctaataataataattgtcgtgacgtataaaaagttattcctccttatgatttaagatactgtataagcatttctcaaatacaaaagaaaagtccttagtgataaaactaaaatacaaaacctctcccatcatctgttgatttgttcattgaaactcatcttcgtcttatactctaaacttgggctcaaaaatttaggt

SEQ ID NO: 35284 - DNA, 1244 bp, Arabidopsis thaliana landsberg
gttatccattttacctgccaagtacaaacacttactctctttgtttcacttttaattgttgtgtcatgaattgtttttttttctttgtatttttaagtgatgttttcaagttttcatgcaaaactttaataattttttcttttgaccatttatatctgcaataaacctttgggttttgtgcaaaaaaacaccttcgagtcccaagtttttgcaattttacctttcacctctaaaaattatagaatagtatctgaagtcccaaataatacgcaatctagcccttatacatatattgtaaacgttttcatttaagacttcataggattattcttaaaatggcaaggttttttgcacaaaacctaagcctttttattaattaacatttatatgatttcttaatatagtaaacaaagatgccaaaagacttgcgagagtgaaggaaagtatcccagacgctaggtttcctcccgtcttcatcaacagctccttcccactttcagaaaccaaaattcatagataattcgagaaaaaaaacaaaggagaataaggatagtattgcttacctgataagcagagatcccggctccaaaagcgaagccttcggggaaatcgttcctgctataaacattgctgcattttccaaatccatggaaagctaggagaagcaacacaatcatggtaatgagagaaaaaacatcttccattttttgtgtcaattttggctcgtgttggaaagtaagtagacttctcgtggagagtataaataaaacactttatcaaagaggttattgactggttggtacttggtagattcaaaaatcccagttgttccatgtctcgttaaaataagtacactctgatcctcaccgttaaaggatggtctaatgcaatcgtcaccttttatcttatcccttgccgacacataccacattgattagttgctatcaaactttattgaccctaatctggtttagttgtcgttttatttatttctaattaaattatcattttatattaaagcaaagttccagttttaactattcccttaattcaccaaaaaaaaaaaaaactattctcttaattagtaaaacctttttcaaaaaaaaaaactttttcatcaattgattcgatgataatcgaagactatgcatagccttttctatgttgatagaatgtggatataagatagataggaaattacataatcaatattcatcgagaaaatttataacttagggcacggg

SEQ ID NO: 35285 - DNA, 1297 bp, Arabidopsis thaliana landsberg
gacattatatagagttcaaaagtgacgtggatttaaataaataactctattcataagaaaagtttgtgatataaaatgcaaagaaatataatgaatagacgtaacttaaatgaaaaaatgcaactataaaaatataaccgcaaactgaaaagatacgatcgtagttgaacaaatataacttaaaaaaaaattaacggtaaatattttaacgaaaagatgcgataaaagacacaatcgtaaactgaaaagatatgactacagttgaacaaatataactattagaaaataataaccataaatattttaacaaaaatatgcgataaaaaatactacggtaaaaaaataattgtaagtattttaacaaaaattgcgataaaaagacgaaatcatttagattcgaaaagatatgactataattaaacaaaaaatatgtaaaccgtaaatattttaataaaaaaatacgactaaaaagacgcaaccattcataaatgcaaaatgaataaattctgattggtattattattaaattattattattatactagaagactttgtgaaatttcctttttgtttaaaggacatttattaattagataaacttggtctacatgaggtaaaaggaaagacgtctagatagtgtagtagtgtcatgctttagttagtagtttagacaataccgagaaagtttgtttctccacgacgcaaactcaaccaaagacattgattgacattataagtagaattactcctacatatctaacctcacctcacatgtgattcttaaacactgttaatatagtaacgaagcaaggataaatcagtaatattcaatttccacgtttatgttttagtgtttttttcccctaaagtatattgtttaattttcagagaaaaaaacaaattaagttatactcaccagagtacaaatatcgttaattataaaaaataaaaataaaaatataatcggttcttagaaaatgttaacgaaaacaaatcctagaggttcactttcgttggccactttaataatgctaaaaataggcgtctatcgagtgaaaagtatagattgtgacatagataccgcaaaacatatatgttttatttcaaaactaatacagaaaaaaaaaaaattaattaatgatgcaaaaagtgaagagtaaactaaaattgttcccgaaatgacgcacgtccacatctattgaaaaaaaaaaccatcagtcatggatctattgtcttcgatctttatggaatgatcattatcgtttactttacgtcaaatcttattacgaaagattag

SEQ ID NO: 35286 - DNA, 1260 bp, Arabidopsis thaliana landsberg
tgctgatccacacccaccaaatgaccatccatgatacgaacattgcaagtgtccattctcatccaaccttccttcctacataaccacaatgcatcaacgcatacacaaacacatcaatgagtcaagctcaaaactttggttacatacacaacaaagtttacttctttttgctcataagtcataacaataacaacaacacaaaactgttctgattctgaccctaatattttattctttgaagcttttaacctaattgatatactttaaaaatcaaaactttacaataaacaatcatctacaataatttattcttctaatccaaatccaaatcacagtaataaactacttgaactgtttcttccaagagagagagattacagataaaggagcgagccggtgagggcagagatcatcaaaggctgcccatttctgatcattccgatcaaaccagagtacaaggtctcgacccaagagctggaacggggttggcacattcggatccaaatcctcaaccaaagaaactggataccaatgatctctccacttaaactcagacccttcttcttccttatctccgccgtattcttcttcgatccgcttctcctccgtcgaatccgaagtgggtacagacggcggcgccgccacgcgtaaagggttgtggaaaagtttcgatcttgatggagaaattgagacctttaatgggaattttgacgagtgatgaatgatgagagtccactgagaggtgcacatttaaattttgtgttgtgaatagtttcgtgcacaactaactaattaaggtggctttttattctatgaatttgatgttgtctttcagtgcccgtgactcctctcttataatcctttcttgttgctttgtggtagggacaaacactcttctcgtgaactgtggtttcccatcaatgcttattttatttatctatttgtgggaagtttcatttatatggatttcaagattatacttataaattatggggaaatatatgttctgtagccatgaataaagttgaaaggaagaaaataaatgtaccatatattccttgcgaattctacggggttcgaattcgtttgaactattaacataaccattaaccacaatgatcttttgcaggaaaaaagcaatcataaaataaaatcaaataaaacaattcaagatgatgtaatggtcggagtatttattttatatagtaaagattcatgtgcactcaatgcaattgttcgttactgaaaaagaaaaagcac

SEQ ID NO: 35287 - DNA, 3556 bp, Arabidopsis thaliana landsberg
tatgaattaaatagtttaaaatttcaagaacgaaacatctccccttattacaaaaaataaataagccaaaaaaagtatcactttaataatgtaataaaataaagtgatatgtatataagtatacatacataaatagtagattcgaagcaattgttgcattagcctacccatttcctccttctttctctcttctatctgtgaacaaggcacattagaactcttcttttcaacttttttaggtgtatatagatgaatctagaaatagttttatagttggaaattgattgaagagagagagatattactacaccaatcttttcaagaggtcctaacgaattacccacaatccaggaaacccttattgaaattcaattcatttctttctttctgtgtttgtgattttcccgggaaatatttttgggtatatgtctctctgtttttgctttcctttttcataggagtcatgtgtttcttcttgtcttcctagcttcttctaataaagtccttctcttgtgaaaatctctcgaattttcatttttgttccattggagctatcttatagatcacaaccagagaaaaagatcaaatctttaccgttaatggaggaagtatctccggcgatcgcaggtcctttcaggccattctccgaaacccagatggatttcaccgggatcagattgggtaaaggttactgcaataaccaatactcaaatcaagattccgagaacggagatctaatggtttcgttaccggagacttcatcatgctctgtttctgggtcacatggttctgaatctaggaaagttttgatttctcggatcaattctcctaatttaaacatgaaggaatcagcagctgctgatatagtcgtcgttgatatctccgccggagatgaaatcaacggttcagatgttactagcgagaagaagatgatcagcagaacagagagtaggagtttgtttgaattcaagagtgtgcctttgtatggtttcacttcgatttgtggaagaagaccagagatggaagatgctgtttcgactataccaagattccttcaatcttcttctggttccatgttagatggtcggtttgatcctcaatccgccgctcatttcttcggtgtttacgacggccatggcggttctcaggtaaaagattggatcttttgattagggttgtttacagtttgcagaatctgatttggttgttgttgtgtaggtagcgaactattgtagagagaggatgcatttggctttggcggaggagatagctaaggagaaaccgatgctctgcgatggtgatacgtggctggagaagtggaagaaagctcttttcaactcgttcctgagagttgactcggagattgagtcagttgcgccggagacggttgggtcaacgtcggtggttgccgttgttttcccgtctcacatcttcgtcgctaactgcggtgactctagagccgttctttgccgcggcaaaactgcacttccattatccgttgaccataaagtaagcatatatagactcaagatctatagttggattggttgtgaacttgtgataggtttttagttttcaagatgttgagttagagaggtttatgaaaccatttctgatgtgtgcttgtgttatgtgtgtagccggatagagaagatgaagctgcgaggattgaagccgcaggagggaaagtgattcagtggaatggagctcgtgttttcggtgttctcgccatgtcgagatccattggtaagctttcattatatttctccataaagcttctcaatggttcttgaaatagaagaaacctttcttcttacaaacatttatcattgtgacaggcgatagatacttgaaaccatccatcattcctgatccggaagtgacggctgtgaagagagtaaaagaagatgattgtctgattttggcgagtgacggggtttgggatgtaatgacggatgaagaagcgtgtgagatggcaaggaagcggattctcttgtggcacaagaaaaacgcggtggctggggatgcatcgttgctcgcggatgagcggagaaaggaagggaaagatcctgcggcgatgtccgcggctgagtatttgtcaaagctggcgatacagagaggaagcaaagacaacataagtgtggtggtggttgatttgaagcctcggaggaaactcaagagcaaacccttgaactgaggcagagagggtcctttttcttaatttttaaaatgaatatgggtctctccaagaaaaagtatttactattattaatttgtgcttatttttttaactatcaagttataaccatatggagataatgaagcttaatgtgttaagctcttttgtcttgactacattctataaagccccttgtatttttcttcccgggctaattgtaatatggttacaacatacattaagatgtagtattattgtttatgcaattactttcaaaactttacatacgaaaatagaaagatacttaaactatgtacaaaacaaaatgtgtataatgatatgaactactatataagtatatccaccactagcagagaaacataactgatgatagttgtgtttataatagtgatgtgaaaagcacacacattaaatcaaattttgtagacaagtctcttaagtcataacatctcgtaaatttatctttcataaaatctcttctagtggatatgaaataataacttggaggttaaaagattgttcaaactcggttctagttagcaagtgggggaatcaaagatcctgcgtcggtgaagtaagccgagagatttgtatccgaatcttcaaacatctttacgaacttgtgttcctattcaccaagatggaaccagaaaaaagatcgttaaaagtagtccaagacagtacaaggtgaaagactcagagtcttatatgattaacgcaccagaagctcctttgctgattttctgtcccttggatctttttgtacactacacaagttaaagcaccatttcaaatgcctactcgttatagcaacaaaaatgacatgacaactggtcgaaatctgtctcaccattgcgagatgaaggagcaaaactctggagaaaagagattggaaggtgcacaaggaggcgggttttcaacaatggcgtccacaagctcgtacacgctactccatcctttcttgtgttctggaggagtatacgggaatttacccgttgcacattcgagcaaaaccagtcccaagctccaaatatcgctcttgttactgtacaaactcccgctgattctctctggctgcaaaacatgataacaacaccagtaagtcgtataaaaccacttgtaactctgaaaattgagtttgtatgtatattgagtgttgagaggtgaatggaggagactcacagacatataaggatatgtgcccacgaaagaattagcaagactacttgtgcttgtcaagatcttgctgacaccaaagtctgtgatcttgacttcacctctatgattgattagcaagtttgaaggctttaagtcccgatgaatgattcgcctctcatgatgaatataacaaagacc

SEQ ID NO: 35288 - DNA, 3410 bp, Arabidopsis thaliana landsberg
  unsure (1)..(3410): unsure at all n locations
aaggtgatttactagctgcttgtattttaaaaaatatcatgtaaatacttcacatatcttacaaagctaggttcaaatcattgaaagcaaatgcttaatctttacacatacaggaagcactgtacattattttaggaactaggaagagacaacagtctctcagtgcttataacagatttagtttgatttagttgtccctttgaatctatgtcatgggatctccaatctttgtaggtggggttaccatcaaacttcctcttaggtggtaggctttaaacccattcctcttgatgatcttgcaacttgatctcgattcaaaccttttgtaaatggatccgctaggttgtcaactgatttgatgtaatcgatcgtgattactttagttaagataagttgtcgaatggttttatgtcgtcgtctgatgtgacgagatttaccattatatagggtactttgtgccctgcctataactgattggctatcacagtgtacacgtattgcaggcacaggtatcccccacattggaatgtcttccaagaaattacgaagccattcggcttccgctgcagttgtatccaatgctatgaattccgattccatagttgatttggctgccacagtttgtttgctagatttccaggatactgctggacttccaagtgtaaagatgtatccactagtggatttaaagtttttggaatctgctatccagttggcatcactgtaaccttccaaaaccgcaggttctttaccatagtgcaagccatgatctttggtataacatacgtagttcataactctagttatagccttgcaatgattatatccttgattgcttgtgtagcgactaagtacatttacagagtgcactaaatccggtcttgtactgtttgtcaagtacattaaactgccaactactcttgcatattttacctgttgcacaggttcaccagagtttttagtcaagtgaagttgaggatcaactggagtttttgcagtcccattagagtaatgcttgaaacgatcgagtatcttctcatcatagtgggtttgagacaagataatgccttcatcagttctgatgatttttatacccagaataacatctgctagacccatatttttcatttcaaaatatcttttgagcatgtttttagattgatttatgatatctgtgttactccccaagatgagcatatcgtctacatataaacataacaaaatgtaccatgttggagtaattttgaaatatatgcatttgtcacattcattaatggtataattattagacatcataacaaagtcaaatttctcatgccactacttaggagcctgtttgagtccgtatagtgacttcacaagtttacatactttgtgttcttgtcctgggataacaaaccctttaggttgtttcatgtagattttctcttccaaatctccatttaaaaaggttgtttttacatccgtttgatggatttcaagatctagtaaggctgcaatgcctatgagcatcttgattgaagatattctcgttaccggagaataggtatcaaagaaatctaaacctttttttttgtcgaaatccttgtaccccaagcctagccttgtacctatcaatatcaccattcgttttcttttttattgtgaaaattttatttcttccccaatggtttagagccttggggtagatctgctatctcgtaagtatgatgttgcaaaatagagtctatttcagtattgactgcttccttccaataaggtgcatcaagggtagacattgcttctgaataggtttttggtacgttttcagctaaaaacgccatcaagaaatcatcacagaaagatttctctttcaagctcttttgatccgcctaggatgttcttcaggttcctgttctgtttcttcaacagtaatagtacccaaagtattgtcttcagcttccgaggttgctgcatctcgttgttcagaagttcgtttttgatcttttttataaaggaaaatatctttaaaaacgatgaatttgttgatttcataactgtattttcatggatatttggaatacctgatttatacaccaaaaatcgataagcactactgttgtgcgcatatccgatgaagatacagtctacagtcttaagcccaactagaatttaactcgtggtacaccacggaacaaatattttattcatatatataataatattaaattttactatttttaatatagtattaaaattatataattttatattaatattataactaanaaaattggttatgataaaataataaaataaatatttaacctgtgttatatcaatccaaacccgtctcgctgtatttcatatcaatccaaacccgtcctgctatacttctcgtctcatgatattttaatttttttatgtttaaatattaataatgtttcataaagttaaaatatatcaataatattctttaaaaataataattgtttttgactttaatgtaatgtcattctttgtaaattcttactttactaacacaaaagtactttaaaaaggtacttcaaattttttaatatatataatgttaatttttggtaaaaattattataaaatatttagtttaatcataatttgggattgatatacttggtttttgactaactattttttatttgaataacctaaatttagtcattttgttaatattatttgaatcaacaatatcaacttaatacatgtataatttatttatcccagaaaaaaagaacaaaattattttgtacaattgcaagtttaaaacaaaaaatatggattgagaaataattttgggttttagagttttattacgtaattaattttttaatgaaaatattaaagcatatattgtaatataagatttgattcattttattaactgaaaataaatgatttaaaacgaaaatcagggtgattaatgctaattggaaagatttaaatgtttttgtgatttttttctttagtttcataaattttagtaacataatagattttatatttagatgtaaaaataagtttagtaaaataataaatgtcaatggcataccatagtaaataagcgctaagtgaacatgttatttgctaaagtggctgcaaaaatgtatatatagatagttattgtttctcaaaaaaaaacaattataaaaataacgaaatacttattttccttaactgaaagaaataagtaattttatgttgctgggcctttatatgagttttattacgctgttgtaacttaaccatggttgggttaaaatgaaagaatgaaaaaaaaaaaaaaaaagtaaattaattgtcgactcatttttcataaaaggtaatttcagttgagtaaaccaaaataacccaaaccgtctatcaacatgcagcatctctcccatccacgcgcg

SEQ ID NO: 35289 - DNA, 1592 bp, Arabidopsis thaliana landsberg
tggacgtcacgacattccttcagtagtatcgtaacctaaatagtagaaacaaacacagtatcaatcgattgggcaacaaccaggcatacattagtgagacaaagtctcaacaattaacattgcaagttaaggtaatcaagaaactgaagaccacaacaaacatggtgaacactgaacagcgaagaatagatcatcaaattacctgtttctgtaggtcagatatatctttctgcaatagtgtgttttcacgttcccgtctcctcaagtcagcctatcaataagataaatgtataagaacagcacaagaacgcatcttgaacaaccactataacaatatcaggtacctttagctccataatgaacttctccatatttgattgttcagatacagaatcctggagtttttgattaactagacaataagcttcaaccaccctctcatactcccctgggaacaaaaacagatttaagcgtgtctccaacaagatacaaatatattactagtgaaagaaatctttgggagcgtaaaacatatggctccagaagcacagaagtagatcatacctctttcttcttggataaatccggctttctcttctaattcggataacacctacaaagcaggataccaagagtaagttaacaggagaagaaaaatattattctcaagtcattagtgaactgcagttgaaaaatcactagtgaaacatagagaatatagacaaaaccaaaagtggaaaagattgttaatctaaattttaaacaaagacctggtgataacaagttaaatagatcatacccgttgaagtatcatctcagcttcctttctacctaattgctcatgcctcatggcatcaacagcctcctgatacttctcataaattttggccagctgcaagataaaaagagtgatatatacaccacaaacagagttgaaacactgtaaactggaagtgtatactaagactaaaactcacactccatccatcacgtaagagtgaagctgctaggtgcagttcctgacacaccagcaggaaccttagaaataactgcttggctttcctctatcatgttgctggtcccagaattgtcaacccgtctggaccaaaggtatgtcagtagaaagatgtgagaattttatctgatccatggacactaggacaatcaagatattacaatatttgagtacaagttaaatctacttcgacaaataaaatactcttacaaatcacttcactgtacacccctaaaaagtcttaaaagtatgtaaaatatctagcaacaacaaggaattaaaaaaaattagtgactgctattttttaattgtcaaaagagttacattttggtatgagataatcaacgtaggttccaaacaacagaattatatgtaatgtggatcccttgaagcacgcaatattacttatccccactttaactcattttttctcattttgataagcaattgtagcaatccgaggggaaagtatacaataaaataaaaaatgcattaaatatggttcatggtctcagaaagctgacataccttgtgaaattgatgaagcgttcagatttaactcatattgagaactatg

SEQ ID NO: 35290 - DNA, 2804 bp, Arabidopsis thaliana landsberg
ttgttttatttgttttgatatttatacggtgtctcttccatactcttatgattttatttatgcagattgtgccttaccttccaaaattttcacatgcttcatatttcttcttcaaaaatccatacctttccttattagtaatcttttttttttcaagctcgtcgagatgtagctaagtcaagtcaataaactctttgtttgaatttctatgaattttttttttgccctatattgtttctattattttgataaaaaattataacttctaaattggttattaactctatcacttctcttctttggtgttgcattttagattctgttcaccttcacgcttcccagactaaaagacatcatcttatatttgttggaacttgattcaaattgatacgattaagaaaaccaccatcaaaccatgccccttgttgctttaacgcttcacatacaaaacacactttaatccctcttcacctcaccttcttatgaaaaaacctgtcacatacttattacctacggtgtctcttcccatcatcttatgattttgtctaagcaatacatgtcctaccttccaaacttttcacatgcttcatatttcttttccttgttagtaaaagtttttttcaaactcgtcgagaggtagctgagtcaagtcaataaactcttctcaagaataaaatctttgttttgcgatatattgttttctattattctaataaaaaggttttagcttctaaattggttcttaactttatcacttctctcctgcagtttagatcatcttcaccttcacgcttcccacattgaaaaacctcaacttatatattttgaaattttattcaagttgatacaattaagaacaccaccatgaaaccatgccattgttgctttaactcttcacagaacaaacacatcttaatccctcatcacttaaccttcatgtgaaaaaatctattacatatttatttcttatggtgcctctatccatcctcttatgattttgtctaaacagtacgtgtgctatcttccaaacttttcacattgctctatatttttttttaaaaaatctcttactttcgttgtaagaaaatctttttccaagcttgtcgaaagataggttagttaagttaataaactctttgtttgaacttttatttttgtgatggttaagtattatatttccataatgagatgcgtgagtattatcataaatacttagtgaggcgatcctcccatctacgagctatacacacaaggtaccggtgtgcatgccgttggtgctgagggcccaggagtgatgggtgccgcagctggaggagttcaggttccagaggttggtttggcgggcctgttgaggcagttgttggagcggttaccaggtgtggtaccagtggaggctctagttgcgccacgagtggcggaggtgcagcagagggctgcggttgctgaggaggttccatcttatttgaggatgatggagcagttgtataggattggcaccgggtatttttctgatggtactagtcctgaggaggcccacagttttaggccgtagttttaaaaacaaatcctaaccgattttccggttcacgggcgttacacatagcatcttttgggagttgtcatattggaagacacatttgattcgacatatccttgatgagatgcatatcgagaatttttttttttgataacttgattaacactttgttaaatatcacatgcaaaataaaatattcaatcaactcacgaaaagatctcactttatattgtgatcgaaagaaattacaccttacatcgtctggaaaagcccatgttccaatatccaggttgtcccctcaatcaaaaacaacatttcttaaatggttaaaagatgtggtgaagtttccagatgagtacgtgtctaacataggacgatgcatacacattgatcatggaagtcaaatgtatggtttgaaaagtcatgactgtcacgtcattatgcagcgactatttccgtttgcattctgtgaactccttccccatgaagtccatgaagcaatatcaggtaaattataataatttagcttcagtgtacttatatagttattaatctgtataataaacttattttttcatttatttttttacagatgtaggaatatttttccgcgatctttgtttaagaaatttggaagtcagtgatgttgttcgtatgaaaagtaatattgctctgacactttgcaatctagagaagatatttccaccatcttttttgatgttatggagcacttgactattcacttaccaacagaaaccaaactttgtgggcttgtgcagtttcgatggatgtatccattcaaacgattcatgtttcatcttaagaaaaaggcgaataacaaagcaagtgttgaagggtcaattgtggaacaatttattaatgaagaaattacaaatttcagctctcacaactttaatcgtgaagcgactattgtgtcgagtagtgctcagagacgacatgctagttgttttgctcaacaccacatctactcgtacgacgatgtgccgacattatttagacatgtcagaagtggaagtggaaaattatattatgagtggttaaccgatgatgacaaacacatcgctcatacatatattttgctcaactgtgtagaattggcaccattcgaaaggtcatttaaaatttacatacatatatatatacatatacacattcttttctccctcacatcacctgcagacaccaatatttaatgagatcgaatctgacattcttatgacttgtccttaagcctaatcaaacaaga

SEQ ID NO: 35291 - DNA, 2647 bp, Arabidopsis thaliana landsberg
cctataaatacccacgaaatttcgcttgtagttcatagccatgcgacaccaaaacctttagcttaaaccgttagatagctagttagttagtcggagtccgagtcgggtagaagttggtcgagtcgagagtcgtagtcgggtaattaggtaagtagttccgcccttagtcttttattctttttagaatatttttcttaattttctttttggtccgacgcttagatccatcattaatacgcgttggagatagctcggtcggatcaaaattattaggcggtcaagggtagaattttaatctctcgacattaaggccaaggtgagtaccgtagcgtgtgtagtagcacccgactaggttttatttttggggttatgatagttaggcatgaggttgcatttttatactttgtataatttatgcatttattgttcataatcggatctacgtttttacgtaagatcggcttggttgtttgattagatcttgcattcatgcttcatttattttgggatgaagtattttgtgtgcttaggctaggcattagtttagccattatgttgcttgattgtttgattgtggtaggatttattatcgtatttctttgctgtaattgttgtttgattgttcgtaatttttattacgaattaaattgttagcaagcctgctaggttgtttgattgctgattgattgattgttgttggttaatcttgtttcggcttgattaacctttgtgtgttagttgcgtgctagtaggtattattacgagtagtattaggttacattaggctcgtaataagtaatctggttagtcatttttgtgactaaggtgtgacgatgtcgtgattgtccaaatggctcggaatggttcgttaccacccaggactacccgacggggtagtaaacgttttaccgtaagggcgttggtccctcttacacggtttggagtggggaagggatgtgatcgttttagactttgtgtctagcggtcggagacattgccttgtgggaaatcagcatcgtatagtatagggcccgtaggatgaagagtcgttagcatgctagttttagatttagtggtttccgttgcatatactctgtaaagagtattcattgcttgtttgtttgtgttgtgtgatttcttgtcgagtatactcaatcgagtatactcgtattgattgtttgattggggattgggattgggattattttgttatttgttagaaacccggactcactcagtaatcttagattactcaagattctagtttttgtcttacaggtaaccttagttggggagaccttaaggggagcacggacgttggggaaccggtgtagagtttgttgtctttgtaaaattagatttgtaaactgactcgatttgagcattaggctcgggatcccaatccattgtaagtgttttcatgttttattgaataaaagagattttctttaaaaatccttgtgtacttctgatattagtcttgtccggactaacacaacttacggacatggtacgggttgaaaagccttaggccgtgttcgtgaggaacgatgttcaaggatggcctgaccttagtaccagatgtgttcggggaactcggtcggatcgtctacgggcatcacaagtaacgcttccggattcgttcttagtcctagaatggttcgggggtgttacaagagtggtcgtagggaattggaatgacgaaggccctcctgagcatgaggggaatgagattttttttatcgtaagcgttcagtccgttgttgtctacaaaatctcgcctcctgatttattgtaagccctattgccgccatttccgattcttcagtttctcctcaagcaagtccgattctgatctctacccatttcaattcacccgaaaacacttccgggtcttcaaaaatttctgtttttgagcagaagattagcggcgagagtttggttaaggaagttagggaaattgctaatttaacttcgattaaagtgattgaacttccgagcaacaatggtgaagataagaagacagagaagagaatcgaagaatgtgatgttacgaaagggaagtgggtttacgatagtgattatccattgtacacaaatgcgtcttgtccttttatcgatgaaggatttggttgtcaaagcaatggaagattggatcttaattacatgaattggagatgggagcctcaggattgtcatgctcccaggtttaatttcttctttctaattttgttgttttcctcgtaggcctttaagaagatctctctattgaagtagtagtggttggtgatagtgactgatgatgataagtgggattcatagttccactgagcacttaatctctctgaataagtaggaatgcaattcatggtcctgaattggaaattgtggtatgtgtgagtttaggttcaatgctacaaagatgctggaaatgattagaggcaagaggctagtgttcgttggagattccctaaaccggaaccaatgggaatcaatggtttgtttggttcaatcagtggttcctcccggtcgaaaaagcttgaacaaaaccggttctctctccgtcttccgagtcgaggtaattgaaaccgactagttatttcttatagtaatgataatgtgtttagtggaattgctgattttcgag

SEQ ID NO: 35292 - DNA, 2453 bp, Arabidopsis thaliana landsberg
ttgtgtacatatatagaaatgatattgtagcaaacgctgtggtagccactagccaacgaacaaagtttcatatacggacatgcgtatgattatttgaaagaaaaagagcacagggaaatagatagatagacccactaaataagtaaataatatgtacataatatatagtacagaagcaatgaaagagacgtatatatatgttgactgaatatctttttgtaattataagaaaaaacaaaatatgtaagttttaaacgatcgatcatggatataactctatttgctggttggaaaaaaaattgctttccatatcataattttctagctcaatgcgataacacaagattctatatgttaaaacaagttaaataaattgacaacaaatatgattgtttagatgaattccctattactgaatagagttactcatacattaaaacgtgtgtttcctagttaaattttattttgaagaaatcaggagaatgaaggtgaaacatacaatattagctaatcaattatcaatttttttttttttttcaaaatcaactcatggtgaactagtagttgaaagttagtcatatgacatgtaaaactcgagttttcttgttcgattattttcacttcgattagttggccatataacattgctatatactataaacacataaaaaaatatcaaaaacactatattcctccacaaaactcacatagttttgtaactcttatagtgaattaatttgtgtagttcttaataacaatttgtataaatataagtgagtttacactaactctattcatccgtgtagtataagtttttgagcatttcgatggcttagtaggtgcggagttttagctctcttcttcttatagatacgagtgggtgatgggttaatggatggataaagtagagtgtagtgaataaggtcgagtcggtcactcgcggtgcatggtcactctctctgcccgttctcgtgccctctctctctctcgcaacctcccctattaaagtctctaaccagtcacacagagagtgggaaagagagagagacagagtcagagtcttcgtctgcaagagagaacaataccactcaatcatgatctataacaatggacgtctatggcatggcttcaccagacttacttcgaatcgacgaccttcttgatttctccaacgaagacatcttctccggtttctcttccgggggttccaccgtcgctactttctactcttctttccctcctcctcaaaaccctaggttccaccaccaccatctcccttcctccgccgatcatcactccttcctccacgacatttgcgttcccgtataatctctctccctctctctttctccaatcaaagtttcgactttgaaataaagattgtgttttgatttttgttgtattttttgtgtgcagagtgatgacgcagctcatcttgaatggctttcgcaattcgtggacgattctttcgctgattttccggcgaatccattaggaggaactatgacttctgtcaaaactgaaacttcctttccggggaaaccaagaagcaaacgatcaagagctcctgctcctttcgccggaacatggtctccgatgccactggaatccgagcatcagcagcttcactccgccgccaaattcaagccaaagaaagaacaatccggcggaggaggaggaggaggaggaagacatcagtcatcgtcatcggagactacggaaggaggaggaatgaggagatgtactcactgtgcatcggagaaaacgccacagtggaggacaggaccacttggacctaaaacactatgtaacgcttgtggagtccggtttaaatccggtagacttgtaccggaatatagaccggcttcgagtcctacttttgttttgactcagcattcaaactctcaccggaaagtgatggagcttcgacggcagaaagaagttatgagacaaccacaacaagttcaacttcatcaccaccaccacccgttttagttttcacttttcactgcctcgtcagtcgtcactcttttttttgtttttctttttggttcttggggttgggttttgggtaacgtcacgtgatgatgacgtgtcgcgatcctagcggcgttaatcacgtgaccgacgacgacgggagcctaaaatttttagtgaacgttggaaaatcaaacctcatttaattgttaattattaaaaaaaaattatatctttgggctttgccttttctcctacgttatttacttcatccttcaattttgttttctttaaatatttgcaaatgatttaatcatttactgaagcatgaaatcagaaaaagcttcattaatttccgcttacactaaaaggcgtcagtgttcagacttccgagttatatatatataccacaaacaccctaatttcaacttcaagtttcgatcaaaaattggggtcctaattccggaattcgaaat

SEQ ID NO: 35293 - DNA, 2562 bp, Arabidopsis thaliana landsberg
ataattaagggtttggagggtgttttggtaaccataaagcaagtcatgggttttgatctaagctcttctttccacaagttttgggcaatttcattttttatgctagaaacacatgttccatgttaagctttggaacacatgctctgttctcttaaaaacaaaccggaaatcaataccttgacggaataaatcatccctttccctaagtattgagaaatgaagaggagatatatataccatcaaagacgtaggctttgatttgggtggttggattgctgagtctgtaaaaagcatcacttgccttgtcagctaagactctgtattgtatggatgcaaccactgtcacaaacacattgtcctgaaacataatcatagatgaattaatggtccattagaagaagaagttttgcattatgtgtgttcaatgttacttacctttgttttggtttcacactgaacatcgagttgctgaagacgaagggtcagtgtaccggcgacgtaatcaccgatgacccatggaacaaattggagacctggattaagtactttttggaatttgccaaatctctccttgaccgcaacatctgattgcttcacaagcacgcaacagaaaagattccccattattctgaacaagaagcaagaagattatgaatggcttattataggcatttgtctctctgtaagtttgtggaagagaagaaagtcgcaggagtgttatatagacaaaagtaagaagaagatcatgtcaagttgtcatctagttgtactactcctcggaaatttcctatttattattcaatagtggcattttcattgaaaagtcaaataggatatatcttggagaatattcaataataatagtcgataaatctgcttttcgttgatataacaattactttttctttgcaattctttttgggctgggctaaaaattagccacattatccacttcatattatacaaaccacacaattaaaatcttcgagtgctcgtgcatgggatctgtcactaacattaacgttaactatctttctgtagtaagagaatcgaatatactttttcgaagaaaagaggataatcgtatcgttgaatatactacagagccttgtcagacgccaataaacaagagttatctagtagtatatgcttgttccttttgattgagtaaacgcgttatctattacattgtatgttcttatatactattgatttaaaggttcaaattcaacaaaatgtaggagaaaaaagtggagtgtcgctttatttatattattctgcagctgttaactgtagggtttcgtaataatatacgagaacaagatggttctacttctactagtatatatatatatatatatctaaatctaattttttggtttctgtttgatgtaaaatggtggaggtggtaaccgaatttatggaacctcggaacggtccattatattttaaattatagttgaatgtttttatcataacttaataagaaaaattatgatgttggtaaacaatcatcaagcttgctagtgtgcaaagtatcttactgtaatcctttttataaggaaattatttgtatataaaagtcgttggtccttgctgtttgcatgtttaaccaagaaagtggataacttgtatgtgagtataaaagtttcacgtaagaaaagttgtcagttttcttctttcgtatttatattttaataactcgattatcgacaagctacaagtagataagtccaaaaatcaaagagaagaaaattttcaaaatttcaaagcaaaatgtctctcacccccacccacatcttccattaccattcttgatatctatctatctttacattgaagaagtggtggttgcatgctggtgaagcgatacgaaacgactaatacataatgacaatattaccctaacagacaatttgttcaagagttacaacagacgaagaaacatgaggtcacaaaggtagtaaatacacaaattcggatcttcttcggaacaaccttaattttccttctttaaatcggttaacaatgtcggttttacatcggttaaaaaagacgtttgcttgcgtccacacttgcgagccaatctaagtagttgcacctttaggcttaggagacggaatctgatgacgataaggcgacgaaccagcttgaccatgaggactagacaatgtccgaaacactggttgcccgtttcttgacccgaatccacgaccagaaccagaaccagaaccagctttcaaacgttcagcttgcattgtctggaagtagtaagaagcgctagccatgtccttgaggtgtgggagaggcttaagtacttccaccacttcactcattttgggtcttattttggagtcacggctaaggcattgtgctgcaagctgagtcactttttgtgctcctttaactgagaaatgaccctccagcctcggatcaagtaaccggtagaatcttcttttgtccaggagatgcggtctcgcccattcaacgaggttgtgttcaccgtttggtcgatttttgtccattgatcttctaccagtcagcatttcgagaagaaccaca

SEQ ID NO: 35294 - DNA, 4926 bp, Arabidopsis thaliana landsberg
  unsure (1)..(4926): unsure at all n locations
ctatcagtgatatatatattcaaacaaacggatggggcagatttttgcaggaatcttttaacatccttattagaatgattaaattacctattataggcttcgggaatcaatacatgtggtcttggactgttgtgtgtgttgacccggcgaaggaccctttactttagggtttgaatggtgactgtggtcgggatgaacaaatgcatcacaagcgatttgtttgcattaatcattataaatcattctgaagtatttgtatattttaaaataataaacactcctaaatttttattagaagactgaaaatacgatcgttatagtaaacctcttaattttcagttgtgaacgtgaaaaaaatcattaatcaattaattaaattatttataaatactcaaagtctatcggattttatatttctgatcttatacgtggaaaacatgcgtgcatagtcattatttaaagctacgagagaatttgaaaatgagagattagttttgcagttaaaagcatgagaaaattgcaattacattcgtgttacttatttgttcttcgataagagatgcatacagtttagtatttacatgttcttcttggtcatcatgtgacatgtgtaatgttaataagttgttttttcgccatcattagctaattaagtggaaacacatatttcaacctcgcagcaaggtacgcagagtgaaatgcactagcttacggattcataagaaaacaaaagccaattaatatttatgggttcatcaggaacttaaataaataatctgtaatgtcattggaccgaatctcagtgtaaattattggcagtgtataagtatatcataaactagcacttatcatatcaaacaaacatattaattatctcgttgtgttttttttaaaaaaatcttgttttcaccattaaatatgttacagaaggatataaaatattacaaattgaaataaaatnnnnnnnnnnnnnnnnnnnnnnnnnnnnaatcctcaagatcaagtcgacaacaacagtcaacattcaacaagctcacatggagtcatggacaacaagtatcctttcgtaattacctttaggccctccaatttattattattatttgtggtcgtcctttttgttggtagagtataattcaataatacatagttaattacatattaaactgaaatttatgtatcattagttgccgtttgttctactgataaaatgtttttgttttgtctctaaacgaaacgtgcaaatgttctttaaccaagaacaaaaaacaaatgtaatgataccgatattttaggacagttttcccatactctcggacgattttgcccttgtctcattggactctgaatacacacacgtctgttctatataagacacacagctccttaccacaagttgttgttagtctactcattaatcctcacaactctctatctctctctcgccccattctctatcataatgacaggtgccacaccggaaaaccgaacggccccgtcgccaccaccggtgaaacatgtgccggagtcagttctgccggctaaaccaccaaagaggaacaattatgcattcgcgtgtgctatcttagcttccatgacttctatcctccttggttatggtatagttttctcgttgaactcttttccggtcaacgcaaaaaatgaaaactctaccaataatatacacacacacatattctttattgattctaatttaagtgtatattttgcagatataggagtgatgagtggagcaatgatttatataaagagagatttgaagattaatgatttacaaatcgggattctcgctggaagcctcaacatctattcacttataggatcttgcgccgccggaagaacctctgactggattggtcggcgttacactatcgtgttggctggagccatattcttcgccggagctatccttatgggattgtcccctaactacgctttcctcatgttcggaaggttcatcgccggtatcggcgtcggatatgctctcatgatcgcaccagtttataccgccgaagtctctccggcatcttcccgcggcttcctcaattccttccccgaggtaaaaaaaacaataatagtttacataaaaatttcaaaacatatagtgttaattatttacttaaacaatatgataaaacattataaacataaaacataataatcgtaaactattttttttttacttaaacgctttttagtgttactaaactgttaaagttgaccagattataattgttttatcaaccttgaaataaaatttaattatcattgaaaaaaattaccaaacaatttggcggtttattttgacttttattcatactaaaaaaaagaatgaaagtaatatctgacgtggcagtgattatggtgacgtgtacaggtgtttatcaacgccggaattatgctcgggtacgtatcaaatctggctttctcgaacttgccgttgaaggtaggatggagactgatgctcggaatcggagccgtaccttccgtgatactcgctatcggcgttctcgctatgccggaatctccacggtggctcgttatgcaaggccgtctcggtgatgccaagcgcgttctggacaaaacctctgattcccccaccgaagcaactctccgtctcgaagacatcaaacacgccgctggtattcccgccgattgccacgacgacgtcgttcaggttacacacttcaccaattgaaatccgaatcgagattttgatcaattgaattcgaattcgtgatttctccggccacattttgacctaatttcaaccaattgaattcgaattcgcgatttctccggccagattttgacctaatttctcaataatttcaggtgtcgaggaggaacagtcatggagaaggagtttggagagagcttttaatccgaccaacaccagccgtgcgtcgtgttatgatcgccgcaatcggaatccatttcttccagcaagcttccggtatcgacgcggtggttctcttctcaccgcgaattttcaaaaccgccggactcaaaaccgatcaccaacagcttctagcgactgtagcagtaggagtagtgaagacatcattcatactagtcgccactttcttactcgacagaatcgggagaagaccattgcttctaaccagcgtaggaggaatggtactatctctagcagcgttagggacttctctaacgattatagaccagtcagagaagaaagtgatgtgggctgtggttgtagctatagctacggtgatgacttatgtagctacgttttcgataggagctggaccgataacttgggtttatagctcggagatattcccgttgaggttgagatcacagggctcgagtatgggtgtggtggtgaacagagtgactagtggtgtgatctcgatatcgtttcttccaatgtcgaaagcgatgactactggtggagcgttttacttgtttggagggattgcgactgtggcttgggttttcttttacactttcttgccggagacgcaagggaggatgcttgaggatatggatgagcttttcagtggtttcaggtggagagattccaagagtaagcctaagggtaaccccgagaagacggtaccgaatcccgaggttgagattggatcaaacaagcagtggaaggaaggagacacacaaagttcgtagaaaatttgatcagatatgtaatttgtatggtacgggggttttatgataaagaatgaaaaactgggaaacgaacaaattagcataacaaacagatttagtatgtgtgacggttttcgtaatgagagttgcaataatttaactaatataattactgagatgaaaggtactgtgaacaaaattggtagagcctaaaagaatatcaactcactagtcacgacacacttttggtgaatgaaacacaaataagagaaagcacacgaaaccaaatgttttggagacaatagttttgatacgtctcaaactcactcactagttttgtagacaatatttcacaacatgtattaaaataagaagacaaacttttatattctcccaagtttttgacaatacgaacatgtaaaaagatccaacgaagcacacgaataactactagaaatattatttttcaaaggaattaacacagtttgagtcattttcgcttgaaactgatgagtcatcactctccacattggggaattctgaaaaaacaaaacccattcaccccccgaaaaactagatatatgaagcttaagttaatcaaatttcaaaacataagaaagaagcattatcagcacttaagaaggtcaagtgttttaaaatccaaaacgtattttatgtcataatagaaatcgcactatgatgatataactctcgcctcgttatatcaccctaacgtgactactattacgacatgaaatacgtacgatagctgatcatcactttacattctcaagtacagacaacccttattccacaaatttgatatatatatccatcgacacgggctgtttcgtaatgtgattcagattacatatattacatttagccatcggatacaaaatgaagattagcctaaacctcattaagaagggcgaagaaaattgaagacaaaagaagaagatgncgactatttctcggtagtttcaatgttttcagtgtttttttacgggccacggccattggttttatattagctgagagtttattagttagggtttataaaacaagatcagctcgaagggaaagcaaatattctttcgaaatttccgggagatttgtattcctcttttcagttatgcgaataagttcatatatattttacttttatctcgctttgtttttttttcaaaaatatttgtacccgtaccttggagaggagagtgtttctgtaaaaataatgtttaaattttgaattagaccaatatagtttgncaa

SEQ ID NO: 35295 - DNA, 2128 bp, Arabidopsis thaliana landsberg
ttttaataataaataaaatgtaaaaggaacaatgttaattacaaagctcggtggcaaggagctgctctgaccaaaaaaaattttaaaagtcaaagatactacaacaaactaagtagaaaggaaatacttaggagtgattagccatgggaaaaccattgcgagagtagacgtccgcggccattgcgagagtagacgtccgcggccattgcggtaacgacgagctagaagagtgtcacgtatgctcctatccatctgtggaaagacagaggcagaagaagttgagatgttttcttggattctgatgtttctttcttttcacagatggaagacaaagcttgaactgcgagacgctttagagagccttggggacttagataaaagccaggttatgagggtagaccaatcaacaaagatacaaggatgttaaccaagacgttgtagtaagatgtgccaaattctcctcggagaaagtatagtggagcaagagatggtctctgttttcctccgcagagttacaaaaaacacagtccgaactgagttgcattccccaactagtaagccccattttgacaggtagtctgtccatgtttgcaatccaaaaggtaaaggcatgttttgggacagaatgctgccttctcccagaacttttcttttagaagggcgaagctgatcgcaagttagctttattaagaagctgttggatgagcgactaccaaatcccccaactccggcggaaacacatcgttactgaaaaactgagattccttaaacacccaagccctccaatcgatttcggaatcaaatcgaatttttttggacaaaataaggaacccgagaaaaggaaccaagcccaaaaactatagagagatggagagacggaggcgctacaaatcatggagagagatagagagataaatttcttttattttgcataaggatcagaattgaggaagaagaagaaaaagaaatcgagaaagtggagaattggaaagaaatggaaattgcgaattgaagaggtgggctgagattgtgtttagagatctcaaccgtctgtttttatcttattggccacatgttttattatataccacatcaaacaaaaccaatcgagccggttaaacaattgatggtttaattagagaaggatataattgtctttatttcttccaaaaacaaggaaaagtgcttcaactctagaaagtgcctaaaacgtaaaaacattccttaaaagtgtctaatagtgcaacattcccattttcgaaatgtatgtatttgggtttaaatgaaggggacatttatttataaaaaattaatattatattcctgctcgtttgttcatttggaatatgcattaataaatattataatgtcaaataatccatccaaatgatccatctaactaatccatctgaataatgttcgttttcatttttggtaattaagctagatgattcatctaactgtttttctttaaaattttgtttgtttgttcagctgtatggtccatctagatactcctagtaaaaaatgattaaaatgcccatattttcatcgaattatattttaattcttaactaaccatatgaattttaattttactgatcaaatatatattttacgatcaaataaatttcaaattattataccgaagaatgtcgaatatattttaatcatacaaaatcaaattttgaagaacaaaaaaaatgaccaaaattattagtttcattcagaaacaatttgaaagtggctagaccgaatttgactaatttccttgattctaacttcgtgaccaaagcttaattctgtttcagtctatgtcttcatatcttcttcagcttttgacctctcaagccattccaaaaagcagctgcgttgatggctttcttaccaccaagctggacttctagtacctgaatcagcaacaccaaatatgagctatataaatagtagattagtgtctgattaccacatcacaaacatctgcttttcgtattaatagtgtgagtgggtctgtaatttggttgatttatagaacagtggcagtgtttcgtctatcggtttatctctaaagctgtaccttctttgcggggaatattagtgaacctttcttgaatgttacatagtcttg

SEQ ID NO: 35296 - DNA, 4952 bp, Arabidopsis thaliana landsberg
  unsure (1)..(4952): unsure at all n locations
ttttcgggatggcggccgtggtagtgagttgcatttttaaatgttataatactcatgatgatgatcagggtcaggagaacaacaacgatgggcatgtcagcatcaccatcaaggaacgtgtcggtataaagccttacgttctacgatcgatccctatcgtagacttcaataccaaagacttcaaatacgtcctcgaatgcgtcgtttgtctctcagagctagccgatggagacaaagctagggttttgccgagctgtgatcactggtttcacgttgaatgtatagactcctggctgcaatcaaactccacttgtcctatatgtagaaagagagtttgtttgaagcagtcaagaacgagaccagaacttggcggccgcgacaagagttttaaccaaaaccacgaccaaacatccgaacatcatgagttttcgacagatcctccgacgaacacagtcacggcaattattgaagatggtggttgcggcgaagcaaacgaaggtcaaccagaattaacggcggtggtgatagacattccggcgaaagagatataaatcaggcccatgctaggcattatgggcccattatatgataatatactgtccatgtattaagctaccgtgacatcactaaaaagtgataaataaattatttttttggtacaagacttatgatatacactaatatactatggtagtagtatatctcaacttgcaagaaagatactaggaacgactgatactgtgaatgtcgcgatgaatgtttttcttttaataaatgtataaatcttgtagtagtaacttttttttagaaacaattacatttcccaacgctctctactgacacaatttaaatagataaactgtgtatgtgcagcagcacgttcaaagcgtgaagacaaacaaatctatcaaccaaacaaagtgacctttataaagaataattggcagaggttttattacaacagacaatttttcataaaagtagtgtggaaataggtatcttcaaaaaattagttgtgagaatataaattttgttcactactaatattttaaattctaaacaatttgatacaacatacatcaaaggggttatttaattattgcaaaaaatgtcttgaaattttaagtagtctgtaattaacctaaaagtaaatgttcataccaaatatgatatttttgttatttataaacttatggtagtttttatatttattatttatttttaaaattgcctctctcttttttttggacatcagtctctcgattactgcattggatgccctgtatttgcaacttgttgatagaaaggattacgcaagttgttgctgtcaacaaaaagagattatgcaagttgttatgtttaatatacccgttacacaatttatcactttttccgtaaaataagttccccgccttaaattagctactctagataatgaaagattaatgataaagaaggaatcaaattattcacatgattgtaacatcaacttttgatatattagaaaaaaaaacacagaaaagatcgccaaaaaaagaagaaaaaaaaaatgaaagaaagcatgtgatgattaccagtttactgtatgcttttctaaacgagggaacaaacttcattcataactatttgtagcattttatcctatatggctataattcaataatgtactngtatccgatacttggatttaggatacaatctctcttatttcattttctagatttgggccattaaactaccgacactgaaataaacatttctttatagatgacatttaactaaactatgttggagagaatatgatctgatgaaatgggggaaaaaatgtttgatatgacatccactgagactatgtttataatcttactaaacctaccagagatcagatataaacatgtttattgaaatcagaaaaataatttttagagatgtcatcataagagagaataatttttttccaagtttaataaacaatcagatactcaaacagattaaaacagtttagtttatatcattcatatcttttaaaagagagctagagtctgcgttatagcaacaatactttgtatttaaattttattttcatcaaattgatggaatagctttattccaaaaaaaaaatggtagatggacccgtgacaggcttgcagccatcggcctaaatactttatatttataatttcatcaataatttcggtgcccctaatatctgattgtttacatataatcgctatgtaacacttttgctttgctttaattacacctgtatactataatgttctgccatatcattttataaatgttaactaagtccttttatgtatgattggacgttccaagacccatcattaacaatttataggtagaaatagtcctttacctccatagtttagtatgatggcagttttctcaactattgttgttaagatacataaatcagcattctatacttgtatgtaatcaactctgtacctaatgttttaaaagaaagatctaagtactgtgtgtaaaaagatttatacttctaggtaagatagtactaattatattatttaactctttaaagatacaaatgttatcaaaactgaaaataacaagtgtttctgataacgacggtccagttacacttacacatcaactgaatccaaagtatagttttagtaacactcgagattttcaaattggttgaatgacgaaacgaatactaaaatcagaaaagaagaatatgctttttagtaaagaaaaaggtatattaattgtcggttaatgataatataatcctagtttcctaatgtgtatgaggataaacgtggacgagactggtgagttcatcactgccaaagcaaagcaacgaatatttaggtaacacatatacaaaattacacaaaaatacaaaaatacaaaagcggcaatagactcctgtcaatttccgtataatatgaataatattctgattaaaacataaaacgaagatcttatctttacgagcgaggcagcttatataacccagtggaacgttttttgtttttctgaaaattccactcaaataatagagtcaagaaaagaaaaccagaaaaagccattttaaatagtatcgtgtttgattttaatttcatcaacataattattatataaacacccactcttcacgagtaaattcatcatcactcactagtgtcgaacaatggcaccatcaatgaaagaactcttttctaaagataatttcaagaaaaacaagaaacttgttttgctatccgccgccgtagctttgctcttcgtagccgccgtcgccggaatctccgccggagcttcaaaagccaacgaaaaacgaactctatccccgtcgtctcacgccgtgctaagatcctcatgcagctccacgcgttaccctgagctctgtatctctgccgtggcaactgccggcggcgtcgagctagcgtcgcaaaaagatgtcattgaggcatcggtgaacctaacaataaccgccgtggagcacaattacttcaccgtgaagaagctgatcaagaagaggaaaggactaacgccgcgcgagaagactgcgcttcatgactgtttggagactattgatgagacgctggacgagctccatgaaacggtggaagatctccatttgtatcctaccaaaaaaactctccgggaacacgccggagatctcaaaacactaattagctccgccattaccaaccaggagacttgtctcgacggcttctctcatgacgacgccgataagcaagttcgtaaagccttgttgaaggggcaggtacgtaaagaacctttgaaaatcaaaaattaaatatcgcaaaggtatacaaattgcatttgtttttacgtttatgttcgttcattaaattttatggaatagatgaatgttcaacataattaaatcacttgttttgataatgtttatagtaggaaaatttatatagagttactagaaaactagatatttcatacatcacatcacaattatcaaaaaaagaaaaaaaaaaaactttcttacatcacatcacatcttagtgacaattttttagagcttgtttattcttacattgagatattgttagctagtgctggtccatacatacgaatagtagctatctattttgttattagtatatacttgtaattatatatcaacttgttggtgtcacaattttttgaaaatatagctttataacgaaatgattaaatgcagatacacgtagagcacatgtgcagcaacgctctagcaatgatcaagaacatgactgatactgacatagccaacttcgagcaaaaagctaaaataacctcaaacaaccgtaagctcaaggaggagaatcaggaaactacggtggctgtagatatcgccggagccggagaactagactcggagggatggccaacttggttatccgctggagataggaggcttcttcagggttcaggtgtgaaagctgacgccaccgtggcagctgacggtagcggtacatttaaaactgtggctgctgcggttgccgcggccccagaaaatagtaataagaggtatgtgatacatataaaagccggagtttacagagagaatgtggaggttgctaagaagaaaaagaatataatgtttatgggagatggtcggacgagaactattatcaccggaagtcgaaacgttgtagacggtagcaccactttccactccgccaccgttggtaagcaatttaattacttaactttttgacaaaagataaaagcaattttgcacgattgtggtcctttatttggtggaaaaatctttactcttttcatgcacattaaatatacacatgtagattcttgttttaatacccccactacaacatatattcgcgcacatgtaacctagtagtaacgagatataattaaatgtaaatttgaatttaccaaattgaacaaaaaacttagttaaggatctgagt

SEQ ID NO: 35297 - DNA, 5098 bp, Arabidopsis thaliana landsberg
ccctctgacagtcctatcacagtcctcgttgtaattgccatctgattgagcaaggttctcaaccaattcccagcctttttcaacatccttgttctgaaaattcccattgctggcggtagcctgaagcattctgatgcgtggtaggactcctctgtaaagagtgctgagcagagaggctttagtaaagccatgatgagggcattggttggtgtaacccttgaaacgctcccatgcttcacagaagctttcaccattcttctgtgagaaaccagaaatctcatttctgagtcttgcagttctggcattggagaagaactttgacagaaaagccttcttacaatcatcccaggtggtgattgagtcatgggacagattcttctcccagatgtgtgctttgtctcccaaggagaatggaaacaaacggagcttgaatccgtcttcactgacaccattgatcttcgttaggttgcagagcctatcgaattcatctaggtggtcgagtggatcctccattggcagaccatggaatttgttcccctgaatcatcgagatgagaccactcttaatctcgaagttgttattctggatagcaggaggtgcaattcctttcctctgacggtgatcacgtggtgcatctccagcaccaatgttggcagggccattttgtttattctgttcttcagccatttcgagtggttgctgaggtacagggttgactgtggttctcctttttctgagttcgcgagctgtgcggttgatgttgtgattgaaaaggaggttctggttgcctgttgatcgagttcgcatacaacagaggtgtacctggatcaagaagacaacaagaaaaacagacagttagtaactgaaaagaaaattgaaaaagaacttgatctaagcaagtctgaaatctcaaatgtaacaaacaaacacccaattggcaacgacgccaaattgataataggtttttaagatcaattaatcctaaagcactatcatgtcattgtagtactgaaggttgtcaatccaaatgggtgtgatgctaacaatcaagatgtgatcagaagtcactaagtcaagccaagtataaacaggttttggtgcgttctagcagtcctaagtgaacatgcagaaaacagaaaatcaagcagaaacaaataaacactcgaccaacacagctcgttgcagagcactgggtgtggtcgagtgacaggtcgagaaacagacagatactgtaacagggatactcgactgcacagtctgttgccagacaactgggtggtcgagtatcaggtcgagtaacagtaaagaattgcagaaactaagcaacagatgacaggatgcagtacacagcagtagagtaaacaataaaatcaatcagataaagaattcctaaggatggggtaattgagtagtttcgtttcctcagtttacaggtgattgacatgctcaataaggatggggtaaagagaaatccggattacaaaaagtctagaacacaagttctgcggaaataaaactagataaaaacttcttgtctgcgaaaatgtgaagtacatgctacttatagccaaatatcccgaaaccataatactcaaaacgacgaagtattgggacggattaagaactgtactcgacccatgtggtcgagtgagaggtcgagtgaatagctggagtcttcttttcttccttgtgctcgagtgtctggttgagtgcggaatgaagaaggctctgaagcttgtcatcgagtatgcagtcgagtggtgtgatggtgatactcgacttccaggtagagtgatgaggtcgagtagaggtctggcaatgggatgaagtcactcgacctgggggtcgagtgatgtaatccagtgatggccagaagatggagatgaagtcactcgacctgggggtccagtgatgtgatcgagtggttgtcaagagatggagatgaagacactcgacctgggggtcgagtgatgtgatagagtggtggtgttttcttcttgaccaaggggtcgagtggtctcttgagatcttgaagctcctactcgacctctgggtcgagtggtttgtcatgatcaggtccgcttcttccagttagctcgtcgacagctccaaatcacctgaaaacaacacaaatatgcaacatgcatgcaaaactatcctaaacatgtaaagtgatgacaaatgatgtgaaatggtataaaacagtgatgatatgatgctaaaatgatgacaaatggatgctcaaaacatgaaaaatacacacttatcaactcccccaaacttagtctttgtttgccctcaagcaaacaatcaagaacaagctggaggtgaggtttgaaagcggggactcagagccaaagcaccagataaaccagatgaaatcaatgtccaagttgaaagttctaatctacaagatcgaattctacttaaaaatgttagtcatgcctcatcatcaatcaatccgactcatatgctcgacctacacaagtttacaaatctaccaatccctttaacattcattagttctggaacgtgaatcaagcaatgcatcatcaatgaactcattaggctaaggtaaaaggtcaagagacaaagatggtcccttacagaataggcttcagtaataggggatctctcaaaaaatgattaagctttagtagaattctaaaggtaagtcccaagctatgcatacagagataagatcccatctaccctgaatatatcaaatgaagctctaatggtaatcacatctccaatcccaatataagaacttaactctaccctttgcattcatgaatcttttaagccttttttctaatcattcttttcttttcttttaactctaggagaagctttctcaacactttgatacatctagcggatttggatttctttaacaactaaggttcctgtttttaacattttaaaaccaagggcttttgcccatcttcaatagctaacaagaactctttcttttctttacaaatcccaaaacctttactagactttttctgcttctttagcttacttcacctagagtcctttactttttctcatcaatgaatcaacccccctttttttttttttttttttttttttttgggaaacacatcccaacccaaagtataagcacccacctagtcctatctagtccgaaaaatgcgaactagaactacatgagacactatttctgtcgttacaaacctaacactttctaccaagcttaatcggaataagacctcacaaacactcacaagtgatatagagcttgaaagaaagtctaggtttgggtttgggttaactgctctaataagaagagtcagctacttggattaacaagagtgatcaaaatgaataagagaatccaagtattttagggtatccatgagttcaaatttgatgcagacatgataattaaagatcagattcaggttcaaattgatagggaatggtatcagatcatgacagtgaggtcgagtagagcaatctaggcatggttcagttttatttcaaattcatcgactatgcaacagacaactagcaacaagggcactgagtttatccggtgaatcaaaatgcttacaaggctatctcatcatcatcccctatgcatatgcaacaatcctaaataaaacactctagactcgatcctaaatgtgatgcaactacatgaacactctttttttttatgaaatcattttctgaaatttttcaaattttttggttttttctatgccttagatgaatgcagactcaaaattatacacaatgcaacacacacttcctgagccctcccccaaacttaaatcacacagtccactgtgtgaataaacttggaagagagtactcaggacaaatccaatcacagaaacaaaaaaaaaaaggaagaaacaaatcacaacagacggtataatacaatggtgaagtgaggcgcttacctcagtcgaagaatgaacgtagttgctcgtcaatggctgcctgtgattgctcccaggccatagacgaaccaccttgttctgtatcagcttcagcaggtgggtactcgacctcactgcctctatggcggccagcaccgccatgagtatactcgacctccattcttctgctgcggccaccaccgcagtcgagtgatctcctgccgtggataagctaaaacatggtcgagtatccttcattgctctgtggtcgagtattgtgttgtactctcagagccagaatccacttcactcagctctttatacttatctcctgaaaacactaaccaaatgcatcaaaaacaacaaggaaaaataaagatatgtacaaagattgacaagggatttgctcccaagtgagcttattttaactctctaagcttgacttctcatacttattaagcttagggtgggttgtgagaggaaatgaggtctcctctccttctttagtagagtgattatcatactcattagggtttcttgacaggtctgcaattgggtactcagtgatcatgtcctcacagtaagcttctttttttatcaagatagtcttctcctctagaccattccgacgtgaattcacagccttctttgctgaccagaatagtggctccatcctcaggggcgttcttgatgttgagtggtatttggttggcttttccactgagaaccttgatttgatccttcagctcttttacaatatgttttagctcatgtatggctttgtcctgccatttagatctctccttgagttctaaccaatcaattgacgtgtaagtgcttcccttaagttgtttggtcgagcatgagctttcaggacaagttggaggcttcttcgagttgttggtggaatcagttggtcgagcatgtgttgaacttacttcattagctttcataacctttgtgtcagaccccatcaagcctttgtaaacctctgagctaactgctgccttgtgtgagtctaatgacttctcagaactcaaagtttcactagggagatacccaactttaccactcttggtcgaaacagtttttgaattatttgcttcttcaagttccactagtagttcaccagctagcccattcacttccttaactaagaaggtatattcttctattgtcag

SEQ ID NO: 35298 - DNA, 2692 bp, Arabidopsis thaliana landsberg
  unsure (1)..(2692): unsure at all n locations
tataactctaactattttgactgaggtaaaaggaagagtagtgagattagctccagcctctgtgtattatgttgggaatggatgtccttaagtttagtggttggccttctggattttccattagtcggattgatttgaaactgcagtacttaagcaattcaagcaataaactcgaaagagagatcataattcctaacaaaatcattgataggaatgtcatcttcaaccttgatccttgataaatgatcagcaactccattctcaatccctttcctatcccgtacttcgatgnnnnnnnnnnnnnnnnnnnnnnnnnnnnnnnnnnnnnttggcttagcatactttttctgcataaggtacttgagtgctgaatgatctgtatgcacaattacctttgaaccaaccagataagagcgaaacttgtcaaaagcaaacaccactgctaacaattctttctctgctgtcgcattattcctctgtgcatcatcaagtgttctacttgcatagtggatagcatgtagtttattgcctttcctttgtcccaaaacagctccaaccgcataatcacctgcatcacacatgatctcaaaaggtaaattccagtccggaggttgaactattggagcactcactaaggcatttttaatctgattgaaatccttgacgaacctcctgtaaaatccaacatgtccaagaaaactcctcacagattcacgctatctggtgcctgtaaacttgtcataacctctatcttggctttatcaacctcaataccagcagctgaaactttgtgaccaagaactatacctaccatgaaatgacacttctcccaattaagaaccaaattcttctcttcacatctagccagaaccttgcaaaggttctccaagcatgcttcaaatgaagacaggttgcctgaattttcagctctatactagttgaaatctcaacatttcaccctaaacttttagccacttgaaaaaccaccataaacaattttaatctcgataaaactatatgtactttcggatttgttcttaaaactacgcctccaattgaaccgaccagttaaccgataattatacatccggtttgacttacccataatttaaccaaaactaatccgattttgactctattttaacccaatttatacccaaaaaatatattctctagaagataaatactttttatttattttcatttatttttgataaaaaattaaaaataaattaattaagtttaccaaaataataaataacaaaatataccgcaaaataatataacaaaatagacaacaaattctttttataaatacaatggtgttatatatatatatataaatgtatttggtatatactctaaatttaataattcaaaagccattttctttttaaaaacaccataatcatatataaatatatatatatatatatatatacatatataactcatcttgaaatatataaaaagaaaactgaatctataaagaaaaatgaatttataaataccataatatatactttgattatggtgtttacggatatataaatacatatatatatatatatatatatatatatatatatatatatatatattatggtgtatatatattcggtatatgtttttattacggatatataaatacatatatatatatatatatattgtggtgccacaagggagatctctgtgttgggatatgtgcaaaaatttataacaaaatatagctcaaaatagaattagggctataatttgtcatattaagttgtgctgaaaattagttataatttaatatttttaaatgtttatcacaaattcttattaatccccagacaaaaacctcttaataagataatttatttactgtgtgggtcaaaattaggctaaaatagagtcaaaatcggattagtttcggttaaattatgggtaagtcaaaccggatgtataattatcggttaactggtctgttcaattggagacgtagttttaagaacaaatccgaaagtacatgtagttttatcgagattaaaattgtttatgctggtttttcaagtggttaaaagtttatggtggaaagttgagactccaactagtatagggttaaaaattcaggcaacccaattattattaatcttgtacttgctcacccagacctcaatcttctttgttgcatggcattgatttaacaatgaaaattgatccccctcataaaccctgagtacaagagcatccttacgatagtctatcgttccacatggtagatgacaaaatctgaaaaagaattccctggaggaattgaatttatatagggcaggtgtacatgggatcagtcttgtcatcaaaaataatacacaacttgtggtgagtacttcaattcagccgtttttccttcctgactattacactaccagatactgacttgaggtatttccaagcattggaggcaaagtcatgcattgtccacaaggtctttgtgggatgttccttcagacgacaaccagcaatgatcttgtaactccccttattgttgtatcctatgccataggattccattgagtttggtgtaaatcttgctcgatctatccactctgtctcaagcatgggttccaaaccacagctcctttcaccatgcaacgtagcaatcaatctaccacgtgttcaggtatctgggatcccaaaccaggaa

SEQ ID NO: 35299 - DNA, 2138 bp, Arabidopsis thaliana landsberg
tgccaacatgctctcattcgacccctgtgaacgggcgcgacggtccgaccagtaccatctacaggtgctggtttgttgtctgcaacatggatcctacaaacatcgctgtctatactattacatgatctgaaggctaatatcgacactatagcttagactgtcagccttacttgcgatgtatgaagcctctatagatggcgctgctgaatacacgaggaagaccattctaaaaaacctcgatctccaactcctgaaccgtaattctgatgcaaatatcctaagaattgcggattttggttgttctattggacccaacacgttcgaagtagtccaaaatattatcgatacggtgaaacagaaaaccctaaaagaaaacaatgcctatattggtgctcctctcgagttccaagtttgcttcaatgatcaaccaaacaatgattttaacacactttttagaacccaacctctctcttccaaacaagcatatttatcggttggagttccaggatccttccatggtagagtattaccgaaaaatagcctccatataggtcacattacctatgcgctccactggctttctactgttccccaacatgtttgcgacaagaaatctccggcattgaataaaagctacattcaatgtaataatttagtagacgaagtgactgaagcttaccaagtccagtttaaaaaggacatgggagattttcttggggcaagagctgaagagcttgtttcgggcggattgatgatcctatcaggacaatgcttgcccgatggtgtccctaaggctttgacatggcaaggggttgtgatcgatatgattggagattgtcttatggatatggctaaactggtaaggaatttaattccatgactttttatatatattctaagttttccaaacatgcatcatattttgtgcttcaatgctttatcttccatttgcttgctttattctttgtagggaataacgagcaaggaaaagatcgaattattcagtttgcccatatatattccgcatattagtgaattcaaggcagaaatagagcgaaatgaaaattttagtatcgagacaatggagaagataagtcatcctatggattataagccactaaccaacgacttcatcacttccatgtttcgagccattctcaatacgattattgaagaacactttggagatggtgtggtcaatgagctatttgatcgatttgctaagaagctcaacaagtacccaattgatttcaaaaggtgtaaaaagtatgtgaattattttatcgtgcttaaaagaaaataaaaatggagataatgacaaaactagttatgtcatcctcaatgttgttttatcataaaaataaatcatgtcaattattgtgtgtgtgtatgtttaaattcaataaaaatggtcaattgtgcgtgtttcataaattcttacctatccttgatgtctaaaaatttggaaacaaagaaaaatcttgaagctttcttttcaaacatttttagatttatagtctatggtttggattacatcactatatttgtacaaggccaaaagagcggttatggtttttggtggagttggagatttggcaaaagttttggtgattaacattactattcttgtatacatgttagcaataaatttaaagtataaagatatgaaaattcgtttttttaatgtagagaatacaaatatgaaatatgtgtcttgacgaaaaaagagaatataaatatgtgaacaaatcacttatctaacaagtaacttctctatctatctctcaaatatttttatattctataccattaatttacctgcagtaatattaatcgaaaactggcttgataatcttgtaaacccggaagaatcgggttgatccctgagtccatgacccagaaaagttgttaagttatcatcaagtagtccgatttttaaaattgttgtttcagtttccattattagagagctagttttttgttctttgcataacatacaaaaactagctgatgtcggaaaaaagaaaaaacaaaagaagtatatacatcaggggtgatggaaatttttaaattacacctccatgcatataattccgcgataaaaaaaaaaccagggggtattggatatgtaacaattc

SEQ ID NO: 35300 - DNA, 2544 bp, Arabidopsis thaliana landsberg
acctgtgcctttaatgcttgagagaggtacctaatgtttttcaaaggaaaagtaggaaaaacaaattagagatggagatctaacacgagcttaactaatatttttcgtctggaaactgacattattatcttcagccaactttcttgcaagaggactggcaaaaatacgatcttctgaaggagctgagcttggcttagagatcttggcttcaggagcactggctggcttctctaccttctcttcctttggtagggaaggagctggttttgcttcaggcgcagcgggaccagtatcggatgagggtgtgtaatctttaaacttttgaatatcatcttcatcttcaactgtgatagcaatcacctagttggacaaaaaaaaaagggaccatttatatgtgattctacaaatgaagataaagatctttgtcatttttattgaatattcattgatcttcaactaaagggagcatagggctcacaatcaaatacttcatgagaacccattataattaacaagtctccaaaagtcagaaactctcatacctccccaacttgaatttcttttgccccctcctcctttactatcttggcgagaaaaccctcttccatgcattccatttcgactgttgctttgtcctaaaatattaagattgagataagtgttttattcctggcataagaatcaatacaggaagagattcaatcaggattatcattacagtttcaacttcacaaagcacttcaccaggagcaactttatcaccttctttcttcagccacctggcaatgttaccctgaagtttcaacagatatctttagtagaatgataaaacaataaaccatgttaattttcgtaagaggtattcagaggtacatgcctcagtcattgctggcgaaagagaaggcattccaatctcttgatgaggaggaagatctgaaacatattttaaaaagctatcagtaaaacaaaccatgtatgctgcatatacacagtgacagaaatatgatggccgcttaatgtacaaaaaccaagtcagatgctcacaaaaaaaagtacaattcaagtgaaaatatatgttagaacaagcgggaagttacaataaagaactaaatacctgaactggatgaaaatcctctcactgatcgcatctgggagctaaaagcaagaaaagaagcttacagttaggatagaagtattcatacaggaaggtagcaagttgtattctcatcggtaaatggattacataccttataaattctttaaatagttttggtcctgccattgggctgcttagttttgtgctcgttgttgaaataccactaagcattgttacctatataatgcagctaatgacattacgaccaaaaaaacacagacgattacgtgacaaagcaaagacgagaaaggaaactgaacagcagggacttacattgccagtaccacattttgaaattctctctacagaggaataattcaggcgggccttgaagatatctgaagaccaaataaaaatagaaaaataaatgcttaagcgagaagcataatatatactcaaaacataccaactttcaattaattaaagttggaacgttgttatgttcttcatgttgaaaacgatgtgaaagtcaaacttggactattcatcccagagtactgtgtggtgcttgttaccgtatcaaataaaagaaaccaccacacatttctacataaaatgaacttaaggatagcaatgaagaggacactaagaaagctgactggattaccttctcttccaacgagagaggggtgggtactgttggagaaacagcggactgccacagcatggtcacgccgcagtaaagcggaaacatgtttcaactggtcagataacacaacaatcgtcaaaatagtgtttacaaagagcaacatacaattactctgctgtaaaagtagagtcttcttgtactaataaaatgaatagctaataccacaattgaatcataaagcgcagctactacattaatcacaattcagattacaaggaggttactagagctctcaatagcaaaatgcagaattgcccatgatcaaattaaaaataccaaattcatgattagattaagtcaaacccggaaaacgaacctcagttcagaaaaaaatgattggcagagcaaaacacataagaacgaatgcataaactcagttttacaagatcaaaaatggtagtcaaaccacagaaaaaaatgaaaaatagagaaagagaaacctttttggaatgattgatgatacgagaagccattgttgtgcaatcggagctgcgtcagccgatccgaattcgcaactgcaaataacaaaaaaaatggtgggaatgtttgttagggggtttctcctttttccctcggcaactatatcagagatcgagatcgatgaatttgacttgtactcaatccaattttgaaacagtaaatatgtggatggaagataggattcgatctaaaactcaccaagagtcagaagaacggtaaatcgcagtatagagagtgaaggatcactggaaggaagctg

SEQ ID NO: 35301 - DNA, 1255 bp, Arabidopsis thaliana landsberg
gcgcacaagggctgtggcgagaagcatcactaccgtctgatttacttcaagcgcaacaaggatggcatcacgggggaggtttatcgcgttgaatacggggctaaccgaccggcgcccaggatacggctaccaggccccgaacgtgatcgaccgggcctcaggattccgtgcggagtgtcgggtggtgatcgaccgggtccaagtatttgatttttttttggaaccggtgtctcctcagacatttcaatgtatgttggtgccaagagggaaatagggctataaagctatataggggtgggtgttttcagatgtttaaaatgtctctaaaaatacacaaaactaatattaaagacactctttattttattatcattatttttattagttttatatttaaaatcatccttcaaaaattaaccaatgtgaatgctataacgaattatatattaaactcgattgtgcttgtcccagagaacaacttatttgattatctattcttaaaaagtaatgacgtcagctttcaatatttcacgttttttcaaagagaaaacatattatatttaggtaataaacaaagcctgatcattgatcaatgcatgggatctttttttgtattataaaaggctactctgtgtcatttgcatctctccactttgagcaacaatggcatcaatgatcactgttgactttgaaaactgcttcatcttcctcctcttatgtcttttctcacgcctctcttacgatcttttcttcaggaaaacaaaagactcacgagctggctgtgctcttcctccgagccctccttcattaccaatcattggtcatcttcaccttatactctttgtcccaatccaccagtctttcaagaacatctcatctaaatatggacctctcctccacctccgcttctttaacttccccatagtcctcgtctcctcggcctcaacggcctacgagatcttcaaggcccaagacgtgaatgtctcctctcgccctccccctcctatcgaggagtctctcattttaggatcttccagcttcatcaacactccgtatggagattactcgaagttcatgaagaagttcatggtccaaaagctgcttggaccacaagcactccaacggtcccgaaatatccgtgcagatgagctggaacggttctacaaaaccctgcttgataaggcgatgaagaagcagactgttgagattcgtaatgaagcaatgaagctcactaacaacaccatttgcaagatga

SEQ ID NO: 35302 - DNA, 675 bp, Arabidopsis thaliana landsberg
tttttttggccaaggttttttttattttcctctttccttgggccaaagggtaaacccctcacgggggggcgttggaaaacaaattgaaagggccgtttaaaaaaagggggggggttttcccaaagggaaattccctggggttttttttccttattttttaaaaaaaaagggggggcctccaaaaaattcctctttttaaatttttttggggcctttttttggggacccccccaattaattgggttaggggggggggattcctcggaaaaaagaataatggaaaaagattcttccccttcccaaaacccggtaacataagaaacttttcaatcggaaatacgggcctttccccacaagaaatttatatatgtatctctgaaatcgagtatggaattctgtttactcacttttaaattgagtatccgcgtccctcctcttcctgctaggattggaaatcctgtattgtacatatacatacaatcgactccttgggtatacaaaacagtgtagcaatagacgctacaaattattgctaccatacccagacctgtcctaatactgtcgaggcatatcctatagtctgcagacaccgacagagtcacataacacctctgcaatggactcgatattgaacctccaacatataatagacgcgaatcaactctcttctgaaag

SEQ ID NO: 35303 - DNA, 3697 bp, Arabidopsis thaliana landsberg
tagagttcgtaaagatgattgtgggattttttggaagagaacgggcttttcgtccttacgcgcgatccatggtaaacatgtttaagatagagtaatttaacaatcaaaatgcctttgcagtttgcacattcttattaccagatatatacatcagtgctatcaatacaagtaaaagtcacattattattggttacttctatgtacatacaagtcctcaaagcacaattaagtgccaaaataacttctgttgtttcagaagaaaaaagattcaccgaaatttgtaaagtgagatataacatgaatagatattaactattcagtaattaacacctaatggtgaagcagcagcagcgagcgaggctctcttcacgaatcttcctttcattcgtggtcttttctctgcattcaatttacgtacctcgtaccttatctccatggggaacaaccttgtcctccttttctctcggtatcttgaaaccctaccctctcttcctccatccccagcatctcctagggtaaccctaggccgcggaagtggttgtgatgatgagcctctgctccactttcacccttaatattcacaacacaaataaattttgttaattagagacaatgctttctttatatcaaaactaaatagtaataacaaaggttgcggtccattgataaaaacttgttgctagtatgatatttgtttgagtttagtcataaactatccggtcgtataaaatatagtagatagaacaaggcaatgcgtgatagacgtaccatggtatgggttgggaaacaaaccatgtcgaggtctatttcagatggcacccgggcggtccatgggatcccttggcctccccaagtggaaatgactgattcatagtccaatctaagcataagagccttctccttcttctcttctttaatcccaccactcatctcattcactcccatctccatcacattcttcatcacgtcttctttctcatcttcttctccttcatcgaatgtggtcttgtgtgtgtactcgtagtcaaagcttatttcaaatggggatgtctcatcaccttcatcttgatcatgcacttctcttgtcacaactccctcttcctccacctcctctttttcgatctttaacatctcacctaaccctagttcttctatggaatgaaactctcgatcccctccaccgagtagagtctccacgtcagctgtgaactgagctagttccatgtcggttgggaacaaaccattcagacaactctcagcgttgtcgtcatcttcttcgtcactactcttgaaacttaagggcatcattggaaactcattctgtttctccagggattggttaaagcattgctcctcaaccatcgagttcatcaccggcacctcaaatatgagctgctcttccacctcgtaactctccgcttgatcctccgtgctcatctccggcacaagatcatgaaaaaccatcgtgtggctcttcttgcctccacgtggggtccgagctttacgtgtaaatccctgatgccacgtggcttggtgaggcggcgaggcatggcgatactttccggcgctagccgatttcaagcgaactctctcgtgcctacgagcaagagggtttgccgagtggaccgaaccgtcacaagcatggcaaagaaaggcatcatcagctgcgcaataccaacgtgcccgcctcttcacgcagctatcacatgccctcgccgtcttccctccaaccgcactagccaaacttttcatcatattgaacttatcaccatcaacaagaagaaatcttactttgagtaaaaccaagttgccaagtctcagttgcaaaaagaatgttttatcgaactatgggttctctctacaaaggtttcagttttcgagaagtggttataaaaagagagactacattttcattttatgaggcattgaagggttaagtttagaggcgttgttggctagtacatgtcccacacgatgtgagcttttttcttcttgtataatttaaagtgaaaatttgatgcacctttttggttgcttataccccatgagggccatgaagagatcttatctcgattctgattggtcgagttcttcaagttgatcctattcttaatgttgtgattggtcagcttcttaatcagatggatatctttatggtccacttgtcgttttcactgacccaatcactctcaaggcgctgaacaaagtccctatattgagagcaaaaccaccacaccaattcccattctcaaggctcttgtcgtcgctatctgtgactcatttctcagaaattgccatttgtttttggtatttgaaatcttattaaacttctccatatatagttttaattactatagactgtattaaatttgattttatgcataccactaagtctaagtgaaaaataatattattcaataaagatgaaatgacttcataatattaaaattaagaaaatcctatcatgcatacacaattgaattgttatattaataaaaattcatttttttggataaattttaaattaaaaagggatacttttatatttctattgggttgtaacacttctttataaaatggtaacacttatgggaaagaaagaaaaaaattatgttgaaaaagttacattgcaaattttcttttctggtatcattacattgcaatttttattaggatgtatctactatatataatagtatacataaattcagtataaataattacatgtcaaatcatattacataatctataataactagaatgtcatctagtattaattattaaaaattcaaattgattctggatcccatccccaaatggcatattcctctagagaaaatgaagctaaaaagtctcacaaaaataaaagcaaactaaagcataacataagaatctactaacatgtgaggaccaccacccacacacattgtccaaatttacaaatctctttgaaaagtttatggaagaacaaaatttagtcgtctttttatggtacaacaaacaagccacaacgtctacttcatcaaaacctaacatcatcaactattctcattctcagatatctatctacacgtgttactttctactcgagaataatcaacaacaaataaaaaacaaatcacttttgcataaagaaaaaaagaaaaaaagtaactatccgacaaatcgtgtgttctccttttaatttggataattaagttttaattaaagaagcaggtcttactttgcaaatctcaacattaaagcctgaatccattagaagtagaagccaagctctttgctgttctgataacctatctttctctgatttcacttccacaagcttagcttcaccttcataaccattctccttgaaccgccataccagtagatcaggcattccactgcaccagctcctatagtcttgagctaaatgccggcacagcgatgctatacacatacctccaacacaagccactgctgctctcagttcctctaacgaaaaccgctcccaagccactcctctgcacgctgttccacgttgtgtttcatatgatatgattagtatttcttcagccattccatttgcgactttttcgagctgagattctattgtttccttcctggttagatagaaggattcagtctctaagtccagtggagcagtctgcataaggggaacagaaaacagaatgagagttttcatttgcgtcatatg

SEQ ID NO: 35304 - DNA, 4353 bp, Arabidopsis thaliana landsberg
acctgggccggaaagccgttttcctcttttccgttggtcttttcgaatttagtgatatggcgaggctaagtggattgttgaaaaccactgtgcgcctccaagttgatccatcaactcatctatccggggtaagggatatttgtttttcactgtaactttattcaatcctcgatagtcgattcatagcctaaagctaccatccttctttttcacaaacaaaaccagtgcaccccatggtgagctacttggcctgatgaatccttgatccaacaactcctctaactgtttctttagctccgccatttccgccggtgccatccggtacggagctttagatatgggggttgtcccgggctcgagttctatcgtgaacgggtctgaccggtccggtggtacaccactaacggccgcaaacacgtcagagaattcgttgacgatcggaatgtctttcaactccgcactcgcccccacttccttggttgtgatcgtggctaaatatgcctcacaacctttcccgagcatcctttcagcctggattgccgagattaccaagcttcccgaggttgttcttattccttggaattttaacataccctcgtccctctcgaattgtacccgtcctcggtgacaatctatgtgagccttgtacttccccaaccagtccatccctaagataacatcatgtttctttagtggaacaatgattaggtccgcgggcatattgacaccgttcactacaaccgagatgccccgaacaagtccggtcggatacattgcctgtccgccggccgctcgtaccattccataatcggtgtttggttctttcctgaacccacctgtttcaaccaattccggactaacaaaacaatgtgtagccccagaatcaaatagagtgtgcgttactacgtcacctactctcaaggtccctacacattcccttagaatgctgagtacctcccctttcccgtatgcatgatgcaatgcaaatgcagttattgaaataatgaatagggagttgtaagaacgtaccagtgatcgccctgaagtttccggcatcgttagcttcctccgacaactcataaactcgcggtgccacggcttgccgctttgggggaggcggcagtccatttcccccgcgattgtccctttgtccggcctgcttctccgcagtcaacttagggcactctcgctttagatgtccagtctttccgcaatagaaacaagtccttgtctcttcaccgagaaccttggactgccctggttccattctcgggcaactttggatcgcatggtccttgcttccacaccggccacatgcacctatggccttccagcaagttccgctgtggctcttaccacaggtcacgcattccccggtcttagcatcggacttagtgttatccaccttgtcaaatttccttttcttatccgcgggtttggtggattgattgttccggatcggtgctttctcccggttcaagtacctctcctcctcgatcccttcctcaatcattgctgccctttcaaccaattcggaaaccgagttgaatgtccggaccaaacaatggttgcggatctctatccttagtccacggataaatcggcgcacttgagcttgttcctcctcaagttcacgtcccacataacgccttaggcggttaaattcctcatcatattcacgcaccgtgcggttcccttgaactaggtcgaggtacgcacattcaagcctatcccaagcctctggtggaaagtacttcttgttaaactcgtcttcgaaatccgcaaaggaccggacctcgtcccctctgcgtttctcgacggttaaccaccaattatgggcgtctccttcaaggaaatggaccgcaatgtccctttggtaatcctcagggcagcgggtagacttgaagttcctcttgagtctactcctccactcatcggccacaatcgggtccgtactgcccatgaagtgtctcgtgcccagccttgagacatgttcgagaagactcagatagtctccccttttccgcccataattcggttgtggattcacttccacaacttccgagtcatcgtccttttggttatccccttttaggaccaccggatcagctacaacggccttggtcaatgtggctagttgcgccatcattcccttcatcaaatcccactgttcttgggccgttggagtattgttccggttatccgtgatgtcccttgcaccactactctccggtgcttcctcattcatggacttcttcccggcctcaggtccggccgagtctgtcccatcgaacactgtcccgactctggttttctcgttgatcatcgtttcctcctcaaccaaagtctcctcgacaatgcccttgtccttcttactctttcccgttttgctgctcttacccatctgcgaaacctctaaagttaatccacataactcctagtaaaatcgcaaaagagtaaagaacaactaccgcgagattctcaagccgacgagtggtgataccccttaacccaaacacctagtcctagaaccaagcatgctctgataccaacttgaaaggccccgatccggactgcctaaagtccgggcgagttctctcgacccaagccactaagtgactcggccctaaccgtttatgaggttctttcctagtctaatccgtttcatatgattccgagattcaatatatgagacgaatagagtaaacaaacaatcggatactttattaattaagcaaaggattcgatacaacctatgagtttgcatataagctattacaagtcatataatcgatccctagactatccgaactatcaccacccatcatcccggccttgagtctctcgcgcctaagccaagtccttcccacgatcaccattcgttcctgaaagtcatagagccataagtaatctcatttacttagtcatatgcaagtccatgcaatgctctatatgccatacactactcggatccgtggagagaattcagagaggggaagatcgcgcatcagtccgtccaattctcggcaggtcagttaagacccgccggtcctccgccgagccgcgtccccgcctcagccgatccctacccggaccgagtcttgtgtaggatgcacatgacccggatactacccagccctctagtcgatcctttcaaggatccgactactaactcacatcctagaacccttagactcaaagtctaggatcccttaccttccttctcgaggttaggtcgatccgaccctccttctttattgccggccacagcccggctaccgaatcctaagactatttattctcccaagagggagagagttttaatggtgagtttcttgtgttttcggtgtgttgtggtgagtggatgcttcccgaatcaacacatccgttccttgcacctttccaaagagttgcacctttccgaagagttgcgcctttctgaagagttgtatctcttcgcccataaccacccagctagtccgtcactcgtccagttacctcgagctcgtccgtcactcgtccagctacctcgagctcgtccgtcactcgtccagctacctcgagctcaaccgtcactcgtccagctgcccgagctggactgtcactcgacctgagtaaccgtcactccttccagctgagcttgagctttgggcgagctgacccaactgatttctttacaatcctagcttagcctgcatgatttctcctttgtccgagcttatggccagctccttctcacttgtctgagactacaccttcttctctcggaccaagtcctagccaacgatcctattgaggatcgcgggcgttacaagtctcccccccttgaattggattcgtcctcgaatccgcaacaagttgatctttacccatctccttgaaccactccggaaaattggccttcatcttattctcggtttcccaagtgtattcttcacgacctccacaattccacaagacttttaacaaatcccttgattttccccgagtccctttcatcattcggtccatgatccgtaccggccatgcttccaccgtcatgttctcctttaacccgggaggtatatcttccacgctttcttcttgatcacttaaacacttccgtaattgtgacacatggaagacgttgtgaaacgcatttagttttggaggaaggtcaagtttgtatgccaccgcccctactcgttcgatcaccttgtacgggccaacataccttgggcttaactatttccttgaggtgaatcgccctgcccctttgtaggtcatcgcctttaagtacaccaaatctcctactttgaattgtaattcttttctacgtttgttggcgtagcttttctgacgatcttgggcttg

SEQ ID NO: 35305 - DNA, 463 bp, Arabidopsis thaliana landsberg
  unsure (1)..(463): unsure at all n locations
cgccgcaccaacggggcggagacgaaggggccggcccacggaaacaccaaccacacgccgcagaacgcacaaagggacgaagggagacagagcacaaagcagcgcgcaagggccaacaggaaccacccccccagggaacaaacccagacgagggaaccccaggagagccgccgacaccaacaaccggccaaggacgaaccacaccagaaccgaccaaccgaccaaccgaccnccncaaacgacaggacagcccaaccnagacacagcagagccncacagcggcaaggagcgggccccccccccaaaaccaagaaaaagagagccaccggagcagggacaagaaaccagcagaaccgcccggacaaggagacacccaacccggaaacgcaacgacccaaaagcaagagcggagcaccaccaaccgagccacaccccccgagccaagaggaagcaagcaagaagg

SEQ ID NO: 35306 - DNA, 1686 bp, Arabidopsis thaliana landsberg
  unsure (1)..(1686): unsure at all n locations
ctaccattgggttgtgatgagaaagatgtggccagatgggtttccaagtgcccgacttgtcaactggtcaaggcagagtataaagtaccaagtgggttgttacaaaacctacctataccggaatggaagtgggaccacataacgatgaacttcgtcactggactgccaacggggatcaagtccaaacacaatgcggtatgggttgtggtagacctattgactaagtctgcgtacttcatggcgatctcggataaggatggagcagaaatcattgccgagaagtatatagacgagatcgtgcggttacatgggattccggttagtatagtgtcagaccgagacacaaggttcacatcaaagttttggaaggctttcaaaaggccttaggaactcgagtgaacctaagtactgcctaccacccacagacggacggacagtccgaacgaacgattcaaaccctcgaggacatgttgagggcatgcgtcttggattggggaggaaactgggaaaaatatctaaggttagtagagtttgcatacaataatagttttcaagctagtattggtatgtctccctatgaggcgttgtatggccgagcttgtagaacaccgttgtgttggacgcccgtggcgaacgtcggttgtttgnnnnnnnnnnnnnnnnnnnnnnnnnnnagagaatgaagttcttaaaaatcaagttaaaggaagcccaagatcgacagaaaagctacgccaacaaacgtcgaaaagaattagaattccaagtaggagatttggtgtacttaaaggcgatgacctacaaagggacagggcgattcacctcaaggaaaaagttaagcccaaggtatgttggcccgtacaaggtgatcgaacgagtaggggcggtggcatacaaacttgaccttcctccaaaactaaacgcatttcacaacgtcttccatgtaccacaactacggaagtgtttaagtgatcaagaagaaagcgtggaagatgtacctcccgggttaaaggagaacatgacggtggaagcatggccggtacggatcatggatcgaatgaagaaagggactcggggaaaatcaatggatttgttaaaagtcttgtggaattgtggaggccgtgaaaaatacacttgggaaaccgagaagaagatgaaggccaatttttcggagtggttcaaggagatgggtaaagatcaacttgatgcggattcgggaacgaatccaattcaaggggggagacttgtaacgcccgcgatcctcaataggatcgttggctaggacttggtccgagaaaagaaggtggagtctcggacaagtgggaaggagctggccataagctcggacaaagggtaaatcatgcgagctaagctaggatcgtaaggaaatcagctgggttagctcgcccaaagctcaagctcagctggaaggagtgacggttactcaggtcgagtgacagtccagctcgggcaactggacgagtgacagttgagctcgaggcagctggacgagtgacggttgagctcgaggtagctggtcgactttccgactagttgggcggttatggtcgaacggttgcttgcccaaagggtggataagggcgaacagttacgggcgaagagatgcaactcttaggaaaggtgcaactcttcggaaaggtgcaactcttcggtaaggtgcaaggg

SEQ ID NO: 35307 - DNA, 1713 bp, Arabidopsis thaliana landsberg
ttttaaagaggcaactcttaaatgattcggtgtgtagtgaggattctttccatattttatgtgcaacgcacattctcaatatgattggacatgatggattagatgcgatcactgcagccttagaaaaaattagagataatgtgaagtttgtgaagggctcggaacctagaatacaattgtttcatggctgtgtggaaacagttgggatttagtaaggctagtcttgctttagatgtgactactagatgaaactccacatacttgatgttgtctagagcaatccaatttaatgaagtgatgggtaatctttcaaaagtggaaccgagttataagagctttcgtttagagctggggtggactagaggagagcttatatgcaagttcttgagaccattagaggaagtgagtcaactgatttgtggatcatcaaatgttactgcaaattaatacttcatgcatgtttggaacattgaaagcctggctaagagctcatgagacatctgatgatgaggttgcctttgactttttggaaaccatgaaactaaaattcaaaaagtattgggaagactaagactattctaatatttttgcaatagctgcaatcttggatccgagattaaagttttcattcttaaggtattgctataaaaatttagagccgacaacttgcgagttgaagtttcttctttttcgcccatgagatagtttaagacttccagcgcattggttggttgtttcttctcctccacatgatcgttaaaataccttttgctactagtcactatgttcactcgaaagataaaactatatatataccacatactgagaattgcttcaaccgcaagcaaaaaggtcacatataatatatgcaattgtttacaaaacacaagttttattattaatttttattaaaatataagagcatctccaatgcaaggttctcttgatgatttggagaggttctcttgattttgttgattaaaagaaaatcaaaactgattaaatttgagagagtcgaatctctgaagagagattttggaagctgagagagccggccacgtggtgttacgtgataggttgaatgttttaacccaaaaaaaaattatttgtcttctctcaaactcttttctatctctcccgatttcgaccaaagctctatctctcccaaaattttccgatttcgttcggtatagtgagttaacaatcgtctgaaattgcggtgtatgtgttcatgtcgcctattgatctagtctacgtttgatgaaattgattcggttttagttgattttgaatcttaatctgcgaaatttgggaaaaacgagaactggaagaagacgactaattttggtatggtcgtaaggagaggaagagagttggtatcaaggagtgatgacttttttgtgttcatcctaatcaatggtgtctctgaagtctgaacataaacatgtatgtaatctataatagtaacattttgaagagaaccccacttgagagatactatcattggagcatgatttttttttcttttaaacacaagttctcttcttacaaattctaataattgatattaaacaatggaagagagcccttggagggcctctcaccattggagatggtctaaggatacctgattgaagtacatatcttgtatgcatagcaaaatttaacacaccttaatttatattcatataaaaaagttaatatcttaaacaa

SEQ ID NO: 35308 - DNA, 218 bp, Arabidopsis thaliana landsberg
tctattcatccttttccttcttcttgttgctgaatatatcgttcgtacacatcttctctttgtttcccgagcctatagtcagttacagacacagttcgaaaagatcaaatctttgatgattttatcatacatgattgagttgcgaaaacttttggataggtgttctatatctgaactggatcgtttctggctcacgaatctttttctagttgctctgg

SEQ ID NO: 35309 - DNA, 1858 bp, Arabidopsis thaliana landsberg
  unsure (1)..(1858): unsure at all n locations
aggaattttctatctctcctccagtcaaaaaaacccaagcagcctggaagagagagagttagtaatgtgatactatatgaaaacaaaattcatagtaaggtctcgccatgtcccgatgcataaatgagataacgatccacaaaattttcattttaaaaatttcatctttttttgttttcatcttccgtgaagaagtagtaccacataacccccatcagacatctttaaagctttcttcttttccttgtttcttttggttttgagatttgggtttcttttcatatctgttccttctatctcagacaacaaattgcaacagaggaaatttaaaaacccacttgaggaaggaatctttgagaatctctctctgacttgtgagtttttccatctagtttctcttttaagggtttgatttttcattgtaaacgaagctgattagttcaaagttcgtttttttttgtgtttcattgagccatattgtttgaccagcttgaaggattcaaacaaaaagtttttgtttttgtgtgtctactttggattgtttcattttgtcttcatgaattagatttagacaagatttgtgcttgattcgtgttaagttttgatttgggcccttcaatttcctactttatcggttggtgaattctatacacattagtcctatcacgaccttctgtttgtttgtttttgaaaatgggtgcttcgcatttgcagatgttgcttcattgattttnnnnnnnnnnnnnnnnnngatagtttccttcaatctgagaacgtggttatggacgctgacttcatggatggattgttactagatggttgttggttagagactacagatggatctgagtttcttaacatagctccttcaacttcttctgttagcccttttgatccaacttccttcatgtggtctccaactcaagatacatcagctctttgcacatcaggagttgtatctcagatgtatggtcaggattgtgtagaaagatctagtcttgatgagttcaatggaacaaacgatggtggattggaccaggaggtggtggttcttcggttactgacaggttggttcaagcagttgaccacattaaagatttcccagcagcgagaggctcacttattcagttatgggttccggttaatagaggcggtaagcgagttttgaccacaaaggaacacccttttagccatgatccgttgtgtcaaagacttgcaacactatagagagatctctgtgaattatcacttctctgctgagcaagatgattccaaggctttagctggtttgcctgggagggttttcttggggaagcttcctgaatggactcctgatgttaggtttttcaagagcgaggagtatccgagagtacaccatgctcaggactgcgatgtccgtggaacgctggcgattccggtgtttgaacaaggtagtaagatttgcttgggtgttattgatgttgtaatgaccactgagatggttaaactaagacctgagcttgaaagcatttgcagagcacttcaggtttgtgttcttctctaaagctctcagcttttgctatagaaatggttttctgagagtgatgaatgtgtttcctttttgcaggcagttgatcttaggagcaccgagcttccgattccaccttctctaaaggtaatcaaagaaactacatgagttccttatgttcagcttttgggtataaacaagatcgtttcttctttattcagggatgtgacttatcctacaaagctgccttacctgaaatccgaaacctcttgagatgtgcttgtgagactcataaactacctttagctcagacatgggttttcttgtcaacagcaaaacaaaagcgggtgc

SEQ ID NO: 35310 - DNA, 2325 bp, Arabidopsis thaliana landsberg
ttttattgttggttccaaaggccgtcccgtttgtatccacgtgtgttgttgctccctcccaaaaatttcttatattttttcctagctgtttattataaaaccaaatatttcatgcaatcaaagcactactgttacgtttgcaattatctttggcggtttgcggcgattcagacccaaaaaaacacacaggaaaactagttttcttagtgaagctctcatgaaagatacggtgttataaagagtgttcacaagttcacttgtatggatgacaagttactatcacttttggaacaagtacatgaacaaaggctttttttacactttaaaacataaccaaaaaaaaaaaaactatttatgttgcaaaattatccattcaaatcaattactctccaaagtgtttttttgttttgtttacacatatgtaaagagacgaccgtagttatcaaaagcattttggtcacaacaaagtaagcttaacaatcaataagaaattgaattaaattgattaaaattgaataaagagacaaagagacctcgtttaaagacttgtgacgcaattattaaacagtagcagaaggaactttaacaaattcaaattctttaggaactgtaagcacatgaccaaaccattcaacttctccccaaatttcacaactttcttgtttttcaagagcaatctccgcgcaccaaatcttattcttatagccgttgttactacaaggcgattgttcgacccacaaagccgccatctttccaccataatcagccaattgaatacaaacattaggtgagaacttaggtagccttaccaattaacccttcaaacgtctccacaatcttacctttttgtcataccatcttatcgctccgtcaaaaacacagtacaaaacgttgtctatctctcaatgagaactcgaaaacttgaaaaattccatattttgttcaaccatgtcccatgagtccatgacaaaatggggtgaaaaaataagttcttgtaaaagcaataaaacaaaattctcaaacttccatggcctcgtgttctgtttcttctcctgcagtagcctcctgtgtgttttttataggcacgctaaacaagtactcgctctcatgctcaaccaagtactgcatcgatctcttggtgtctaaaaacaatctataaactctctcaatgtcctgaatctctacgactttccctttacgtttcaggcaagctagggcagctgcattgattagatgaatcgcgtacctaagcgaggtattacatccgatcaaagtcagaagctgtttcgcttcctcgttcatctccacatcctcttcttggcaacggatctctaaaatctttctgatctcgtcttgtgtgtaaggctgtgttgtgataataagaagacggtcaagaaaatcgattgggatcccatgtgctgatatctggtttgttcctcggattgttgtcattcctctgtttgtagccacgaccaggattggtgacatatcgttttcgagagctctattcaggaaagagaagcattcgatatcaagcatatggacttcatcaatgaagagaacaccaggtactatttcagctttcccttcttctctccactctgccactttagtatcgatttgctctcgggtttctgaacgaatctcgcctgtatcacctgtgaagagggctagatacccttgagtcctgcaaacaacagaaagaaaacaagaatccaaataagaacttgaaaaagcatcaatacgtgaaaaagaagcaatctttttaacctaaacctaaaactaagcaattgacaaatacagaacaagatcaagaaacaaacctgcttttaataacatcaatctcatgaagtgtgacagaatgcaaaacctccttcctcttctcaagctcaccttcagggcactgcacaaacttagtctttgaacccataacatcaaaatctctagacctcgtaaaagatcttccaagcttagtaatcttcccacaaaacctatccaaaacaataacatcaccactctgtactttctccttatccaatgcctcaatcaatttccatcccaaatcaaaattagattccatatcagtcggcttcattgttatcttcccagtcttcttcacagaaccaccagaagaagcaggtctatcaatcgaaatcgtcacaacttctccttctatcacgtcagtctcttctttgatcctaacaccaatagctttacgaaaagcttgagttaaagcttcagtctttgacatctctaaagaaaagatctcacttcctggcatcatagtgaatggtgcttcttgtccaagtgattatgctataccca

SEQ ID NO: 35311 - DNA, 4025 bp, Arabidopsis thaliana landsberg
  unsure (1)..(4025): unsure at all n locations
tggattaaacgcggtattaagcaattggtaagaaccttatccattttctcccactcgaaagtcgaaacagaacatagaacgaaagaaagaatgggttctgtaccatgttccttcaagctctctgctcatcgtagatcttcttccaaggtaatcatcttctctctatctccttcaatctgagtctctgtataggtcacttatgctgagtcaactcggtctctctttgtatcgatcaaaacttagtcaaatcgttccttccattttctttcagttgattccactttaatggcgtcataatcatctcttaaatcaaacaatgactccactatctcgtttccgatctcttgttacataaagttttctgtagcattgagattgtccttttcggaattgcttttatttgcgcagcttgatggtaacaacaaacagtgtagtagtttagtagaaagactgagagataaaacgaagagtcaagttcctaagtccattacttgcattaaccgcttagagatatcgcgtatagcaccattacacgcaacgatgaatagcccgaaaggatttggacctcctcctaagaaaaccaagaagtcgaaaaagccaaaacccggaaaccaaagtgatgaagacgacgacgatgaagacgaagatgatgatgatgaagaagatgaacgtgagagaggtgtaattccagagatagtgaccaacagaatgataagcagaatgggatttacagtggggttaccactcttcattggtcttttgttcttcccattcttttactatctcaaagtgggattgaaagttgatgtgcctacatgggttccgtttattgtttcgttcgtcttctttggtacggctttagctggtgtgagctatgggatcgtgtcttcgagctgggatccgttgagagaaggttccttgttaggctggaacgaagctaagaagaactggcctgtcttttggcagtccttttggaattcctcagacaagagatagactatgcaataanagctctttggttttataaacagatgtaaattttgctgaggatttactttggagattttctatcgacgggcttcttctgcatatctcttcgaaaatttctttaccgatcctaaagggtctgaattagtgaatagtatcaaatttattgcaaacaaatagacccaagtcgatctttattgcaaaccaaattgtcacacacgcaaaaaacaaaccttaacaatacagaaattaagaaaagaaaacaaaagcagaaccattgacgaggcaaagacgcgccgtcgaaaaaaaaagaaaaaaggagacttgttttttctgatgatgtataagattattagagagtttataaagtaaaatatttgctcagaagaggcatgcttgagttactattggtttaggggtcatccggcgactttcctagagtaggcattggtggtgggttgtgttggtctaaggaacatgtcacgtgtttctcctacccaacctgccttcatcggaggtggtttcagctgttgatgctgtccaaccacagacacagagtgtcttcgagatccagttgctccaatggtcatgtttgcgagtttatcagcagtctcggatacactactacgagtgacccggttcttgttcaatgatgctgctgctgcattatctccaattgaatggatttgttttgttagatgaagtaaaacaacgattgtacatgttaaagaaaaaaaggtgggtttatagctttttttacttacgaggactcttttttccgggtggtctgtatttggagtctctgacagaacttctcacgggtttagtgtttctcgtcccatcttgattaaccatatcaagtttccgctggacaccactgccaaaagcggcatttgactttggggaaacatagctattgaatggcttagcattggcaagagacactgggtgccgtttaactgattggtgctcgaatgatcccctaggcccgactatatgacataaacaaaaaaaatggattgtaacaatctcaaaacacatataacctgacattggtagtcacaaacaatgaaattaccagccggaggagttcttgcaacagaaggcttggacgcaagagctggtgcgacataaaagcaactctgccatatgagaacgcgcgtagataaggagtatagcctataacagttgtcgcatattgtccaatcaaaaaccttcctaggcttacctgcgaagaacggatgttgcagagcctctgcagtagtcggtctattgcagggatcccacgagcaaaggcgctcaataaggttaaccgcatccgcactagcatatggcatcacacttgatagatgtacaccgggaaactacaagatgagaaacagattgtttatagtaaccttatatataaaatcagtgatgctttctttcctagatatgtaaaagatagagtaaaaaatacctgagggaattggtaattgataacgctggcaaggttcagcccctccaaccaggtctcttcagttgggctgcctataacactgcagattttgtatatctcatctgcttcactgcaaggattatggtttagcatttaaatctgaaacattgtctaattagaacaaattcaatcaaccattgacaaatacctagctccaggaaagagagggcgaagagacaacagctccgccataatagcacccatcgcccacatatatgaaacacaattaaaattaaccattgttaagcaccgcactgcactatcttcaaaagaaacttctgttattggtatattgggaagactaaccaacttttgacgtgtatacatatgattgtagcagtacttcaggtgccctgtacctgtggaacgttcagaacagaattagggtgaataagaaaaagatatggcacaaatcaacacatgcgccaatcaccatcagtatatggatacctgagttaatatatatatatatatatatatatatatatatatatatatatatacttctgtaatttcaacggagtaatcaggagagtaaatcttaccagcgtgtagagacatattctgtataaggtggactcgagtcgatctcccgagccaggccaagatcagcaatcttaatgacatctttcgtgaccaatagattttctacgccagaaaaaaaatatgcacatgtttcattgacaaactaattgaaattgactgtgatgaacaaccctgaaacagagatacaaaacagtccatctcgatcgcacatgtgctgatcttgattggaaactcaaggctattaattacctggcttaagatcacggtggaagtatccacgctgatgcatataagaaaggccttggaagacctggaagcaccaatttcggatatcagattctgcaaaatgcttagggcgatccttcataagctggtaaagattgcactcctgacagagtatgaaagggaagaagatttaaagcaaagaaaaagtgttggcaataagattaagcaaaaagtagaaagaagtataccatgtactcaaacacaaagtataaaatatcattttcccggatgacttccttcaacttcacaatgtttggatgattcattctcctgagcgactaataggagggaaaaggaggaataagtacacatacagtaaacaagaaaaaaaaaagcatttaaacaaaggcagttcaataccttaacttctctcagattaatacattcatcccaagagtagtacttctttttcattttcttaattgcaacctgctcatagaaaatttcacttagttaaaaaccaagtacagaacattctaccagtaatagatagctctccaagaaagtaacttacgacttcacccgtctgcttatttatagctcgccaaacactaccaaaagttccatcaccaacctctttaattaacttgtacctagacattcataaggcattgagaagtaaactcataatccacaaatcgaggggcccgatgaataagaattaaaaaacaacgtgagagaaactaagctacctgtcatcttttttttc

SEQ ID NO: 35312 - DNA, 6282 bp, Arabidopsis thaliana landsberg
accaacaacgctcacaagcccaatatattgtaacgcttttcttcattatgttataatcgaattatattatatatatggttttacatgaatgttctgttcaaatgactatacacaacaatgttgatatagaaacaattttcttaatgtggtttgtggtttttaactaacgaactgtttctggagaagacttccacagaatgccaaatcaaatctctcttctggagggtctccaatgcagtcgaaaaccgcatctgcgttctcgaaatcttcatcagccgtgtatctacaattccaaagatgaaagaacgaatgatcatttcaattctgattgttatggaattatgaataggattctgatttcagactaaaactcacccactctttgtaactatacaagtcattcccgcagcttttgcagctgctagcccgatcgcgctgtcttcaaccactacacatctgcacatacacaaatccatatcttaagagagttttctaaactgactcattctctcctgtaaagaatcttagtaacactttactttgagggatcaactccaagggtttcagctgctaagttgtagatggcctgttaagaaacaaaaagtttgatgactcggtctttaaccaagacgaagcaagcaaaacatatgttgtgatagcatggaaagtgagtaacttactggatcaggtttctttttggggactacgtctcctgcgaatatcttgattttctctgctcgttctggtccaagcaagcatgaaactatagcagaaacctgaaatcaggcaagaaatgagaaaagtatttccgattatacagttcttctaagctaagacgatgctcgcatattcatgttaacgatgcagctgcgcgtagtcttgtttaccgaaactcatcaggatacaacatttgaggatatatggttatggtctcaggaaactgaagtagtagaacctgattgatcataccgccttctcatttgaagtactgcacacagctactttgactccgtttgttaaagcttgatcaaccaacctgcaaagttttagcaagagggctcagaacaaacaagaacatgtatatgattagttgaaataacaagccttacaaacattcatagcatcatgattcaggagtatcaatcattagtaagtttgctaaaccttgttttgggttaaaagttttagactttaaaaaaatcaaactcaaaagggacattcaagtaatagcatcgagaatatagaatagaacattagaagtgacactaactttgcaacaccgggtcgaagcggaagcagctttttctcgataagaaccatgaaaagctcagtcttctgcttgtgaagtccagctatgaactctttcctctctgcttcatctttaggagctttctctggccaaccaaccttgttaaaatacgcagtcatcctaccaaaacaaagccactccaatttcattcaaacgagagactaactcaagatttggtatagtaaatgcaattttgattgtaaacctttcttccccacctccgattttaagtacctcgccgtataaatcaacatcccacgtaacattcaaatctctctgcaaaagattccaattatcatcaccgaagctaagagctaatgaccaaaaaactaaaattgagaaacctctttgaaagtgtcgttgaaggagatcctgtgaccgtccttctcggtatcaacaagaacgccatcgcaatcgaagagaagagcagagggaagagtcgtcagagaagatgaagcagagcaggtgactccaacggagcgagatgatctgtataccattggttttgctctcagggactttccattgaatcgcaacttcaccacctttgcaggtgccgcattgggaatgaaagatggtgataacttagattgaattgaagaagaagaagaagatggtgatagcgaagccaaggaaagagagattttcacagtggccattgttttgattctctctgtctctctctttatctctaatcactctgcgaaataaataacggtcgcgaatgtcttcaacttatccggtctttgtttaacgaccacaaaataagaaagaattgaaagaaagagccacccgagtacgggtcgggttagcaaattcggtatttctctacctattgacacaccttaaaccgagtttaaataaccttttagacacttttgattaaaaaaattctatttatgacagcttaaatacttttttttttgctttaaatcttccttcttctccttttttctagaaagccacaacatttttcaaaatatagtatagatatataatattattatgcgatatttctttaatgaaaaaaatgttgttttatacgccaacttttaaaaagtggtatttaatacgtgaattttggggtcgatcaaataaaacatgataaaaacgttgacccgccatttaatacaaatcaaaatgttgaccatgccacaaacaccacaacgttatctgtcgttaacataatcgataacagacgttagcagacgttattcattccgttattatccaaaacgacgttgttttgtgcttaaacacaaaccgcaaaatcccaattcgattttttaatctctaaatctcagaaacccccaaatcttcaaatccttaaatttccaaatcgatttttcagtttcaagcttttatctttgttttcctctttaagttctgagatctagagtttttctagatttctttgttctcactcttaattctctttgtgtctttctgagattagtcatcggttaagcaatttcaaggtaagggggttctaagtttcttagatttttcttcttctttgggatacaaaatctggggtaatcaagagaagctcaatggatgaatagaagaaaatctctgcttttagtgttaacaatggtggtttctcggaatcgacgtgtgttttagacttttaaaaatcaaattgagatcttgtgatttgtgttaagtacaaaacaacgtcgttttgagtaataacgaaatgattaacgcctgttatcggttctgtaaacgacagaaaacgtcacggtgtttttagcctggttaacgtttttgatatgtataaaatgaccggtcaacgcttttgtcatgttttatttggccatatatgaaatttatgtattaaacggccactttttgaaagttggcgtagtattttccctttttgaaaaagtttaactttgataacatgtagatctagaagaatatagttgatttgtaaagaaaaaaaagttatttagttgaaaaagttgattttttgatagaaaaagttttgtctaaattatttagaaaacgatttctattgatctacttattttagaatttctgttctaatcttttgtatatattctacgatatttagactgtttttcgttctaaaaatcttggaaaataggaattccaatatctaaaatatttagaacatgtattctaagattactgataagtgtgtattttgcatgttttgagcatccatttgtcatcactttagcatcatatcatcactgttttataccatttctcatcatttgtcatcactttgcatgtttaggatagttttgcatgccagttgcatatttgtgttattttcaggtgattcggaactgttgacgagctaattggaagaagcggacctgataatgccaaaccactcgacccccaggtcgagtagacgcttcacgacctcaacacaccactcgaccaccaggtcgagtagaggacttcaccacttcacctcatcactcgaccccctggccgagtacccccacaagagtcactcgatcaattcactcgaccgccaggtcgagtgtgttcacctccaccacctgaccatcactcgatcacaccactctacctggaagtcgagtatcaccatcaccaccactcaactacatactcaatgtcgagctttagagtcttctccattccgctctcaaccagacactcgagcacaaggaagaaaagaagattccagcttatcactcgacctctcactcgaccacctgggtcgagtacagtttttaatccgtcccaatactgcgtcgttttgtgtattagggtttcagaatattttgctataagtagcatgtactttacattttcgagaacaagtttttatctaagttttattccgcagacactgtgttcttgaccttttgtaatccggatttctctttatctattcagtattcagtattcagtatttgttactgaattcgtttactgttgttcatcctgttatcattttgctattactctgttgttatcatgttttcattccattcaacgtttatgttttctacaatgatgtctgagtcgtgaataggtttctgaggatgggttagagtagtttagaattctcagtatgctgggtagttgagtttgattgatagatcccttctggattagttgttcttaatgcctatcgctttctgatcaactggaatttaagcccagacatttccgcgcccaaaaggtgttcgatgaaatgtctgaaccactaattccagagatttgtgggtctaccaaggtattggttacagggagcgttttggctttaacttggttattgttaatgcctgttaagttagctcttgtcaatggtgattgagtctgggactggtgtaacttgagggtctctgttgcggtgacacttagatttggttattaaacttgttgtctagggataatttattgagcatgtcaatcacctgtaaactgaggaaacgaaactactcaattacccatcctcgagaattcctcatctaattgatttatttgtttactatgctattgtctactgcatcttgttacatgttgcttagtttttgcatttctctcctgttatcactctgatactcgaccatacccagttgtggtaacagactgtgcagtcgagtatctttgtcactgtctttgctgtttactcgacctgtcactcgaccacacccagtgcttggtaacaagctgtgttggtcgagtgtttttattattctgcttgaatttttgtttcctgcatgttcacttaggactgctagaaacctcaaaacctgttattgcttggcttgtctttgtgaactctgattgcatcttgattgctagcatcacacctatttggattgactacctaatatactacaatgacatgattggtgttttaagataattgactaaaaaccctattatcacacataaacacacaaatacgattattcatatatttgtaattcgtaagtatattcggcttaagtaatcaagtaaatatatttatatacgaagaaaaacacaaacatgtcctcatcttagcaattcggctgacttttagtttaggctaacaacaacaaaaatcaaaacagtttccacaatttcaacgagtgtataaaagaaagatacaagctaacttaataatctaaaaccattgccgcctcgtgaccttaagcatctccacaatttcaatttaataaacatactttcacgtaagttaccaccaaaccaaaaatcaaccctcgtccttaataactacattcagcgcaaggatttaattacacagttccggtttagattgtttgggtttggttcaataatcaaaacacactttaacaccttagcatggatacgagaataaggtttcgtcgttacctctttctacgaactttctcgtcggcttgacttgacggactgaacagcgaagtggaagctttgataacacagatctgtgatgattccagctctcactagttagattgatttaacaatccataacaaaaacagagatcagaactaagattaagtcatggttttaccgttccggtggcgacatctcacacggcggcacaagctcaacatgacgagagtctcaggtgactcgggtggtgctataaaaggcaacaaacgaggttcgagttaggacgaaatcaaaccgatatggaagtgagacttaaaacaacgatacgaggcttagggtgtaacttgacggccaagggtttctaaggcttgttttgaggtttgtgtctttcttttatacactcgtgggaatagtagggtttggttcgggtttaactccataataggctcggtttgggcctcgcgtttcaatccaaaatttgggtgttacagtttgcttctccaaatcagtaacaatcgatggcaaactcttttgaccttcttcttgagattgtccttcaagaacttgtgaaaaaaaaagtgtagtactcggccgcacccatttggaaagaattagtttgtcacaagaatga

SEQ ID NO: 35313 - DNA, 709 bp, Arabidopsis thaliana landsberg
aaacagggattaagctcgacaattattgacaaaaacaaaaatgtttttacggcaacaaatcaacttaattagaattaagaaaaaaaagttagtttataacattaattcatttttttcttgtcttttatgtgaaatttgattttgaacacgaattaaagttgtaagaaagaataaaactagatttttagtgatatttttttaatcttttcatttatgtaaaatttgttttgaacactaaatggaagttgtaagaagaagaaaaaaagtaatcatagtgaatattattattaatcaaaagaaaataagagtatggaaatgaatttaaccttgatgaaaatggcgtcgcaagccggaatagaatcaaacatatcgccctcaacattctcaacaccgtccaagacttcagcaacttcaataacatgaggaagatcaaagttaaatcctttgatccaaggaaactcctttacaagtattcccatcgtctctccggtacctcctcctacgtcaacaaccgtagccacgccgtcaaacaagccttgacaagctccagctacacgtggcaccacgcgccttgcatcacaagccatggcctcgttgatcagctggctgtggcacagattatcctgtgcgaacgcccacaagtcctttccatgcagtgcatcaagcggcggtgcagatgaatacatgaccgacaaaaaggcggctgagc

SEQ ID NO: 35314 - DNA, 964 bp, Arabidopsis thaliana landsberg
gatctgcttttctttttggcctgaagatgaaatatcttcacgcatagagcctttacctcgcctttaagcataccagcctgtccaaaaactcaatgatgttgcttacgttcagacactaagagcttattcagcaaactcactctttatcgactggagatctatttatgatgccactgtcttattttacctgggtccgaatgttgctagcgtctgcaccataattggccagagactgagcagctaaacatatttcatcgctaagcgtaccaagctgaagatgttcacattctatacaggcatgccctatcaaccgagcaaacgatcattttaagaaagctacatatgaagattttgaatgtgacagatacaaaatttgtcagataactgaccaagtttccgagcttcctgacaactcaagaatgtacttagcacggagtccaaatgggatatttattgccctgatttccatcttttcaacctcaataggctcattaagtcctcgttgcctatctatttttattgcctcctcacgcacatctttggcattgattcctatggattaatcaagatcctttgcagcaatgtttcgggggccaagtagtagacccacaagtatgtgttcagtcgttacatatacgtggccaaacgtgcgggtttcctctttggccagcattatagctttcattgtttcctcggtgaaccgctcaaactacatccttaggaaaagtcttgagggttttcttaataacagcagctctttgccgtgagattaaccgtaaagctgcggccttcctagctgcgattcacttggaaaggttgcagttgataagggtagactatagatcataagaccgccatatctatagctctatatatgcctcgggcttgaaacaaacacatgcaagcacaaccctcttgaagcataagttaatccaaagctaatgttgtttgaaacacaagaata

SEQ ID NO: 35315 - DNA, 2838 bp, Arabidopsis thaliana landsberg
  unsure (1)..(2838): unsure at all n locations
cctttaaaccacctcgagacctaagagagcgtcttctctgctggttactctataaggaaacgaaatttgaaagctttagtgcttaaaagagatagattcatgtgaaacagaaccacagcaatttccatgtcacacaaagaaacgaaccagattgaggagcttgggggatttcaaacgtatactagaatctgaaattgtatagaaacagcttgtcgtcacaacacaagaactcatagttcctcccactgttgtcgtcaaagtctcacttctgcttcgaaagacagagagctacttcgcactcttggtctcgctttttcagagaaagggccttccttatcaatctcttttcaaaccggttaacatataagattttaccccggttaactacattaaaccggtaaatcgaaccggaaagatcaacctgaaggaagcaagggttttagcaaatactctgacgatcctttgtaaccgaacaacaaacaaaaagcgtatatttttctctctatcaagattcaagccgtgagctagaagcttaaaaccctcttcttatagatttcaaagcaaccattttcgaactctgtttgattccactgtcgatttaatcatcttacctaatggccggaagggctgcgacgtcgtcggcgaaatgggcgagagagtttttgttcagaagggtttcgtctaatcctcttggagctacccgtaactgttcttcggttcctggagcttcttctgcaccgaaagtccctcatttttccaagagagtaagtagctttgatgaatttattgataaattaatcttatttttggtttattcgaatcatattggaatcttattccttaagataaggagttgcaactcttgttttgatctgaatatggcacattaattggtgtagtagagttagatcattgatgctatttcattttacaagagcaaagtgtttgactttgaaaatttatagggaaggatattgacaggagctaccattggtctggccatagctggaggagcttatgttagtactgcagatgaagcaaccttctggtactttacttaataagtgccctgaaacttagtctttttgttctctttgttagttgacattgctaaggctaccttgtagttactttgaggaagtcactttgttttttacctcttacctattttgtgtgttggacagtgggtggctattcaacgcaacaaaggttgtgaatcctttctttgctcttctggatgctgagtttgcgcataagctggctgtttcagctgcagctcgcgggtgggtacctagagaaaagaggcctgatccagcaatcttgggacttgaagtttggggaaggaaattctcaaacccaattgggcttgctgctggatttgacaaaaacgctgaggctactgagggactgctagggatgggatttggctttgttgaggtaggctctgtaactcctgttgcacaagaaggcaatcacgaaccacgtatcttgagactaagccaagaagggtgagaatctctaatctataaaagacctttaatgattgaagaagcaagatagtttaaactaaaagacttatattttggtcctcccagagctattatcaataggtgtggatttaatagcgaagggattgttgtcgttgcaaagcggttgggtgctcaacatggtaaaagaatgttggctgaaacatcagctacttcgtcatctccaagtgatgatgtaaaaccagggggaaaatctggacctggtattcttggggtcaaccttggaaagaacaagacgagtgaggatgctgctgctgactatgtccaaggagttcataacttatcccagtatgctgattacttggtacaaacttcttaccatgatatatcgaacatgaatttgatctaatccaccgtagacatctttgtgcctaattttcatttttctcttcaggtgatcaatgtctcatcacccaatactgcaggactgcgcatgcttcaaggaagaaacagttgaaggaccttgtaaataaggttcaagctgctcgggatgagatgcaatggggtgatgaaggtcctcctcctcttcttgtgaagattgctcctgatctgtccagaggagagcttgaagatattgcagcggtacgtagtactaaaaaagctaaaacacattctatagttttcaagtaattggttcttacaacattgtattggtttgtgtaggtggctcttgctctgcacttagatgggctggtaagttatcctcttatgaactaacttatgttacatcagtgtcaatcaatgaagcctccagtctgtttaacgtagtgtagtaaaagcgattaaagtgttagaatagtctcttttttcgattgtacgtatggtatgttgcaaatcataaaagctttcgatgatgatgatgatactgtctttgttggtcctatagatcatatcaaatacaacagtctcaaggcctgatgctgtaagcaacaaccccgtggcaacagaaacaggtggtttgagcgggaaaccgctctttgctctctccaccaacatgttgagagatatgtacactttgacacgagtaagttcttatcctaaaaaaaagatgatccactaatcgaccaatgaactaaaaccttttctgatgggtttttggatattttcatgttctcttccttagggaaagattccattgataggctgtggcggggttagtaggtaaacgtcgaacatacctctgatgctttaggttgtagaacaaaagaaacacangaaaatgacttaaggtgaatcttttgcgtttttagtggtgaggatgcttaccagaaaataagagctggagctactc

SEQ ID NO: 35316 - DNA, 1910 bp, Arabidopsis thaliana landsberg
  unsure (1)..(1910): unsure at all n locations
catcaggagcagttctcatgatctctaccgagccgcaggatttgattcaggatcaaatgtcatactcacttctacggaactctgtgaatgcatctgctgattttgcactcccnnnnnnnnnnnnnnnnnnnnnnnnnngtttagttcaaaaacaacttgagtcattgtcggtctatttgttgaagaaggattcagacacgacattgctaattcgacagctttccaaactgaaacagagtcgtaatctccatggagacttggatccgtaatgcttttgatgtctcctttcgtaagcatttgtcctacccattctgctatgtgtcgcttttcacggttttggtcaatcactggtttgtttgtaattatctccaatattacaatcccaaaactatagacgtcactcttctctgtcaaccgatttgttttgtaatatctgttgaatttaggagcatagaattttatcaatttacctttccaataaaacaaaattcttttaaattatattacttactctcttttaccaaaataatacaatatataataaaaaaataataataataatacttactcaggatcgagatatccaggagttccagcaacaactgttgacacatgagtttcacctccaatcggaaaagaccttgaaagcccaaaatcagcaagtttggcttcaaagtgttcatttaacaatatatttgtagttttgacgtccctgtgtaccatntagtggtttgcatccattatgcaaatactcaagccctatgcaacaaaatccataaaattcaatcaaatgaaaagcaaaaaaacatatataagagaaataatagggatactaggtaaaccaaccttgcgcagagtcaatgactatttttagtctagtttcccaatttaaaataaatcggtttcttgttcctatgttttaaaaggagagaaagatatcaatgtctgatgctatcacgataaatctacagcaatatatggttaggtcatgtttgtttgcttacctgacatatgttcttttaaatctccattggccatgtattcatagataagagccatgttctctccttcgtcgcaatacccaacaagaccaaccaaattcttgtgatgaactctaagaagaagttctacctaaataccatgccaaaatgcatatgtttaagcttttaaagatagttgaatcattgatgttttcattcgagacagtgatgaaagttagaatttacctcagctttgaattgtttatacccttgagatgatgaatgagagagtatcttaacagctacttgccctgtaccgttcacgaaaccatgataaacgattccaaaccctcttttcccaaggattctttggaagttatttgtcattatcacaacttgtgaataagaaaaccttctatttttcgttacgattgccggttcagatgatctaggcaatctaccatctgatgcttgcatataagatggtggtggccctaaggtttcaagcgaaaaatgtagtaagacttagtacttaaatttgatatttatgtatgtgatgttaacaaaggaatgaagtttgagcttattgataatataccttcaacttttggtgactttttctttctaagaataaaaaacagaaccaatgcacctataagaacagctattgaagcaattgatgcaacaactggcactatgacactctttttcttatgtccatcctctcttttgttgacacaataacccgttgtgcaaacaatatgaggatttccttcgagactgcaaaatgtaattattaaagatactcgattgcatcaatcgccataataactttaacttcattcctttattctaaagaagtgagggaggaactgagccactgagattattaccacttaagtttctgttggagtagaaaaagagtcagaa

SEQ ID NO: 35317 - DNA, 1627 bp, Arabidopsis thaliana landsberg
ttgttctcctagttatgtttgtgaaaaaaaagactgttgctctgatgtttcgaagtgaagattggccattacctgtagacagagtgcaagagatgagcaaaactattcttagactattagccgcaagaaatacaaaaaatccggcaaatgtcttatagactattagccgcaaaaaaaataaaaaataaaaaatattggaaatgtcttatagattacacgccgcaaaactattcttagattattagctgccaaaaaaaaacatgaggatctttgtaatgtctggcggattcagacagagtggatcataatcccgaaaaaagctcgtataaaaaactaagccatgattgaaaacattccgataacttttacagaggattgcaagaacgatcaagaagcaagacagacgtttcagaagaacaaacgtcttcttcttattcttcttcttcctcctcatctttcttttgttttcagttcgacgagaaaatttgagttcgtgatcgcttgaacaaccatcatcatcatctagagccccaaaaaagaagaagctgcgggccggttattttggttaattagtctaaatccatggcaagaggggcatttatagacgagagtggccatggaggagactacgaaggtcgtgtaaccgcgtttgtcatgataacctgcattgtagctgcaatgggtggtctcctctttggttacgacattggtatctcaggtttgtttcttgccagtcaagtaaacgagaattcttctctctgcttctttctttgttctcatggcggataaattatatgttttcaggaggagtgatatcaatggaggtgtttctaacgaaattcttctctgacgtgcttcgtcaaatgcaaaacaaaagagggcgtgaaacagaatattgtaaatatgacaatgagcttcttactctcttcacttcctctctttatctcgctgctttgtttgcttctttccttgcttctaccattacaaggctttttggccggaaggtctcaatggttatcgggtctctcgcttttctctctggagctcttctcaacggtttagctatcaacctcgagatgttgatcatcgggcggttatttctcggtgtaggtgtcggattcgctaaccaatctgttcctctttacctctctgagatggctcctgctaagatcagaggagctctcaacattggttttcaattagcaatcacgatcgggatcttagccgcgaacattgtcaattacgtgaccccaaagctccagaacgggatcggatggagattatctctcggtttagctggagttccggccgttatgatgcttgtcggatgctttttcttgccagatacgccaaactcaatccttgaacgtggaaacaaagaaaaggctaaggagatgctgcagaagatcagaggaaccatggaggttgagcatgagtttaatgaactttgcaacgcgtgtgaagccgcgaagaaagttaagcatccatggacgaacataatgcaagctcgttatcgaccgcagctcacgttttgtaccttcatcccattcttccagcagctaaccgggatcaatgtcattatgttctatgcacctgttctgtttaagaccatcgggtttggaaatga

SEQ ID NO: 35318 - DNA, 3604 bp, Arabidopsis thaliana landsberg
tgatgacatctttttttctttcttcctggggtgtttcccattcattgtaacgatttgatttgagttggaagattatgtcttagaccccaacgcattatgacttgcgttaagaggggatcattttattaattttgtatttttaacaaatatcactacttcctgcaaatcaaccacatgagctatacggatgtagtaacgtggggctataatatttatcaaaatcctttggattgcttacctgtccttctgttaccaactggaactaccgtttcactttcacctatatcatcgtcttattcatctgcttagttgctttcccgacaactcctttagtgctaattgttacattgcgtatatgcaatctctgatagctgtttatttctttttaagtaaattgcgtatatgcaatctctgatagctgtttattcctcatccaaagtacgtactcttgtctttattactaaagctataatggttgccaggaagcgaaggcaaggacttctggaataaaaaagctctaattctaaactcaaaaatttcagcatcccccacacttgggatttggtcaatcaagataaacaactacaaaatgaagaggataagggtagtgactccttcaagatgaatatcaatgcttaccaaccaccaatggctatgcctctacgtctccgtcttcctttttgcaaccatccaatatatcaagcaaagatatcctctgtcaacaatggttcttcaccattcacacagccttcaggtgcacactcgatttgctcatagttaagttgtctggacgcttcatacagagcaatccctacactcaccgaaagattcatacatctcacatacgtttctaccatcggaatacgtagggtcccccctccatatggttcgtgtttgcagtctgacagcgcttcaggaggtagaccgcttgtctctgacccgaacaagaggtaatcgcctgatcggtaagagaaatcctgcatcaagttgtaaccatttatttcagctacccaattgctagtgattgttgctatttctggttggtaaacaataactagaggtggaaggacaagcaacttactgaatgtatccttgttcctctttttgtaaaagctatcattcgtttttctccctcctaaaccaaagatataaatatctgtcaagtcaaacaccatacatagggagtttagctactgaaaaatatatagtacaagtggtaaacctgatgcctgaaatattctcgaaactcagtccatgagctatgcgctctgacaaccacaaagctatgctttaagttaagaagaagaagaacagctaatgaaagggctcacagcgacaacgactaaaccttaaaataggagatgagatgctcatgcaagggacacaaaaacagtggggatgtgcacaaatatataccagtatgttggacatgggctctgccccttatatgttagaagactcaaaacagagaattgagaaaagtactgggctattaactcacaaatttggccccccaagcacgaagggcaagataggaaaatcgcaaaggagcatgaaggaaatctaggttttgaacattgtctataaatagtgaccattgctgaaaaagagggaaggagaggaagacccagagagaagcgcctcggccacgctcatctccgctaaactcgataaaagtcacctccaccaagatcaccggagctcccatcgaactcggctccgagcctgcgccaaactaagctcgcaccaagcaatgagaaaagtcaaacgatattcatcgcccgtagaacgacgaacgacactcaatgtccatggatcaacgtgccgaacgaccaatgtcacaaaaccagcttcgatgaaccagcgtcaccaaaccggcgtcatagaactagtttcacaaaactagcgtcaccgaactggcctcatagaaccagcttcgcaaaaccagcatcaccgaaccagctttgaggaactagcgtcaccgaactagcttcgacgaaccagcgtcaccgaactagttccgactaacaaacgtcaccgaaactagcttcgacgaactagcgtcaccgaactagcttcgacgaacaaacgccacttaaaccatcttcgatgaaccaacgtcaccgaaccagtttcgacaaaccaacgttaccgaaccagcttcgcaaaacaaccgtcaccaaatcagcttccacgaacaagcatcacctgaccgacatcacataaccagctttgcaaaaccagcatcaccaaaccaacttccagacgaaccggctccttgacgaaccgactccttgacgaaccgactctctgacgaaccgactccctgacgaaccgactcctgacgaaccgactccttgacgaaccagcttctctaacgaaccgactccctgacgaaccgactctctgacgaaccgactttctgacgaaccgacttcctgacgaaccgactcctgacgaaccggctccttgacgaaccggctccctgacgaaccagctccctgacgaactgcctcctaacaaaccagctccctgacgaaccgcctccttacaaaccagctccctgacgaaccagcttcctaacgaaccgactccttgacgaaccgcctcctgacgaaccaagcttgtgacaatctacaccgaataaaaggtctagccgaaccaagctctccatgtcatgttaatctcttcgaaagactccctcaccattacgtgacaagtcaagactccctcgtcgtgatgagccaacattctcaccattactagccaacgtcttttcctctagctaaaccatcccgcacaacaaagtcgtctcgcaaagtataatcatcaagtaaaacatagccatcccgccaagtagagccatctctccaaacgaagtcgtatcgccaaaccctttactgcaaggggatccatcgataaacaacttagctcctcgtctaactgtcgacgtcatcacttaactgctttgctccaaagcgcatagttccaaactacaagctttcacctatgtaacatgaactacgaacggcttgatcccttcacagggtatgtacgcagcctctaccgaggcgcatctataaaataaataaacttttgtctgtcaaaagcacgaccgagttctcgagtattcaaaggaagaaattgtttaccctaaaaccctttaattacttattgttacaacctcagtacaaacactatcctggaagaggtgctaaacactttcacgtgcattttctcatggattggaggctcctcgagcataaaggagaactcctcattccactttgggtctttgttcttctttacatgctttgtttttctctcctcccctttgaagtagatgtgcacgtaaggattggtatggtgctttccttcaacatcctcagccgaatgcactattaccacaaacattcctccagcagccggtgtgccttctggagctttctgaaccgcttgcatttcttccttcgtgaatgacttatacaagagttcaacttccagcttccccctacaagctgccgttcttgaccaccgtccaaagtcttacgtagttccaaagtgaatgctttatgttcgacaagcaccatttctttcagataga

SEQ ID NO: 35319 - DNA, 1889 bp, Arabidopsis thaliana landsberg
  unsure (1)..(1889): unsure at all n locations
caattatattatattataaaaatgttacagaatacatgattcatggttttataaaagccctttataaattgaaactgacatcaagttgggtgagattttgagagtatataataaactctttggctgtgtggtcttattacttatgaagtcatgggatattcatagtttcatactcatacatatgttagtaatcaaacaaacgcattaacgcatgcataacttttttaattgtgagttaacaataacaatggcatagtcctccgtgagacatagctttgtagtaaccgccttttccattgccgcatccattgtgacaccaacggttgcatctctgctcgtcattgtttgtgttgcactttccaaatttcgggtggctattacaacacaaagaaccaccactctctacattatatatccttcaacatctgctactatcacacataattgaaacagttttgcctaatatgagttcatgaaattttcttattaaagtaacaaatttgtattgaaacgcaaaaataagtttgttagtgttataaacacttgagaaagtactcctaattatatgagagaagacataccaataactgagaaagtgagaacaatgagcaaagcaaaagaaaaatctttcaaactagccattgttaatagtctttttagatatttataagtatttaagcttagtttgttttcagataaaaagaaagttatattttgttcttatttatataccaaattaattcttaatccacaaaagaaaaacaatatgaatggaaaaaacattcagagaggtttacaatagttctcatgctctatgttttatttttgtagattatatatagttacttcaagttttcaataatggttttgttagaatgagacattaaggaaaannnnnnnnnnnnnnnnnnnnnnnnnnnnnnnnnnnntacgatctttacaggattcaaaaaataacattttaggtcgtagaacatcacatggtttgatgtgtttgaaaaagaaaaggaaaagacaagcactcgaagaaggaaaaaaaagcattagaagaaactaatcgaatcctggaagaagcatatgctatttagacaagtatatgaaaaaaaaagtgaaaaaatttgtgtaagccttcaccttttttacaaacggcgaaatagaggaggaatgcatgagcctaccaaaaatctgttgaatttgtgaaacattgtttttattctgtatgttaatttatgttaaaatcttctgctaaaaaatagcgataaaaacaaacactacgtcatttatgttctatctatttaatttaggttcattgtactttcaatattttttaaaaaagtttaattttagaggtgtattaatttcagaaataaatataataataaccaaataaacttttaatcatctcaaacttcaattgaataatgaaaagcttttgtgaataaacaacaatttttactgggcaagaaaacaacaaccaaatcaataaatttaacactagtgcaatatataatttactctattttttttggtcagtctgaactgcccaaaaacaaatacataaaatagcatacatatttagtttacacaaacaaaattattattttcgtataagtaaattttagaataaaatatgataaaaagattactttttgtaaatgaaattttcgctattatggtgttcccacggtattcttataaaactaaatcctgtttcattttcttccgaataaacatagtttctaagagcatctacattgcatatttactttaaatgtttttctacttaaatttaattaataaaataagaagagggtctttaaataaaagacatccttctaaaaatgtctcaaagaaaacattttgagacacattaaaaatgatctttcatt

SEQ ID NO: 35320 - DNA, 1669 bp, Arabidopsis thaliana landsberg
gtgacacttgtcggaaacagagctcttcccatatttagtcgttttgagccacggctgaccaaagacggggcacacatggagctgaacagagagatgaaccgtctagtcgccggaggatttcaacaagaacgtcgtggtggtcgttgatgctgaacacgggaacttggttcactctttgtctcttgctgttacttttctcgaccatgcctacacgtttctccgacgacatggtgaaccaagaaaaagagagagaactttgtgtgtgttcaaagagagagattgatacagctgttgatatcacacgggcacatataactctatatttatatgtgtgtatattgtgggtaagtgagaagcagagagagaggagagttgatgttttattcaatctgtaaaaagaataaaactttaatgttggttgggtggttcttgtttctttttaaaaccttagtatatatcattactagttgtcgtattgttttaaaagctattggtagaacatataactatttgtttcgttgcttcactaatcttacatataactttcttttttatcctagtatgaccaatggaattacctaacgtacgggtacaaaactattttcatccaattattgattgaaaaggaattggatactaatagtaatctacataaatcgaattgataccttccaatagtggaaaatgctattttgaaagtatttatttatggagatgagaagaatgtttacgtccaagtagtggaatatattgatagctctaataccaactaattgaagagaaacaaattagactgatgcaagtgttttttttttttatcgcgtttttggtaatagctactcattactaaactgaataatccataactgatcactgattcgcttctgaaagtgggcaaggaccttatacttcaaccctaatgaagataaatttgaattaatctcgtggtatagttcgtaatttaactaatattatcatgaatttcattttttactaaatgtgaatacgtgtgtaaatgaaacctacttgtgattctatatatattggcgttttttattgggtaacgtaaaaagttaaagggatttggaacgactactattttctttgtctcctccacgctttgctttgctttctgaacggtaatgtaagtcaaacctctctcgttgacttttttctttttttttttctttttttcttactgctttcttttttgccagtccataattaacagtcgaggacttaacctatacaaggtaaatacaattaaatccgaatgttcacacacccttagaagattgatttcatgtaacttgttgaaggagtttaaaattgttaacgaatagttcgtagacattgtaagaccgtatcaaaacctaaatttcaactaattaagagaactaccttgatttataagtagtttacaactaatcaagacgactctgatgatgcaaatcctagttcaaataccaagtcttgcggtatgattgatagatatatgaacattatttttgattaaaaataaacaacaatttatattctaagcttattattttttaaattatagttaaaattttaataaaacaattcactagaaaattagcatatattaagattttaatattaaatctacagaaacaaatcaaacaattcaaaactataaaccaaaaac

SEQ ID NO: 35321 - DNA, 738 bp, Arabidopsis thaliana landsberg
tgtcttttgatagttggtagatggatagctagcactgccggcttgtcctcccatagattggcctccgaaggctccaccttccatcgagctttcacttgcacttccacttgggccacccgcagagggactaccggttggacttccacctgtagaatctgtgtaggttccttcactcgcgccaccggcagtagcactccccccactagcgctttcactcgcgccaccagcagcagtgcttccaccactagaactctcactcgcgccaccggcagcagcgcttccaccacccattgaactcgtttcggtgctagttccactaccggcttcagttgagcctccggcagtggctccaccactggcctcagtcgagccaccggaagcagctccagcactagcactttcactaccagttgagccaccagaagcaactccattgctagtgctttcaccgccggtttcagccgagccaccggaagcagctccaccactagcactctcaccaccggatgcagctccaccactagcgctttcaccagtggtttcagctgagccaccggaagcagctccagtgctttcaccaccagtttcaaccgagccactggaagcagctccaccactagcactttctccaccggatgcagctccaccactagcgctttcaccaccggtttcagctaaaccaccggatgtagctccactactagcgctttcaccaccagatgcagcttcaccactacc

SEQ ID NO: 35322 - DNA, 4184 bp, Arabidopsis thaliana landsberg
  unsure (1)..(4184): unsure at all n locations
catatcctgtgataataactctcatgtctgttcccaaacatattttggtctagataatgaatcagatagctgcagcatggcaaagaaattcctcaagaaatcaccaaagcagaattgacttgcatccaccaaactgtcaatgtaaacttggtcatcatcaagaataccacgagcaaaacaggctgttttataagatgagtagacaacaccattgtaggtcttgatatcagcaaaacacgttggacctctgacaatgttaagcataactcttagaaaatattcatcttctaatttccttggaacataatttatacgtcccaataaaaatcctcttgatcttttgttccacattttatttattccatcccaagtaaaatacgctgggatgtctgcatataagagatcacgtgcacgttctccatttttactaacagcatcattcctgtttaatgtcaaccaagccatgaattgggaatcttggttggcaatacgttccaaaacttcttttatagactctttccttttaaaaaaatgttggttgcttcccttcaacatgaaatgatagctgttgcacaggagttgatctatgctggattgggaacttaaatatcctctaaactgcttcagaggctgatacatatctgaaattgtaatatagaaaagaaataaactataaattcgatatcgggacaatttatataaatgcaaagctgggaaagactatataannnnnnnnnnnnnnnnnnnntaatctttgatttcgtccttctttttctcagttggtaagggttcttcaccagctgctgtgccattgacattctcattagtctctgttgtttgtggcttatcaggctcaaccacaaatgcaaatcgatctggacccttatttatatacttgaataagtacttaatagaaacattctgattacaccactccacattgatatgagcaccatatcgaactgacaatatcttattgtaaggaaccgcatacctattatcacatctaaaaccacttttctcaacatagttatcagattgccttcttatatagactgaaaacccatccttaccaaccttggttatctcctcaaacgtttttggataatttttctaacacttgctatcggccatacatggagaattcttattagctgcaccacatggcccatgaatcatgcagttcttaataaattcatatagctcaggttccttttctttatccggaatctccgcagaaatcatcttgtcaatatcgtcagctgttggcagtttacttttagagtccataaacgaaaggatgtgtgcatgtggaaggcctcttttttggaattcaactgtatacattactgcgatcagaaaacaatatttattataagtaaatgatatcaacagtttaagtacagaatgatacataaataaattaacttacatgcgacagtcttccgaagcattttcttctcagttagatcatgcatgagagaatctaatttgatcttgaaaattctagcaacaatatcaggcctatcttcagcagtcaatcctctttccttaacatatgttgttatcttaggccacttagggttacatgtaaatgtgataaataaatcaggaaatccatagtgtttgcatatagccatagcatcataataactttgaaccatatagcgtggtccaccagtgaatgatttaggaatcaaaagctgattcccttcgtcttctaaatttgtcacaccagaatctgcagcttcttttatggagtttaagttgtcacatcttatctttgactgattgaactttatgtaagctagccggttagattcaatggtggtgtaagcgtcacaaagaaactgctgaaatagtctcttggatagtagcatggtatgacactctcctggcttctcttgaatgctgaatgcaaaccactgacgcatactgatgcatgttttcttcttctattcgccatttcctttgtaacatttctctatcccaggggtaaaaccatcttccccatagcagaatattagaggatattgcaaagctagataggaaatataaattggactaattctagtaaggtgacatgtatgtcttttcttgaataacaatatcacggtcatggcatagcattttcgaaatcccctaggattaatgctgctacctctgatgtagtaggcctaatgtaagtcctttgatctttctccttacgaccacttgctattctcttatggaaaggttggcagtcagcagcttcgaatctgtctctggcaattctgaaattcttcacatatggattaactttgtttaatatatccattatggcagcaattgtttctttgttcagattatccttacaacctcctttagttgcatcatttccctttctacaaatacagaaagaccataaaatatgttaacaaaaaagaaccaaacttgttagatcattgcttatacaaacaacattatggtgttgagaatgctaacctgattacagtagctctgttatccactttgcataatcaccttcagaaggtttcaaactgcctatcaaatgatagttacctccttgcaatcgaaacatgctaggtccttgaccttttggcatagatttatcaacttttccgccaatagaggtcatagcaaaaaccatgttatatatcctagcatgttttctataattctgaccctgtgcatcatcagcagtaagaagtttctttactaactctggtgactcttcaagaaaaggtaatttaactgacccttgtccgcagcaaagtgtaaatatagggtcttttagattgcgccttttgttgattcgctcatcataccacatcaatgcaccacaatatttacactgataggtaggatcgccatgatcaagataagctgagaaacaaataaccataatcaatagccttcttaataagtctatataaaaggcatgtaaattataagcaatagtcggattccatacttaaaggtatactctttgtagtcctccgacgtgttttctttatctttactgattctgataatccgctcttttgacctatgaaaccctgtaatgcttgttctagggtaatagcttcattagataagacagatgggcaagttcccatgtcttgtgcctcatccaaatccattctctgtattttgattggtgaaccatcatcttcactgctacttatgtcatagttttgttctagttcctcttcctcattgagattgataccgttcgtctcatcatacatttcttcatcactgctattgtgatctacagttgtgcttgatagttttactggataatgttaagtagatgattagtcaaaatacagagttggctaggttttagtacatataagaatacttatagataatcattcaccttcagcattagattcagaacttgctctagcaaaatctatgtgcagacttttccttggcatgttaagtctactggtgttgacacatgatgattgttcttgggtcaagcactccgaatcattgatacttttttttgcctataagcgaaaactgtatagcataaaccacatgtattaaaatattcacagtttgaataatcagttactaaccttttctctgtctttttcagtctctggacacgtaagcggtgtgccacccattctgccatgtggcccaacggatgaattggtgatatctctaagtacaaaaggagtagaacatgtcatacttatgcttgacattggagatgcagacggaatctgagatccaagtggcattcctgtttaaatgagaggtaatgttcagtagaatgagttgaaatatattgataaaaattggtctttatcaggtacatatcctattttataccttttgacatttgtcttcgtctcgcagatatattaggtgaattgtgtaactgagaggtggtgcttacatcacgctgcactgtgtttaaaacatagctaagggggacagaaccatgagacgaaggtgaattccactgagacatcctaatgctttgaaaatataagtgatcgaatctgcttctttttggcggattggatgaagaatcaatattctcattgtttgatgtatgttttttactcatggtccagtttgtttgtgcttccctcggctatgtgagaaatgaagataaaataaaaaggagagacattaaacatggccaagataatcccttg

SEQ ID NO: 35323 - DNA, 2628 bp, Arabidopsis thaliana landsberg
tcaaatattcgcatacggttataaacccaaactttttttttgacaaatgaatgaaagattaataccacaaaaagaaataaaacaatagttgaccgttgacaagttttaaagggaggatgaggatgccacgtaggataaatgctggaacacataaggatatttaaagatattttgtcttttaaggattaaaagatttgtttccacgaccgtattacgtgtcatcgtgtcagcgggtaattgggacgaccttatcaccaactaaattgttttcttcaacatcaatctcaaaatagaagttttcttgcaacttgtaagctaaaattgactgtttttaacttttaatgatttaattgttttcttagtccaatatttgtaaaactttcctgttgcatgatttttcttctcgggatgcacggcctccaagctcgacagtgaggatgctgtccgtcgctgcaaggagcggcgccgtcttatgaaggacgccgtctacgctcgtcaccatctcgccgccgctcactctgactactgccgctcccttcgtctcactggctctgccctctcctccttcgccgccggcgagcccctctccgtctccgagaatactcccgctgtttttctccgcccttcctccagtcaggacgcgccacgtgtcccttcttcccattccccagaaccccctcctccgcccatccgcagcaagcctaagcctactaggcctaggaggcttccacacattctctccgactcctctccttcttcctctcctgccaccagtttctatcccactgctcaccagaactctacttactctcgctctccatctcaagcttcctctgtctggaactgggagaatttctaccctccctctccccccgactccgagtacttcgaacgcaaagctcgccagaaccacaagcaccgtcctccttccgactacgacgccgaaactgaaagatccgaccacgattactgccactcacggagagatgccgccgaggaagttcactgcagcgagtggggcgacgaccacgaccgtttcactgccacctcttcgtccgacggagatggggaggtcgaaactcacgtttccagatccggtattgaagaagagcctgtgaaacaaccacatcaagacccaaatggcaaagagcactctgaccatgttaccacttcttccgactgctacaagaccaaattggtggtaaggcacaagaatttgaaggagatccttgacgccgttcaagactacttcgacaaggctgcctccgctggggaccaggtctccgccatgcttgagatcggccgggctgagctcgaccgcagcttcagcaagctgaggagtaagtctcacactctactaactagatgtagatgatgatgcattgaaacccatctcattctcttactctctctatatttgttgtctgcagagacggtgtatcattcaagcagtgtgttcagcaacttgagcgcaagctggacctcaaaacccccattggcagtcaaatacaagctcgatgcatctaccctgaatgatgaacaaggcggcctcaagagcctctgctccactctagaccgactcctcgcttgggaaaagaagctttatgaggatgtcaaggtacattccctgtttttgttttcggttttcggcttaccaacggttacgaaataaacttgtgaattcgaatttaggcaagagaaggagttaagattgagcacgagaagaagctgtctgcgctgcagagtcaggagtataagggaggtgatgaatccaagctagacaagactaaaacttccataaccagactgcaatcactcatcattgtttcttcagaagctgttttaaccacgtctaatgccattctccgcctccgggacactgaccttgtccctcagcttgttgaactctgccacgggtcagtcttttttttgtagttgtgtttgtgtttcattgttccttgagggctgctggttcggtctaggcttgtttatatgcttctgcaaactcatgtgaacccgaattaggcatatgtaataccaaacccattgctgttctgccagtgggggattttataggtaagttcgaaataaaagtagggaggatttgtatgtgtctctaaccaccttgaaatgcagattaatgtacatgtggaagtcaatgcacgagtatcacgaaatccagaacaacatcgtgcaacaagtccgtggcctgatcaaccaaacagagagaggtgagtcaacatcagaggtacaccggcaggtgacgcgggacctagagtcagctgtgtccttgtggcattcgagcttctgtcgcatcattaaattccagagggagttcatatgctctctccacgcatggttcaagctgagcctggttcccctgagcaacggagacccaaagaaacagcggccagactcatttgccttgtgcgaggagtggaagcagagcctggaacgggtgcctgacacagtggcgtcagaagccataaagagctttgtaaacgtggtacatgtgatatcaataaagcaggcggaagaggtgaagatgaagaaacgcacggagagtgcaggaaaggagctggagaagaaagcatcctcactgaggagcatagagaggaagtactacca

SEQ ID NO: 35324 - DNA, 2705 bp, Arabidopsis thaliana landsberg
ccccaagtttcttgtgatgacgaatgagacctagtccagtaccatcgatccctgcaagttttagttttctcagttttgttaacttgaaaagacttaacatttcagtgttccatggaaatgaaataaaacttcaaatccgtagaaactatcccaactcaaccaaactgaattatcggtatcgtgtctaggtcaagtccgactagtccggaggtgagcatgctctttgcatgttaccgcaaactcaccctaactaaagcacccggaccaatgcccaagaatccaagtggttacacgtgtataacaaccttgtttgaagtgtaatcaagttatcccatcgggaaccacattcattcatattacgatagaaaggcgaaagaagttttatacgacgaaccaggtaaaaagaggaggagaggagagtttggcgcttgagctctgcattccaacggagagaaccaacgaggtggacctcctccatccccaacgaaatctctcgcttcttccaaaaaatccaacaagctttttcgcaaatcggggcgcgccatctccatcttcgaatacggattgtgcaccacgttttcatctttattcttccgtctccgtcgaatacccctagaaggaggaggaggagtggatgttacggatttgatctccgtgagtcgttgcttcgaggcggaggtccggcgtcgtcggagatatgacttcgttgaacagtaggaatcagttactcttgatgaagatgagacggcacagagaccgaagattgagcgaagtaatgtaacccccatttgtgtgagacttttgccgtttttctatttgtttataataagaacacgacaaactcgtccaagcaaagatgcgcggaaaataaaaacatagttgttttttattttttgaaaaagtagtacaattaagtataacctaaaatacaatttacaaactaactttagttgaactttaatttagttagaatcaaatttgtgtttgagagagtaattgagaaagttgtctttccatctttctgtatttaattagttagaataaaagtccacatttaccacctcttgtcttgcgacttgtatgtaagagaggttataaacaccaacaacagtgacattttggctctttttataatttatatacaaatttagacgtgcaagtttcctcttctgaatttctataaacaaaataaaatttacaaaacgttagttgaactttaatcggcaaggtgagccaaatctcacgtacaaataaatcgatatgacacaagatccaaatgattttagaaaactacctatatgtatcaaagatccgtttctttattaaaacatgcagttaaatgaaatatagtagtatacaaacaaatctatatgtcaaaaatttgaacaagacactccaaaaaagctagttacttgttgtcccatatatactataccatccaaaaatgaaaggacatagtttgtgaacaaatgttttttttcttagaattacttgatggaagcatgcactttgtgtgtaactggaattatgcagaaacggaaacaaaggaattttaggggaagtgttggatatatgatagagtttcatcactacaaatctttctaacatagttagagaaaattcaaaaacaaaactcagatggagggagattggagacaagttgtctaagaccaccaaatcccatgtctttgcatttacataaaaatttggactatatttggtggtgggaatgagccatatccgtgcaataatataagcaacgcttagaccacttgtgaaaactcagataagctattttaatgtgagtttctaacttaaaaatagcgtatcatgtgaaccaatagtccatatatcagatattaaattgataaaatcagatactatacttgatcttagccaaaatgctgagaaatgtatgaatagtgagagagagcaacctctattttaacataaataactaacaattatgtgataggttttagcccaactcaaaattaatcacatgtgaggctttagcccaattcaaaaattagcccacaatatatcctcagtcgtaccagtgaataatatttgtgtaaacttttattgcaacgacaagatgatgacattcgaaccaaatcaaatctcaacaattggaaatgaaaaagatatggatcggatgacagaaaagagaatcgaagactttcaaatgagattccacaatgtcctaaaaaaaatatgccaaaaagtattatgactcttctttaatgtaatggtcaaacctttttatacccaatagtggttatatgataaaaatgtaacatatcacacaaatttcctaatttggatttttaaggaaaaataaactttcattttaaattagagaaatagtcgagaaccacttgagtcacttgagcataccataaggcggaagcatcaatttaaggaacataattttacacatggcactagggtaaaagggaccgaatatgtattcgattagctacgtgtaatttgaattgtagtacaaaaagtacaaagaaaacgtatgcaaagtagtgagaataataagttaataaccactaaataaattgagaacattttatcaaccacaatgagtcacgtgtgtatatattagttgaaaatgtcgttttaatattaaagttatagtatatcattgagcctttaaactacctatgcatctatatagatatttcataattata

SEQ ID NO: 35325 - DNA, 1958 bp, Arabidopsis thaliana landsberg
  unsure (1)..(1958): unsure at all n locations
caaacaaaaacaaactgtaattacttactgctccattttcggagtcctaattaagcgttctaggactaagaaactgaagaactataatgaaaaaaagctcgcagataatcgagacattattcaggttatatatacaagacgacacctatcattctctgtttacgggtcgacaaagaatggaagaatagagaagagaagagagagcaatttatgtgtttcttttgtgtgtagtagtttcatgtgagagacctaagagtcacctgtcttgattacaagatggaggctaggagccacagatgcaataagagactgtataccataacgccaagccttgcttgaggacggctcatcaatactcttccacctgagaccctgcattgcagaaatcaaacccggggatgagtaagatggaaatatttgggagctattacagaactgttcgatattagtgagtatatttaccatattccatcaacccgatctgctattatctttccttgcgttggaatcagaccagacatgttgagagacttgaaaacatgtcctgccaaagaatatttgtgtttaagatatgagtcaaccgagcggtatcatacttaagtaataagcgagatatatatgtagacgccagagtcctgacctttatcttcatctgtttcgttgttgttcatcagatgctcggactctgaatctatgttgattgaaagatgatccgtcgatcccttcctcactgttctcacttgtgctgctgtaggcaccggtgatattgattttattcccaaggctccctgagaacaaaatggggttcagtccaaacttggagatcaaaacatagcaagagattgaagctaaatgattacttataagatatcaccaatcacaatggcagcggatggcgtaaacaaaacaagggtcaaggaataagctgaaatagcacgaaataagatattaccttgtcctcaatctcggatatctctgaggtagaaggtgctctcggtgtttcgaagatgcttctttcttgaacaatatcaggctgaattgctttggtttgaagtttctcttcaaactctttgactcttaatgatagtttatcgacaagtttctcgctaccggccaactttaaaccaagttcttgggcccttgattttgaactctctgattctaggagaagggaagttatctttttttctagtgcttgtacgagtgtccatgactcggagaagtttgggtctacaacaggattattgcttgccaatatacccagcagtttttccaagccagatattagcttggacagttcattctttgccttcactaactctagctcggtcgtactctctgcttcagccgccttctttagaccttgaatttcaagatccttttctgccaaagtagaattgagctctttttgtccatatgataagatgtctatctgatgctgcatctcagtaacactatcaacaatcgcgaatagctacttcacatcatatggactctgaggatctaatccgttgactagatctactgatggcacttcaataccatttattttgtcaaaaagggttcgcatatcagaagctggaattagattttcctttgcctctgcaattcgaagcaacagcacgtgacattttagtatagtgataattatgtgatgaagatttaaagaaatgagagacaacaaaagataaaaattaccttgctcttgcaccaatagtttatcatataacgtagacagttccacctctttttcatgccatttctcttccttcactctgagattttccaactgaagtttcaggtcttggcaaagctcttccagagattccaccttggcctcagaacttgaaaccttagtttggtttagatctctttctaacacagtcttttctagagcgacagatgcttctgttagcctgttctccatatctcggattacagnggcagctgcattattt

SEQ ID NO: 35326 - DNA, 1529 bp, Arabidopsis thaliana landsberg
ggacccaagaactagtccaaaacttgataattatcaaacaaatgtttttgattcaattacaaaaggagttagggaagcgggttacataaacaatgacaacatattttggatcagtgagcatatataaacaataaaaataccataatccgatgaaaaaaatcatcagagatttgcaaaagaatcatttatgatggatcaccgccaaaacacacacaaggccacaaccaacataaaaccaaaccaaaccaaacaaaacatccacactaatatcacatacgaccacaatcacaagtaaatacaatgaagtcgtacaaataaatgaccaccaaaaattatatttttgtaaagtaagtcagggaaatccaaaatccttaataaccatgggattttttttggcacaagttatcgtgcttttgggttaatttcggttgtaaagcttgtgctcatttcaacagaacttcttgatcccatgtcttctctcactcctcgctttgagttttctaatgttagacattgctttagttcattagtaacttgagacatggttggtcttttctccgaagaaggattcacgcaagacattgctatctcaagagccttccaaacagaagtaggctcataatctctattgagtcttggatccacaacgttctcaatatctcccttagtaagcatgtatcccacccatgctgctatgtgcggcttctctcgggtatgctgaatcacaggtcgacttgtgatgatctccaataatacaatcccaaagctatatacatcactcttttcgttcaacctatttgttcgatgatatctacaaacaaaacatgaaatatttttttttttcaaatgaatgaggaaaaacaatttgaatcaaactagtttggtgatgtaaaacttactcgggatccaaatatccaggagttccagcaacagctgttgaaacatgagtttcacctccaactggaaaggatcttgaaaggccaaatcagcgagttttgcttggaagtgttcgtctaaaagtatatttgttgttttgggatcacgatgtaccattggaggtttgcaacccgtatgcaagtattctaatcctatatttatataattaaattgttcatgttagatgatccatataaagtgattaatgcatttgagctaagaacgaaccttgcgcagtttcgacgacaatttttagtctacttgaccacttcaatggagagccaccccgttctcctataattaagaaacttttagtaatgttataaaagcatgaacattaaaatatggctaagtaatcactattttaaaatgtgggaaattcaaatttatacctgatagatgttgttttaagtctccgttcggagcatactcataaagcagggccaagttgctttcttcatcacaatatccaaccaaactaaccaaattgacgtggtgcactctcaaaagaagtttaacctgaccacccatgtccaaacaaatttaagagccatcacatgttacaatatatttcatgtattatgattaacata

SEQ ID NO: 35327 - DNA, 2894 bp, Arabidopsis thaliana landsberg
aggaaacccagcttgttcgatgagtttttcactaagagggtgggggcgacatggaccctgaatacaccaggggattgcataatattccttagcttcttcgccggagaagaaggaagtttcgcgtttcccgattcatcggaaactacggtggagttaacggcgccacgaaatcgtcttgagacagagaaggggttcgcaaataattctccgacggtttgtgtgaaagaagaagaggcagaagaagggaaaaaactcgatttggattgtttatgaagaattcgaggaggagaagagctgcaaaagctaagtgccgccattgaagccttgaaggattcacttctgttcggtaaaagaaagaaacagaaattgatcaaaagaaagaagttggacaatccgaaacaacaagaaccagaccgaaccagatttaataattaaaaaaaaaaaaaaccatgtcacgtgagcttttttagggttcacgtgatcatctctatcgtcgaaatacaagcggcggacttcaaaatcataacttttttcttcgctcctctcttagcatcgccgtgaatcgttggtctcagtttctccgtccatctttgattcgtcgatccgtaagcatctattcagtttcatgtcttttgttctaaactttttggtttgattggggttttacctttggttaattaaagctttctagattcttagtgtttggattgaattctgtaaggtttggtaaaactataccaggttagttgctatctagctgcaatgggtacagagacggttgtgcatgatcaggcaagatgggcaatggctgcaatggaacgaaggcttgctgttgcaaaagctcagcttcttcaacaacaacaacagaagaatgagaaagataagaaggggacttctgatgtagatgtctctatgaaagaatctcatcaagctgattcactgcctactccctcaaagacatcaattaaaaaaggtttgatggttgagtataaacgaagaatgattctctctagcaactctttattgaactctgattgtcatgggaatttggttttgtagtagatcccaaggatgatgattctgttgcatatacaaagttgtcccatcccgttgatgagaatctgctggcaaccaatgttaaggtatattcagattcttgaggagaacgaagctcggccttcttctgtatgatagataagattgctcaatgtgtgtgtttttttgtgattcagttttctagtgcaaagggaactatagtagacaaggttttgcataaccttcttcgaagcggtgactctgctcaaaagtacttgcaaggtactaaaagtgtgaagctggataactatatccttcttgataattttgtacagtcacggtcttcggcctctggttctaaaaaggcatcacagaaggattcaaaacgttctaaaagccgtatgtctatgaagcgactcaagaaatctggtgctttgcatatccctaaagatctccaaaagtgagttctttatattttttttttttttttttgctgtcatatagattgaactggctcagcctatgcatctgagtctattattttggtattcttaataaagtttaagtgattacttgttcacttgtgtttgagtgcaggtttgatttgtttaagccaatgcatggtatgtgggaaagttacatgatgaaactcatcaaggtgaccgggtaagctacttatctgattaccgaaatactgattcaaactatgtgctttctataaggacgaaactgatgggagtaatctagtatacacaatcattttaagcttggtcatcattcttagacaatttactttttgcaggaagattcaattatctttaactcttctctcagcagatcttcatggtgctttcatgtttggtaatccttcattctttcacaaatctgttttactaggatatgatcttttgtctctcactcactttccaaaacttaacttctctgtacgcttaaacaaaccttaaaactagtccttttttttcatattgtaatttgttccaatcatagcaacctattttacttgtgacagttgctgagtgcaagatagcatcattcactggtgtacaaggcataatggtgcgcgagacatccgaaacatttggaataatcacacgagatgacaaatttcgaggtatcttaaagcttttttcaccaatatatttgccataaatatcttgaatcgttctcttccccagcctcaaggcttaacttagttattgtaaacaatctgatacagttgtaccgaagaagctctctgtcttcatcatccaactcgactgctggaagattactttacatggggacaagttcatttgaagagacaatattgttaacgttaatgctaaaatgaaagctctagtcttttttcttagcccgtgcctcgtgtacaatacaccccctttcatttctacaaatcccacgacgacacacaagtttttttacgttggagcaattacactccgaggtttcgagtttcacagttacttctcgaaacatttcagagaaataagcaaagggaaaaacatctttatttaggaaatgagactacataagtttcgtaagagagtttgatgaaggctgaaagtaaaatgttttagaagaaagataaaagtcagatacaagccttgtaataatttccccaaaataacataaaatctttcaacagacacaattgctctctagctaacgaaacaataagatagtggtttgggttttgatttttttcgtttttgctaatgtaataaagatattctacttggccttttcaaacaagagctcctcaatgagcgcagctgcttgctcaactgtggcgattgactgtgctttctcctccgccatttcaatcccgaactcttcct

SEQ ID NO: 35328 - DNA, 3168 bp, Arabidopsis thaliana landsberg
cttttgttccacgcatttcactaagtcattaagtactttgtaacattatgccatattgccatttgatatcgacaacaacctaaggacaaaaaacatatgattccatgattgttcatgcattatccttcccaatttatcccactaaaatttctaatcatattcatttacatgttaaccatttgcaccctcagtttcagtagtattaaactgaattgaggttgggctagtgtacacatatgaatgtaactaaccaataccaagatatatgcacattaagattgtgaatgatcaaaatttgtgactgttgagtggcaaataatattttcaccaagcaaaaagtggctctttatttactctctttagctccaaacagaggggtttttaaattgaacagccattgcatccagcagaaatttgacaagttcttctcttcctaccactttctccttcttcagttcaaggtgacgaacctgcaaaccacaaatttactggtcattttcacggctttcttcaatagtaagcagaacatgatgtatttattacctttacaaactctatttgattttgagctactccagactctgtgatgatcactagacatttgatttcatgttcatttgcatattcgtactgctcagtaagacttggatcaggtgttggaacaaactcagcctgccaatgcatacatgtaaatgttattagttggtaacacaaatgatatgtccaaacagatctatcaacataacatattcaagctttcttcacctttatacttttttcccatagttccgcaactagttccatgcgctggaccagtaaaccaccacctcctcttgaacaaacaagtacactggtgctgacttcatttctgcagttcaatacaaattagcgaggtgtttccatttaagatcatgaaaaagattcagaaggacaatgaacctaataggccttagatccataggaagatgctgaaatattgtctccagtgcaagactaactccaacagcaccagggaggttcattttctggatccaataacaaaaataataataaaaaattttcaataacatattttaccatcctcttgcactcaactttcacagtgacactagtagataagaggataaatttcacttcccggttttcagttcatacactgataccatgataagtatcttttacgtgaataatcatttatcaatgctacatatcctatagcttctctccatgcaagatgaaaaatacgtggaaagaacttacatgttcacgatcacacacttcctgcaccaaccaatcataacgaccaccaacagcaagtaaaacgccatcattagatgtcccagagctattttctttggttaagaaaacctgacaaacatttgtatgaagttcgcagatgttaaacatacagtcatatagcagaatcaacaacaatctatgcatcaactaatcatctatgcagaacccatctcttcacctgttaccagagtaagtaattcaatcattgtaaacaacgcattaagctataaaacatccaaaagcctaacaaagacccaaaaaagccccacaattcacttgtacctgaaaaaacaaattccggtgataactttcggttggtggcatcagaacatcaatatgaacatgctcttctatcctccagactctcaggtaggttaagaggtttgacaactcatcgagtgctttgcgggtaggtctatctgcagcagatggaaccaattataatctgcttcacaaatttaggagtggcgaaagttggatcgtaccagcacgcagagcccctcttaaacgaggaagtgcttgatctgcatctccacaaaaccttgaagcaacagtctgcagtctattgacaacagcttcaggtaacttcaactcctggtaagcaggagattcccgagtaagacaaagtacactataatattggtatgtggcatgttactatgattgccaaccatgtatagggttattgtgtagcctcaaacctgaagaagttgacgccttatgaaaacccattttagcttccgctcagatgactgaggacgcaaggatcccatcatggaaagaagcttcaattgaaaaacaggaaaaagaattggtcaagataccgatataaaccattgatacaatgacccatatccttgaactaacaataaccatacctctgcaacctttcgtctatgctctgccttaattcctgcccaggaccaaatcgcatccagcaaatctccatgattcaaatgaatgtcacaagatccgcgatgaaagatgtgggttggtgatgtctactatcacctgtaaagttaatggattaaaacggtgcaggagatgtaagctctctgtaggaaaatgcataaggcaaaataattgttcagtttcacgttagtttcccagaaacaccatcacaacacttactacatttcctccaaaagttggcagtgtgacttataaacatgtaatgatcattactcgatataaaaatagattcgttccatttgtgtctcgcaccttgagaacttctgcctctgtcagggatggtgtgcctccaacaatgtcaaagtccgcctattggcaatcaaacatcaaaacctttataagcatatgctcttttttcacagagaaaataaaaggtaaaatggacagccagcatttatcttatactatattggccagaaattatattagcagagtgtgcgaccacaatacctgaagacacggatttggtggagaatggccaattgctctcctgtagacatgagatatttcatatcgcttgaatgaggatttctgcattgcaaaattgaagtgtgccaaattagacaaataaagcaagaaattaaaaccaaagatttcatgtaagggtagctatgacttgctcagaattcactttgcaactttctcaatgtcaagtttacactttgtataaattgtcctatattcataaaaagctgctctctaagacagttcttggtccaatttggttgaacttcacatctgatttggaaataatcttatatagaaataaatagtgagcacttttctgcttaacatacaagaaaaagaagggcgatatacataacaacacaggacctgatttacgcttatccaatgcacaaaaggcagtcgtagctcatagcatagttcaagcatatc

SEQ ID NO: 35329 - DNA, 5330 bp, Arabidopsis thaliana landsberg
  unsure (1)..(5330): unsure at all n locations
aagggacctcccctctccagccagtttaagaccttttcctttttcttcatcgctgtcgtcggcgctggtgttggttggtcttccgtacgccttcaagcgaaccggatggctcatgggtgtcctcctcctcgtctccgtctctgttttgacccatcactgtatgatgcttcttgtctatacccgccgcaagctcgactctttcaatgctggcatctccaagatcggctcttttggtgaccttggattcgccgtctgcggctccttggggaggatcgtcgttgacttatttatcattctgtctcaagctggtttttgtgtcggatatcttatcttcatcggcactactttagctaatctatccgatcctgaatcgcccaccagtctgaggcatcagtttacaaggctgggttctgaattcctgggcgtgtcttctaagagtctctacatatggggatgctttccctttcagctcggtttgaattcgatcaagacgctcactcacttggctcctctcagcatcttcgccgatattgttgatcttggcgctatggctgtggtcattgttgaggattccatgattatactcaagcaaaggcctgacgtggttgcctttggtggtatgtccctcttcttgtatggtatgggcgtcgctgtctattccttcgaaggcgttggaatggtcttgcctcttgaatcggagatgaaggacaaggacaagtttggcaaagtcttggctctcggcatgggattcatctctctcatatacatcgcatttggtatcttaggttacttggcttttggtgaggacaccatggacattatcactgctaacttgggggcaggacttgtcagcactgttgtccagcttggactgtgcatcaacctcttcttcaccttccccttgatgatgaatccagtgtttgagatagtggagaggcgtttctcacgcgggatgtactctgcgtggctcagatgggtactcagcttagcagtgactctggtggctctttttgtgccaaactttgcagattttttgtcattggttggcagcagcacttgctgtgtgttagggtttgtgttacctgcattgtttcatttattggtgttcaaggaagagatggggtggctgcaatggagttcagacacagcgattgtggtactaggtgtggttcttgctgtgtcgggaacttggagttccctgagtgagatcttctctgtcaaagtgtgagcgtccgtgaagtcagagattggagaggtttttctctccttgtgtgcaattatgtatatggaattggttgtggttttaagagtaactgtgattgtatttgtattttgatggtttggaataaaagagatcagctctgtcttctgttttgtgtttacatgtacaacatatgtgagagttttgatttctcaatgttacaagcaagggaagcttgcgaaataagcctggctagctaatcaaatgctttggttttgtattattacaaactgttgagtgtgttccttccatgaatcgccttcttcaagatgcctctcgtagaagcaaatctcaccatcaccaccaccatctccatgggacttgacgatgatcgcagagatgcttctggtcccataacgcccctgtatctccatgagtgagactgaatatttatggaaagtgttaaacaaacaatcaatgtactctaaaaaaggaaggttacagttggtctctgcatgtcgacgaagatggagctgagatggtattccgtctctggtgtgaaaacgtgaggtagctcggtttcttcgtccttgacagtattggtcatcacctcctccaccatggtcttcaccgggaattcaccgctcccgttctcagccagaagctgttggaaaccctccctcagcctcagacactgcagagacaaaaacacgcaattgggggagtctgcaaaaggtaaataaagggagaaatggcccacatttacttaccttgggccaaggggagtcgaggttggcgttggaaaggacatggatcccgggagagacttgcgtcacgagcttgtcaccgtggggtggtcggttggtaatgtaaatcatggatttggacaagacatgagcgacaaccaggttaaagccattgtagagtgaaatttcgtcttggatctcctcggcaaactcggccggactcttttcgctctgttctcaccaaaacgttaaaagtactctcagtctctaacatgagagacaatctaaagcatattaggtggtggtgtagacctgcaagtaacgaagaggcagatctccacgggatttagcagcagggaaggaggaggcttccctgaaattggtgaggaaagccagacggccatgcctcgtgcagcccagccacgtcccgccgccaacaaggtctcttcctcccaccgtctctccgtcttcccaccaacgcagcgcctctgtcgcccttgacaatttacacaaaagattagtacaatctcatcaaaggaaacgattacagaggggattgaatcacctgttgtgatcttcatctctgttgagaaatagaagaaaagggtacagcggatgcgattgccacagaaatactgctatgcacattctcttctcctccgacgaaccaacgagccaaccatctctctgctctaatcaaagtcgtcgtctcttttttttttttttttctccgtcttctacttaaagaaactgcgtgtagtttttcttaccacgaaacggcagcacgtgcaggttttaacaaacctctcgattgattgatttgctttaaagaaagctcgccggcgatgtggtaatatcagtcagatccagatgacgacgttctctacatgcgccgcctttttatcgctggtacctagcttgattgttctctctccgttcgatatgattatctatatttacttagctcgtcctggaattcgcactactctcttaaaatggatcatctgatcaaattgtgccttaattttttgacatgtcgacgatttgcaggtagtagtgctacatgctgttcatgtcggtggagccattttagagtcacaagcaccgtaatgatacatctccttgaagcttgtcttttggctacactgtttctattttatttttatactcttttcttctttttgccatgatgtttccttatgcagccacagagaacttaaagcttatcgtccgctgcaagataataatctacaggtcccattctcctcttgttctccagataacttatttggttcaaatatcagactttgctgtgattaagtttttgttatccacttttgcctttaggaggtgtatgcttcctcagctgctgcagtgcactacgatccagatctgaaagtaaggctgcagtcctctttctctgagtagtgaatacaatttgtatgcttcctacttctaataaagctgttatctcaggatgtgaacatagttgcgacatacagtgaccattacggcaatatacgccttggtagggtgaaaatgggggatctttcaccttcttgggttttggagaatcctgcctatcaagttagccgcaaaacaaaaggttcgcaggtaccaaacatttcatgttctggtttttagttttaatgagatttgatcatcagtttaagaatagaactgtatatcctatggacatatggagttctatagtagaaaacttaaagtgtgtgaagtgattacttaccactcttctcaccgagcaaaaaatacctctcatgaacttcatttgttctaaccttgtgtttcttgaatttatccttaagcttgctcatattctttgttctctagttgctgacattttttgtatggaattagctagttataccacgggattcatttcaaaatgatactggaatggaagataatgcaagccattctacaactaatcagactgatgaaagcgaaaatcagtttccaaacgtggattttgcaagcccagcaaaactgaagcggcaggtgatctgtcaaatagccttcttttctaatctctggatgccttaacactatatgactgagattgtaacaactgtagaccctttcagattttacgtcaggaaaggagaggtcaacgaactttagagctgatccgacaagaaaaggaaactgatgagcagatgcaagaagcagccattcagaagtcaatgagctttgaaaactcagtcatagggaaatacagtatatggaggagagactatgagagcccaaatgctgatgctatcttgaagcttatgagagaccagatcataatggcaaaagcatatgcaaatattgccaaatcaaaaaatgtaaccaatctgtacgttttcttgatgcagcagtgtggagaaaataaacgtgttataggtaaagcaacctctgatgctgaccttccttcaaggtacttttttacattcctcttgtcagcaatctttgtgagacaacaatctttgttgaaactttttccatcccattttctttgctagcgctcttgatcaagcaaaagccatgggccatgcactctctcttgcaaaagacgagttatatgactgccatgaacttgcaaaaaagttccgggccatccttcagtccactgaacgcaaagtagatggactgaagaaaaagggaaccttcttaattcagctagctgccaaaacatttcccaagccattgcattgcctgagtctgcagctagcagcagactattttattctaggtttcaatgaagaggatgcagtgaaagaggatgtcagtcaaaagaagcttgaagatccttcgctctatcactatgcgatcttttcggataacgttctggctacatcagtggtggtgaactccactgtcttgaatgcaaaggaaccgcagaggcatgtgttccatatagtaactgacaaactgaattttggtgcaatgaagatgtggtttagcatcaatgctcctgctgatgcgacgattcaagttgaaaacataaatgatttcaagtggctgaactcctcttactgctctgttctacggcagcttgaatctgcaaggctgaaagaatactatttcaaagcaaatcatccttcatcaatctcagctggcgcagataatctaaagtaccgcaacccaaagtatctatcgatgctgaatcatctcagattnnnnnnnnnnnnnnnnnnnnnnnnnnnngagaagattctgtttctagacgatgacattgtggtgcagaaggacctggcaccactatgggaaatagacatgcaaggaaaagtgaatggtacggtggacacccgcaccccgagcttccacagatttgacaagaacctaaacttctcaaatccaaagatttcagagaattttac

SEQ ID NO: 35330 - DNA, 3777 bp, Arabidopsis thaliana landsberg
tatatatgtatagccggattacaagttataccttcaccttttccatcattaaagaccggtggggcgtctcgaccgaatagattagaatcatcactaaaatcagagaggattgtgtttaaagcttcttgtgcccgcccccaaaacaaaatgttctgcctttgaatttcagtttcttccacatcatttgtaataggagaaacatgattgccaggaggcctgccaacatctgccctatatgaatcaacttcttctaaatcatcattttctggaatgcggtcagattaggttgcctggtgaatgggacgatgagaaaatcctcttcattgtcgttgtcttctgtcccacttgctctactaggaccaaccttcgctgacttatcatttttgtccatgattcctttccctttgttagtaggtccacattcaaggcttttaagccggatgtagtcttcaggctctctaatactgatgcctcctgcgggaaaaagttcccgcctggtactacttcttggctcttgctctgtctcacaaggcgttgggtcttgcgttgcacccaccaaggcactatcaagggcaaattggtgcagttcttcctcagagtcataatatgtctcctcactgtcctctgaattgaagtccttgcatgctacatcaacaggagaaattggaatagtatgttggactacagtaacacagagattaacctcttctatgtgacgtctcatttgagtgaacattgtcacatcaccgtcttcattgatgcattgaggaggagacctgttgccttcatcgattgccatccactctggatattggtaagccaattttatagtgatgtctcttgcacagaaagaaagcttctctttaaccttctgaactagctccttgtaagtcatgttggtccggaggcgtatgtaagacgatccttccaaagtcttaggttcaaactgccaggccatattatcaactctcacccactcgccaattaccagcaagacctcatcttgtgatgccgtctacattgagtatgtgaagaggtaattagtttacagataaaagaaagaacgagtaaatataaacctagccaaatatcctgatcgttcatatagtagtaagtttagtctttaactatggtaagtaataattctcaaatattcagaaatggttactcatgttcgattctaagaaaatattaccaacttgttttatcagatctaagatcacggaaagtatttgattcgaaaagggaaagtacgttgtttgactttgaaagggttgaatattaaaaggaatctgcagaaagtaaaaacagaaactggaaagcgatggttttgtaccttttccgttggattctccttattaactgctgaactattttgcaccaccatccatattgttatgtttacagtttgagatctttgcgtaaaaggtacaacattaactgtcaataatagaaaagcagagcatattctcctctcatatttttggggggagtattttattcaaattaatcttatacactgcaggctatgttagtgatcggacaattgtaaagcggtgctatgaaattttttttactagctttaccagcgcccacgtcagctgaaagaattcatcttccttttcccctcacgcacgtctaagcaatcacacaacgttgtgttagggattgtgttgtaacttcacaccacagatgcgtgactctctgcattctacaacttatggtgctacttatttaatttctttccagattttagttatttagttaattcaccctaattttaaactaatatacatcagaacaagaaaacataaattacccaaactttacatagataaaaattatgtgtcaagaatatattattcatatacaaataatattcttataaaaaaatatgtataacttttcaataacatattctcccgcggtgtaccgcgggtcaatatctagtcatatatattaaagaatcctaactctctcccacaacttgacacgtcagcatctaacagcttgccacctagatttcataaaataagcaatacataattagtaattaattcaatataacaactacggatatcataagtaacttgaaccatcactctttctacaattttaacaaaccaaaccaaaactgacttctctttaattttgagatccacttaagtggctaaagtgatcataaaatccaaacatgctatacatattcttttcctgaaaattagacgattattatgtaagaaactaaataaatatgcagattaaatatatctaagcttttcgagatttatactaagaaaacaagtaatttgaaagatgtttgaggagttatccttataactaatacgtaagatataagattatgacaagaacttactaaactttccaagaacatcaaattgaatatgattagattgaatatgcatatacatggttaataaagacatgttatatatttagtgtaagaaataaattgtataaaatttcaccgtctcacaatctaaacatataaccaaaaaaacaagaatatataaattaaatgaaaatctagaacaacaataaaaaacaactcaagcacattcgtttttcatatgaactaatatagtttcaaaaacaattacaaatcatatttatgtttcaaaatcgatgcattcaactctactttatatgaacatacattatataaaataatttgtaaatagtaatacataaacccgcatgtagtgcgggtactcatctagtaaatatgaaaattaaaacaagatgacagacagaaacgactcaacctccaagtgtgctctgataccacatgatatgatcctggtgaggaatcaatcccaatttcggcacttggaagatctggagtggatattctcgaaatagagacgacacacgactcaaagacgagatgatggattgaatgacgccacaaaaggatgcggaaaagccttttgataagtcgagaaagatcaaaattcgacatacgaaaatggatccatgatctatttttaagagagagtttttgataaaaagatagataggttctcataagagattacatgagtttataaagagaagaagaagagaagagaaagagacaaatcttggaatatactccaaggttgcctagaaacacaacataataattaaagatagaatttgaatagaaaagaccctttggcttaaaaatgacccttgaacttctattttcgtcactcctcttgaccatcaaattacccacttggtttgggctcttcttgggcttgtaatagacataaaatgacttagacttgatatatattccttgagtccaagttctgaatgttataccatggtttagatcatcaaatgggtgatttgaatgtgaatcatttgcctcattaaaaaccttgtcaagaaaacccattgggacaaaacttgacaagggaaaaagagtacaaatgagacacatgcccatttgatgatcatgtatcaaaaccaatgaggttaagataacatctttcccatactctttctccgttataagtttattttctgcttcaaaatgctcctcaggttcaagctgctcctctgcttcaagctcttccgcggctacaagcgcttgatcaaattccatgttctttgtgctttccatgatcacatcatcctctcccacttgaaaaggatttgacctcaaatccaattcacctacaatgaccacaaccaagtaagaatcattgaaattggaactaacattataaataccttgcaactcaagttcataagcattgtcgcttt

SEQ ID NO: 35331 - DNA, 3849 bp, Arabidopsis thaliana landsberg
caaaagatgaaaaatatattagttaacctaaatcaagagtctatgaaaagtcgggattagtcggccggaaacttaaatattttatgagccggtgacaagtaacaattattctctacatatcgaagcaacacaagccattatccattttatcttaagtcttaaccatacgtacaatatagcaaatgtttgtagccactaaagggttttgaacttgaccgaatacgagatgactctttcttcttagaaacagaggaagagaggaaaagcaaattaaagtggaacactgaaatgttaaaccatctaatcttgaatgtaaatctcaccaaggcatatataaaattatatgttaagtttaggagaatctcacttcactttaaagtgaaatcaaaaggtactcaaattcttctactggcattatttagatgaagacctagaaagaacaaagagatttgcctcacaaggacttagtgtttactgtaaccagaattaaaccaacaaaacgataggagatggtcataatgcagaatgcaaattgaaacaatacaaagtctagaaatcagatgaattcatttaggattttacagactcacaacaaattgtagaaagaaaaaagaaaaaaagactcacaacaaacacaagacaaagcatttaagtttggtaaaagcaaaaggatgactcttacaggtgactaagagatcatcaaaccgaaacggctataggacgcaagaaattatatgacttggggactgtaagaacaacattaagccactcaaccgtcccccaaatttcaccttcaaagtctctgttgagcgcaaccatcgcacaccaaatattcttgttctcactacgaccaggccgctcgaacctatcccaaagaatagcaagtttcccaccaaagttaactaattcaaccatacgattacgattatcattactagcactactgtatcttttcaaatatttcaaacctttcacttctctccacattctagcctctaaatcataccacctatatctagagcaagagtaacaatacatcacattctctatcacgcaccaagagttcgaccatagtaaactcatatactcatctgcagcactccacttacctcgcttcacatcataaatccaatccataaactcagccccagtctttacgtaaatctttcctcccaccacatcgatttttcgaacattatcttccgtcatcaccttaacgtcaggattcgccggtagaggtctccaacactgagtctttacatcgaacatttcgaaccaattgatgcccccagagtcacatcctcccattacataaatcttgtcatccaaaacacatgcggaggcgttttccctcttcatcttcatgttggggacatcgccccacgagcgagtaaaacagtcatatatccatatagctgaagacggaccaaaagcgtcacccatatgttcaccatatattttcgaacccatcgttacggttgaatttgaatatgggagagaatgatcagaaggaaccaaaacacttccacttctcctactgagagtaaaccagcgtgagactggttccgtagcggtaacaaaccgtagacagagataaaggcagcagatctccgtggttccgagttgatatcgcgcgaagtagaggggtttagagtggaggagagaacgaaaggttttgcagacgagggagagtgaacggtaagacgatttaaagagacgtgccaagcagttcaccaggatctcgtcgggaagttgcaagaacaacgacgtctcacatggtaacgacggaagcttcgtttttttctgcggccgctcaacttcttctttggggatcatctttggtggtgatggagacaaaaatcatgaaatggggttcaaatatatagaaatccttctccctgatgtaaagaaagatagtaatgtagtcaaaagaaaaatcaaagggaaaatttatcaagtttccattggaaaagagatatcttactataatctaaattttatttctcaagatatgtacaatagataggcaaactaatagctatattccacgcgctagagtcgcgcgtggatctaacttgcggatggttttctctttcaaatcttctttcttttgatcacaagaggtttactaatagctcaattctagctgcctttatttttaatattaaatttgattaatacaaaagcaagactatatatatcaaaaccttacaataaaactgtgaccagtggagattgaaccaaagataaaaaagctacacaaacctttgaatttcattgaaacaatgctttccagataaaagcatggtcaaaatttacttctagtgttttatcgttctaactagattttgacccgcggtataccgcggggatagtttttttaccaaatttatatattgatgattttttgtatagttgaatcatatgttttgtaattgagtttaattgtataatatgtgatttaagcatgttacgtgggattgcggttgaaatttttagtttattaacggaatattataaaacgtttttgtgtagaatataaatatctttctactcgggatgttgacgaaattgggatgttgaagagtagtgtatatatgttgttttaatgattttttttataaaatatatgttaaggtcttttggattgaattttcgaatgttgtgagattgtttttaaaaaagtgatttttttataaaaatgtggcaaattaaaaaactttagtaaacactatagttcaaaaagtattatttaaattccagagaagatagatattttaaaagaaacaaatttcggattttaagcccaaatcaaattagtattcctaagcccaacaataagacaacacctattttgtttttgcttataaaagatattctgttttgggctggaatcaggccaaatatgcccagcagttaattatttggcccaaacagagacaaaatcccttatcttcctgaaatatgttgtctttacgactgaaggattctcatctgacatcccgaacaatccgctctcttctccgttacaattagataattccgacagtttcttccattggaataagcttctcttgatggaaaaacctgcaagtatatttatacaaaacaaacactcttcatcatcgtactcttgtagattcaagcaaccctccttctcccccttcagctgcacgaagccctcctcctaaatcaggttaatatgaacatcactgcgttatttgatttgtttgtataagatgctgctttgattatgtaattatgttttgtatctgttttttcagtgaaccgtgttcctttttatgattttcttaagcaatctcttttcatagattagtggtttggtttgcattggtcgctcttctgcttaatctatcgcaaccaatagcaaagtaagaggaacagaaattcaacggattctgacactgcatcacacttccgatgcgcatgtaactaaaataagcttaagttaattaaacttctacgcccgtgaaaactttgtcttcagattgctaatgttcaaagcatagacttattttgtgtattttttttttctaatagtaacagccacagaaattcttttctcatgattctgcttcgcaggaaatggagccaaaaatgattgaaattgtcactgaatcaaagtcaatagcgcaagcaatggtggatgcagctatgaaggtatttataatatatctagagacttcagagtcttctaaatacatagacgccaaagtcatacaactcaaatatcttttgtttaaaatatcttccctttgaattgtttctcatatgttattatgtctcttctcatccatcacgaaattgtgaataggaatcaagacaagt

SEQ ID NO: 35332 - DNA, 4427 bp, Arabidopsis thaliana landsberg
gagacttgtactcctctttcagcctctgcgtccatgccgcgacgtctcttggacccgcctttgtcgtcagaagcggtattcgcgttaacgtcgactttgtgttcggatcccatccttccattttcttcgccttcctctactcactgatttgggcgttaattcaaatcctatttgtcgatcggaatcggatgcttccttctgattcctcctctattgactgattgtaaccgaaaaaaatcaaaaaatcaaaaatcatgagatttaggtttaatgttggttttggttgtttcggtttggtttggtttgattatagatttttttttttttgtgctaacatggaaattttttgaatattgttttcttttttcaaattactaagtagtatttcaaaaaaaaaattattttttttttacggcaagtggcattacaatttaaaactaaattattttaatgtatttttcctgtataaactatcaaatttctaaggtttctctctcttctctctttcatttttcattctctcagatttctctgatgtattttttcgttgacttttatctcatttgaggtgggtttgtcgtttggttgtaccagctttctcaacggtatagattggctttgcttccggtgtagatgccttcgtttgcatattcatccggctatgtttctgacatcggtggtttaatcaacattggtggtcggctctggcttcggatttagcggtctctcggtaatgataggctagcttcttctccggaccgtttaggtttggtctcgcttttgttttttctttttccgactatttcgatttttaatgatggaacaaatattttggatagtaagaactttttcaataaaaacaagtatatattttgtgaacaacaaaattttttgaaggttgaaaagttaatatcggttgacataaaaaaaaaaaaaaaattgaaggttgaaaagttgttgattgaagaagaagatgaagaaaatttacagatctacaaaaatggagtcatattctcaacaaagctaaaattgggattttaccttgtttctttaggcaaatatataaatatgtaaattgaatgagatttatgatgtttttggtggaattggagctttctgacgtcgcaacaatctatcggtgactccaacttcttcaacgtgtctttcaacctggttctcaattgacatgtgtttgtactgtatacaactttattttcagtttaaggttcacttaattggacttttgttttctatttttacgtttgtttgtttttaaatatgtgtaaaatcttggcctgttatattggttttatacaataaataaaacacatttctgaccccaaaaaaaaactatcaaatttctaatatacaagtattctaccccgtactacgtacggggacaagttaagattgaggttgatagagagcagtagagattcaatcataattaaagggtttggaaaataaaagtggatcctatactatctaaaagtcctatttatttttctgtttttagataatatttaaattttgtaaagttaactaagaaaaattagcttaaaaaactaacaaattattaacaacaggttgcaatatttgtatttgtttattttgtgcaacaaataattaacaacaaaatacaaatatttgtatttgtttattaacaacaaaatcgttaaactactaataatttgtaatttggaaaacataagtacaataaaatcacaattaatatgagttaaatagcaaatgaatgaatataaagaaaaattaagcgctaacgtgaatagaatttccatagtcgtttctatagcatccacaagagaaaaaaaaatggaagataatagaaaaaatgattaaatagagaaaatcggttaataaaacatgctttgattttagcttgatcgtgaaggggttggtaggagcaaattaagaaatataggattttttacactttttttttttgcatatcaatattggcttgaattttattttttagaaagtttttctttccattactaagcccatattttttggtcaataattaattttgttttttttttaaaaaaatttctgttttgcacgatctcaattttgttttgatttatttttatgaaaattaaattattaaatagaaaatgtatgtggcatgtttttattggtgctttctaatttgttcacatcgcattttcattttcttttaacagtttaacgaaagctgtgttaaaaggtaaaaactgcgtttaaagaaagggcttttggataggtaacagaaaacagccctcattgcaactctagaaagataagacgacaaggtgtttttacgtaaggcagtatttaatggaaagccatccgtgtttcctaggcctgggattacggcaggaaccgagcaaaccgacccgattaaaccgataatttcggttatcggcgaaaaccgaagatactgtaactaaccgttcggcgaatttaattttggtgttcggatttcgggtcgggtcggttcggtaatcggaccgattggtttattaaaatatgcaatcatatataagcttaaccctagtcaataaccctaatttgttttattttgcttcttcactgcctcttgcaaaccaagtgagcccttctccgatctaaaaaacattcttctccaatctattcatcatcacatctcttctccttcatcaattcattatcatctattcatctttatcctctaaaaactcaatcattcatgtctaaatccgtcctcgacgaacttaaacgtaagatttgttcagatttgattattggtgttacttgtttttttttgtagtctcgtgtctttgttctctagatcttaggcttgtgtttatttcaataatttagttgttttctttcttgtttcagtgagaaagcgagaaaccgactcatcaaccttgtttaatgcaatctcgcttaaagctggaataagaaagtttgagatcgccgtggacgagaccgtcatcgtccgagcctcatagtcggagtcgcagccgtcacactacacacagctttttcaaaaccctaaaaatgtttacaagtctgggtttattaattgtgggttgggcttattgattgtatgttgggttttgttaagtgtattgggcttttattttgttgtatttgtaatagaccaatttcttttttaatgtgtaaaccggataaaccgaagaaaaaaaagaatttggttcatattcggaacatattttttaggctataaccgacccgaacaaaccgacgtccgaaccgacccgaaccgaatttcaattcgggtctattcggtgagatttttagaaaaccgaatttccaccaaaccgaataacccgacccgaataacccggtttaaccgaactcccagtgtttcctcttatccagcaattttgtctatgcgtaaattgctctgtcactgtcactgtcggacgatgatctcatatactctctactctcctaaaatgagtctaaatactctcatataatctaacatactcctatactcttaatgaattttaaaaatccttgtttacccttacccaacaaaccggaaccggacggacgaaccaaaccaactaattacggttaagtctccaaaccaatactatttaattcacaaaatattaacctatcagaaattcccagaatttcttttcctccctcacaaaatccaaatcgacgactgcaactatcgtcgaatccttcgacgttgaatccaatcgaccaagctcgtcgtcgttttgcttctgttattcacagtgggctttaccattcttttcttatactttggacatcttaattcatcaagtattgcgttgctgtgtttgaattttgtagatttcaattagatttgatagatttgaaattggtgttggaaattaatggacattatgttggtaactatatattctgggtctattaagacattttaatgtactgtaatggttgattcgtagttaatcttaggcagattactgtttttggtccgaaaatctttgctagaacagaataatctaggtatacctaagaaacgtggtatagctgtgtgaagcactatttatggtataactggtatttctgaaaatgagcgtggtatagctgtttgaagtactatttatggtataactggtatttctgaaaatgagcgtggtatagctgtttgaagtactatttatggtataactggtatttctgaaaatgagcgtggtatacctgtttcaatagtataactggtatttctgaaaatgagcgtggtatagctgttcgaagtacaatttgctagaacaggaaaatctaggtatagctaacattttttttttgttttttttcaggataatgggcataatcatatattttgattatgatggatattatacaaaaaccggagaagcatatcaatggaatccaaaagtagttgg

SEQ ID NO: 35333 - DNA, 4776 bp, Arabidopsis thaliana landsberg
  unsure (1)..(4776): unsure at all n locations
caaaactacttggtaagataactgtaagagtataattcaatttgatgtgtcaataattcaatataatattgttacattttagtagagaatgaatctatgttgagatatatctataaaaaaaaaggacaaaaaagaagctatattactgagccaagaaaagaagaagttaagtctcaatctcttgaaactgtttttgttcccacaaagtaaaagaatcaacagaaatgagtcgggtacgggtccggtttgggacctacgaggcagagacagagtgagaatccgagtcacgaccggagtgatggtcgtggaagccagcctggtctgaattgtaaatgggcctattaggttctgaggcgtagaccgtacggactgttaccatgtgcttttacaccaacaacaacacatttcacaattaatgtattaaaaatattattataataatattaaaatcaaaaccgtaggttatttttttttaggacctatatattattgactttaaaaaaaaattcatttcataacaatagataattggataatttgattttctattatttcatttggaatggacacgtggtggattaatgatggtggttttgtaaagatataaaaaagtaaataaataaaatagcttccctacttaaatgattaaatgaatgtacgttaacgtacgtgttagatttttttcatagcgaaggaaaaatttaagattcgcattggtcgtgtcgattgtgtcaggctaaacgacgacgtattaacgtagatgacaaaggggtccggtcccaatgaaaatatgacatatttttttgaagtgattttgttttgtcaaataagttattggatataaattgcaatttgataaaattatgtaatagatatgacaatttggaatgtatctgttttcttttttagtttatttagatttttaaatatttccatgcttttattcttattttctttgtgtaagattactttctatagtttcatttatagtaagttaaataatttaatattgcatttatagagaatgcattaatatagaatcgcctaaaaaacactaaaaatactcaaatctcaactaaattaataacactaaatattttatgtactaaaaatttactcgacagatcttggtttctagtacatttttgttttttttgttttgtcttgatattagcatgcaaaatcaaaacataaacatgtgttatctccaaatcaaaaacctaactaccattttgtaaattgtaactgcgattctatttacatcttcaaatgtttttttcccttctaatccaattaatatttctttctgtattttatataatatggatcaaattattgttattttcaatagaaataaatcgtggcgtttccaaaataatcagattgtgttgttgttataatagcatcaaaattaatatagaagacagacaatgacagcttgtctttatttctccgtaatcgttacacttacacaaaatttaatttgttttcttactatattaaaaatatattccaagttgaccataaaaataatcaataaacaaaacgagtaattacaaataaaaataaataaacactctctctttctctctttcctcgtcttcttcttcttcttctttttttttcgtaaaaattcttcttcttcttctccgagctccgtccgagcagagaagaagagtaaggtaagttttagagtgcacttgtgtggcactctcatttcttatcctgcgcctcttacgatttcttatggtgcgcttctccgactagtttcggtgtctaatggactcttcctcttcttctctatctctccaagaaaaaatctcttctggttatttctagggtttcgttggttcttttttcgaaatgctttggataacgagatttgctggattattctccgccgcgatggcagtgatcgtgttatctccgtcgcttcagtcatttcctccggcggcggcaatccgttcttctccatcaccgatcttcagaaaagctccagcggtgttcaacaacggcgacgaatgtctctcctccggcggcgtctgcaatccgtcgttggtccacgtggcgatcacgttagacgtagagtacctgcgtggctcaatcgcagccgttaactcgatccttcagcactcggtgtgtccagggagcgtcttcttccacttcatcgccgtctccgaggaaacaaacctgttggagtcgctggtgagatcggttttcccgggactgaaattcaatatttacgattttgcccctgagacagttcgtggtttgatttcttcttccgtgagacaagctctcgagcagcctctgaactacgctagaagctacttagcggatctgctggagccatgtgttaaccgtgtcatatacttggattcggatcttgtcgtcgtcgatgacatcgctaagctttggaaactagcctaggctcgaggataatcggtgcaccagagtattgccacgcaaatttcaccaaatacttcacagatagcttctggtccgatcgaaaactctcgagcgtcttcgattccaagactccttgttacttcaacacaggagtgatggttattgatcttagagcggtggagagaaggagattacacgaaacgtatcgagaaatggatggagattcagagaagagagaggatttacgaactaggctcgcttccaccgtttcttctagttttcgccggtcacgtggctcccatctctcaccggtggaaccagcatgggcttggtggagataacgtgagaggaagctgtagagatttacatcccggtccggttagcttgcttcattggtccggtagtggtaaaccgtggtttcggttagattcgagacggccttgtccacttgatactctttgggcaccttatgatttgtatggacactactctcgctgatgatgattgatgatctctgttattacatattattatagtctcagtctcagctggtaaattctctcatctcctttgacaaaaaaaaaaacattctttcttctctcttttgattttaccaacttttggttggaatttgtttcgttactctgtattctattcgattgttctgtgcatcaaaccataggatacaatcagatttgttgttgtacaaacttttttaccatatgtttctttaatataattctgtcatcttttttacttgaacaaagattacaaattaacagttcgttgaaaagattcaccgacagtctctatttgtttccctcttgaagaacctggtctacaatgatttttatttatgaaatgtttgaaattggaaaaagattttgcttcaagtcggaacaatgatggaaacatggcagaaccaaagtggaagaagaacacgacactttgaagagtacatacgttctagttaaaacatagtgtcggtctctttgcttacttcacttttttttttttttttaatctttttgtttctctagtgcttgactctttttttttttttttttttgatgggatgattatttataataagcttagtttgaattgatatataaccttatgatggtataaaagtaaagaaagcgtcacagttagattgtttttgtcctcctctggttggttcttaaccaaaagtaaagtgctttacacttttaatcagattaaataacacaaattgtatttgaacatttgttacaaggtagtgggagttattgattgattaattgatttcaatattcggtgaggtctttctccgaagcatatatgttccccttttttagaggaaaaaaaaacgaattttattaaaatgaaaaatccttaattattgcgttagtgatacggaaagcttcgtttgattattgggatcatccataatgatagagtgataaattaaatatcataaattttgaaagaaggcaaaaaaaaaagtgggggcaatttttatgatatttctttttaggttgacccaaatgagtattcgaggtgatgtggaatttaatcttttaaataaaataacaataaaactggttatttttttttgggtttctggtaaaaatggatcccacaaaagtgatctcctggcagcacacgtggccaagttgctgtaaccttctcctggaatcagctgcttccatgtgctccgtgtcactctccaagctgtctctcttttgtcttttgtttggttcggttcttaatttttggggtcatcggttcttaatcctcaacgttatcactctttttcatatatcataattttgggcaaatggtcgactgtattaagcctactatagaagaaatcttatataaaatcaaataaactggtacgacatagaaaaccttgttggttcgtttatcttttttgaatcacaaaaaaaaatataagtgcttaatcgtgaaaatttgtgttaaattccaaataacacatatgccactgtttcagactatttatttttaacttcaaaatattaatatctcgcaaggcccataatatcctaaactgacatttccatggtaggtacttgaaatttcattatgctcagaagttaacatatacaaaatttggatactaaaatgaaatcgcaaattttattgttgtagttacatagcctatatagttttaatgaaaacagagaaataaaatatcgtttagtttctgtaacaatatcgtcgactgtaaaaaaacctttaaaaaaagcctctgagcgttcgaatacaaaactacatactaatccaaacacagtgagtagtgtcaatgttgacattgaggattatcccatcgcccctaannatcaacttttatattcttac

SEQ ID NO: 35334 - DNA, 2610 bp, Arabidopsis thaliana landsberg
gtaaaagttggaaccactctaatttctagctctttcgccaatggctgaaagcaagagtttttgagttatgaaataagtaacataaatataaagacacattcagcggaaaaagaagaacaaaccttgttgtcttggttacaatcaagcttaagaaacaccatgtcctgatacttctacgatagctctttgtatttgggagcaatcactttgcaaggaccacaccttgcaaaagccaaacgaggattgaaaaaaaagagaggcacactgatttttctcaacaccaaaacagaacatttaatagtaaactcatctcaagcattcatgatgatggaaattggaacaccttttatgcttatttattaaatgtacatgctctaattctcctgaaagtctcactattcataacttcatatccttttgtatatatcattcctaaccaacaaatgaattcaaaagaatgtgtacagagaagcagcagcctgatactgtgaagattatatatgatacttacaatgctgtaacttttgaatacaattgaaagtaacaaggtgatcatatactaaccctaaactatggaagctacacaatgtgaggttcatagagctaaaaataggccaagagaagcaaaggatatggttagagaccatgatatgattatgttgtagcaagaattggcaattgagaattaaagacatgaggatctgctaaagcaaagttctctggtaaacaacttagcaatgttatatcaactgagaaatccctaatcaaccctaatttccaacgacttatccaaaacctatcaaaaatctaagtacatgaattttccaattctctgaacatgcgacggaatcaagtagttccaaacaagagattgcattcaagtaattccaaaattcgcaccaagaagaagaagaaagtgatcgaaacgttaccactgagcgtgcatgtcgaggacaacattcttatcaccggcgggtttaacaatgggccagaacgtgtccttatcaacctccgtcacctggccaacagtgacattcactgtttctaagctacacctcaccacacaggaaccaatccttctaccggaatctaaaacaccaccaccaccagaacagaatccaattttcgtcgcgacgcccgaattcgggatccggcagtgctgcttcacgggggaaaatcctccggcgccggtagatgtaatcggagaataacggaaagacgtcggagatggagcaagtcggagagagagaggcattgttgaagaagaagctcgagtccaaaaaacagtagtgtgatctttcaaaggaacctgggagacttttgatttccaaattttaattcgagtgttgttttcgttatccgtgaaatattgtagattttcttaccgtgaggtcaataataccctcaaatggataacgaagaaagaagacatttggggatgtttacgtattttcgggttcgatggacgcgaggttcagaattatcggagtgtaaaatgacgatcatacccccacaatgtaaggccaagaattgacgattagtcgattaccattagcaatctgcacactcattttcttttggtttaaacttaaatcaaaatattgatcttaaactgaaatttacaactataaaagccaaatttatataagcctttatttgcataataatataaccaaagtttgataatgctttaaatcttgagatagtcgttgtcaacaggattaaacacatgagaagcctcttgttcaataaacctcaactgtcctttcgtaagatgcaagtaaaccgtccaatctccggagccaccgttttccaccggactcggcattgtcattacgtaaccagctctgctcccgggtgggagatggtacgatccaaaaacaggcgagccccacccgaaatcaatccgggccactggaaaactctttccagacgaaacaacgaaagcgggtccatcgttggatcctgtactgtagatccttgatataactggtatcggacggctagtctcaacccaatcgatcaagttcaagaaatggtctttggtcattgtactctccagtaacttgtgaacctcgtctgtcacccaagacaatggcttgtggatcaagtcatcgattctccgctctccaaatggaactgagaggacgttcccaaagtaattgcagttctcttgctccataagtttcttccttccatcaacaacgatgccaagtttcgaggttttagtcgggagtaccgactctgttgcagcgtgtttagccaagagtttccatagaaacgcactgaaagactcgagtttggtcctcttaccattagtagccagagtttgaaacttttctaagacatctgctttgatgtaatagatacggcttgttaggatattatcttgattagtgatttcttgtggaacggtcaaggacgttataggcatgtacagtttgtctattgaagagtcgatgatcaagggtcgtcgtggctttaagagggatcttttgagcaaaggtacatacgaaatcggtatatcggatcgagatatctcggcccacgagacgaggaacatgttcatggaataagcatctgctatacggtgatcaaatgtgcatccca

SEQ ID NO: 35335 - DNA, 1229 bp, Arabidopsis thaliana landsberg
tatctttgtttagccgacggaaaaatacaaagacgagactaaaatctaatgtttttgacgtttgatatggtctttatgtacatgtatatagggtaaaattttcaattccattgcttggttatgtacagcaactttcatctgaaaggtcatctttccaacaaagcaagcatctagcgcgagcctgaaacaataaagctcaagttataatcgacttaatggtgatactcatataccatgtcctttcactcatcatcagttatgaaaagatgtaacttacattttggttaaacttccagaactgaagaaactagaaagttcacttgaagttcaataggagaacacatcacatcaaagttctgtagattatctttcctaaacaagaaatagagtactagataaacaaaataatgtgcttactcagctatagagattctgtagtcttcagttttagctccatgccatggaacaagcatagttaaccctcagtttgccatcaaatccaaagtttacacataccaaaccagcaccatgtaagcaataagaagacaaattcaaaaggtacttgtgcacaaacagtgataaacaaacaaagacttacattataaagatcaatgactgattcatcagggtttggcgagaaagcactattcacataggcaaacttacaaacaaaagagcaatgtcagaccaagatcatcgcattctaaacgattcataccaatagaggagaagctgtgttttttgttaccaacgaatcagaatgaagctgtcttctaagaaagtcaatcactttggcaaatttatcagtccctggaatctatttacaccaacattcacaacacataatgatcaaaaacttaacaagcaacgtttagcaaacatctacactcaaattcttcatcaaaactaaaagccaccaaattcaacatgagaagatcgattatggaagattaataccttgaacttagattgtttgagtataggagcacctccagtagctcttagatgaacaacaactgtcagagaaacagaaaccctagaaaatatcaaaacgaagtcctacaagaaatcttcaacagatatacgtaattgaatcgatcaattcatagattccgtcgacacgactgccgaatttcatcggagactcacctttccgaacagagctcggggacgacgactccgtcgccattgatggttttcgtaactgaatgaagaagacgttactctga

SEQ ID NO: 35336 - DNA, 3345 bp, Arabidopsis thaliana landsberg
ctcatgaccacattgatggaaaaactaaaacgacaacgaatggattcatcttttaaaaccggtttatataagaagaacaaatatcttgtagaaacagaaacttgtctggtcttttcgaatgtgatttttggttgatgatgatgaggctagttcaagtatcttccactgaatccatttcttctatttccgcttcctcggcccggaatggtggagttctctacttgaagcgtggttctggtaatatcatcgaacaccttgtgtgcttgagattttttaattttcgctttgtgggtaaattgattcttaaggaggaaccagtgcttttgaactcattggttgtatagacaaaattgaaacgcaaatcacatacataacatggataataagttcgcttcttgtcctgtatatgggtttagttgatttcatcggatttttttttttttttttttttttgtgttgtcttgtttctgaatcctgttgatgtttttgaagttcaaagattgtttttttcatcttatgttttgaaaaagattccagggtagttctggggttctagtgtttattagagtagctctgattgtagatttgaagtagtggaatgggtttattaaacttgagtttatgtttgttccaatatgatcctctaacctttgtaacagctgtgtatgtagagcttgaagccgaataaagttgctctcaacagtatgattctctcagctatgaggacttgctcaatctctgggttccatactcatcttccgaagtcaagcggttcagtttcttcgagaaagaggttttcttctactgctttatcactcatcactcaaaccatttcaccatttgctcatccccgttcatcagtaattgtgtcaagccttctctccccatctgatatccctcagaaatctgaagaatggtttgctttaaggaaagacaagttaaccacaagtacattcagtacagcgctggggttttggaaaggaaaccggcgtgccgagctctggcatgaaaaggtttatgattcagatgcacgagttgttgaggagtctgcacggtttgctatgaactggggtgtacaaatggaatcatctgcgatagaaaggtacaaaagaataatgggttgtgaggttggaacaatgggatttgctattcactccaatgaggaatttcactggcttggcgcttcaccggatggaatcctcgattgctttggtattctagaagtgaaatgtccatataacaaagggaaaaccgaaactgtattaccctggaaaaaagtgccctactattacatgcctcagctgcagggtcaaatggagataatggaccgggaatgggtcaacttatactgctggacacgaaatggaagcacggttttccgtgtgatgagagaccgaagctattggagaatcatacatgatgtattaagggagttctggtgggagagtgtgattcctgcaagggaggctttgttgttagggaaagaggatgaggaggtgaaaaagtatgagccaacatctacgcataaacgaaccaagcttgccatagctaaaagcctaaatttggctgcggaatcaaaactagtatgcagagaaattgctgatcatgtcgagttcttttagatgaaataggagaatgatgattcatcttattagatcacgcattgttgtacttatgaaactggttaaatgatgtaacactctttaatcagatttcactctttggagtttagtggttttctatcgtctgtaaattaattggatgtgaaatgattttcattgcaaaaataggtgaagacagctaaaagacaaaaggttgattctttgtgccaactaagcagatgaccaaaaacagagaggaatgcagaaatagaggagttggttaccaaaaaacatgagaaaaactgataactaataaactcaaacaaaggacaatgaacaagaagaggaaaactacaaatagataattgaagatgttcctctaagttagttgttgtttagttttaaacatctgcaagaagagaagatggattcagggccgtcgtgggctgatcaatgggattacaataaccctgaccctctaccgagttcgacgaaagaggatgagagcaaaaagaagaacaagaagaagaaggaagaagatggaagcaaaagcagtcttgggaagacattacttgggttcaaatggatgaaggagctccgcaagaaatctgaaaagtgattagtaaagagattttttattacatttgattcttgttattctttgtaattaatccattctttctcagtttcttgtctccatttctttagttttagtgtttaactattaaccgattcatcaaagcaaaagaattcaggcaatgcaaacgagaaattaaccaaaatcttaaatgggtcaagacaactaaaacttgatgaatcaaaaaagaaaaagaacaatggaaattttggggctaagtactctttgtttttgttttctcagaacagatgaaacaatcttaaagggttgtttcgttcatcttctagacttcttttttgaggccttagaggaaggcgcaggtgcattccctttagaactggccgcttggtttgactttgaagttgaaggagctgcttcttgtttatccttggtcaccgcaccctgcgagccacggatttgagctgctcgcttgtccttcctcttgggtttgtaacttgacctttcccttctgggaagccacctttcagggtctgggggtggacctgggtttgccggatcaaatcctttgggatactttggctttctcttcctcttcctcttcgccttttctttcttcacttcttcctgactcgatgaagcagcagcgccttcaatgggttttgcaccataggtcttttctagtttatccacatcaacagccttcaaacctggtaggggcttaagctgtttctcataactttctgctttctcaacattgacacgagcaagtgtagtcacaagaccaaccagagcatctgtgctattgtggtttttcacaatttcctcgtatagccgtgaagcctcctcttcttgaccatgccttagcttgaaggcagcagcctctggcatcaataccctaagcttactgctctcggtcatcgaatttgaccaccatttaattgctgagtcaagaacagcagcagcaccatcattgtctccagcacgctctttgagggcgacaatggtggcaacagttgcaggcaaatgctgaatatcaggtattttggatagggactctgctgctacatgaggatgactggcagaagcagcaatttgtgccctggccaagagaaccaacttagacttttccgggaatttttcggcaca

SEQ ID NO: 35337 - DNA, 904 bp, Arabidopsis thaliana landsberg
cttgaggtgaattcaattttattggtttgtgaaaacatgtttaaatatgaccatgttttcttttcttttttttttttgatccaactgaaaacctcattgctagaaaataaagggttcatacatcaaaagaaaccaacgaaaacaaagcctccttggctaaagcatccgccgagagatttgctaaacgcgaaatacaacagaacttgaaagatacaaatgaatgacacaaacaggagatgtcgtgaagaattccctgaagctcattcgtggaggtctctgtagtgagcagagatatgaggacttgagagtccgagtaaactgtgatggaggttaagtccattcgcaacgcttcattcaacgccgcttttaccgcaagtgcttcagccgctagggccgaaggggtatgtagtcgagatgacgagccctgatggataactctttgattatgagtcttgaagatccatcccataccgcatgagcccgaggacgcattccaagccgcatccgtgaaacataaaacagcctcacactgagggaaagcaaaagaaggagacagaacctcaatacaaggtatgatggtggtactaacctcagtacgaggtaaggcggggggagacacctcactaagaggtaatggttgactgctgctgctaggaggaggtttacactccacgtgcgcacactgccagtcccttgcagctccgagaaccttagccaaagtatccgtttccaagatagtcctgttctcaaacaccaagaggttgcgagccttccacaggtcccaaaaaatccagtgctggatcgaggtgtgagaaattccggatggtggtaaacagagagcaacacgagccgacgatagcagagcagccagagactcaatcctgtctgctcttggacttcgcaa

SEQ ID NO: 35338 - DNA, 1034 bp, Arabidopsis thaliana landsberg
acatgacatacttaaaaattaatgtctgaataaataatgttgggcccgtaatataccacatattacggaaagacccgaaaattacttaaaattaagaagttggagtaaaattaacaacaatggtagctcaacccatttttttgattcttttatcggagggctttctttgggctttccgaaaacgtattacatgcaaagtttggcctcatggtgtcaaagtaatagagtcatataatcttaaccaaataaaagaaaagggatgcaacatgaggacttcccgagaagtcacccatcatagtagaactctcgtttaagcacgcttagctgcgactttctgatgcgacgttttgatcgcatatgttggttcatgcactgcaatcgtatttatccttttttgaagactctatgaaccatttgcagttggtcccacccgctacatatggataccccaactagttttaacgagttttgatacatgaaaatattcaaaaacaatatccgaacaaataatttagggcgggtaatataccacagatcacggacagacccaaaaaaagtacctaaaggtacaaatttggagtaaaaaaaagaacaatggtacctcgacccattggcctgcttctttcatcggagggatctctttggggtttgcaaaagggtatcacatgccaagtttggcctcatggtctaaacgatatagagtcatatcgtgttaaccggaaaaaaaaatgagggatgcaacacgaggacttcctgagaggtcacccatcctagtaatactctcgcccaagaacacttagctgcagagttctgatgggctcgtaatataccacagatcacggacacaccccaaacagtacctaaaggtcaaaatttggagaaaaaaaaaatagatgtaccttgacccattgtcctgcttctttggttggaaggatctctttgagctttccaaacggtatcacatggcaagtttggcctcatggtctaaaggttataaagtctcaaagttttaatcaaaaagaaaagaaaagagg

SEQ ID NO: 35339 - DNA, 4261 bp, Arabidopsis thaliana landsberg
  unsure (1)..(4261): unsure at all n locations
tttgcatggtttgcgggatttacctgaccacgaggaccagaatgtttccttgcccatgtatgttgttgctggtaagtcttcccattgcaatctctgtatctcttgtgccttccattgatcgttggtttatgtttgcagatccaattactacgtattcatcatcaactaccatccctttcgagtgaacatagaccataaatcttctgcttttccgactcaacgcctgcaacaccaccgggactcctcgtttcaaaaacatgagaaatttaagcagcaggcattctcggcgtttagttacctgaggagtgtttgcattgcttggactcccggttcctgagttatctattccatccaccatttctctgttcccaagacagaagaaattgagataatcttgtggggagaatgctccttcaagccctgtctccactaacgccttgtagattgtctcatacatcatctgcattgtcttgtgctgcaacgatgataacactgactatcagtttcataatctccatatacccagacagaactcatgtaagaaacatgaatcttacatgcatatatcttacttccaaaaaatcgttcaaccatattggtgatctatgaacattgaaatcaatattatctctactagtctctactttagttttgtgattttgatttgagaaacggaaggaagattttggctaagacaacaacccataagttttaactcagacatacctgccaataaagaatcctctgggtagcagcgccggttggaacaccttccggccacattggaatgacaatataagcagcaaaccgttcattcgccctgatcttttcagctatcttcaacgcaatttccataggaatcaaattattcgcacctacacaccaacgttttatagcaatgttaagagccaaagcaactcgcatcgaatgccaaataaaaaaatcggagactgacatcctaaagctagcataaagtgaagaagtaggaggtcgtggtcaagaataatttcatagatgtcataacatgtgacacagttcaagatatatagaaaaaaactcctgatgtcttcatccttaagtttaactataggaacaaacttaagtttcttaaattcttgaaattaacaagcagagacatatgaccaaacctatgtccttatgcgcattccagttgtatgaagacccaatgaaatactgattctcaatatagatgaagtgttgggctgcacgaatggctttgacatacgctgtgtgtatgctcatatcaatcagcacgttcttcccacacaccaagttctatccaaaacaaaaacctttcgtggattagttttctgacatgttttagacacccaaacataatgatagctaaagattcctttcattttttgtcaccttgcatgtagcatcttttggatcctttgggaaacctttcacagagtttgaatcgattgaacggaaaatctgtatcaaaccagaaaaacatcagcttagcttgcacctgataaatcatggcttcataaaatactcaacctctccggtcattcagtaacagttttgatgttcatacctgaacatgccaagcctcaggatcgttctcactaacagtaggagtatcagaaactcctaatatatctggaatcctatcaatccttaacaacgcatcgtcataggaagtcttaaacttcttgatcccgctaggctttgcagccttcaaccatctctcttcgaagttggtcagaacatcatatgcagccgggccatcaatcttactgtgcaagtcatgccaaggttctcttggtccatcatccgcagtagtctaataagaaaaacagattttacatggatcaagaatagcggattctaattccaaaactgcaaccaaggaggatttttcttaaatggttaccacaaaatttgggttatggaagtcatctttatggagtgtctttaatgtcctgaagagaggatgcnnnnnnnnnnnnnnnnnnnnnnnnnncaaatctagccctccaacaaatgctacgatctttcttcggttctgagctgcttcagcgtctacaatcacagttttttgatgatgcgtgtagattgttccaacttcctgatcatcataatgacactcaaatttcagatgatgaaactatacacacgggagtttaagcagtaagcagtaactaatgagcatcttacagatttttttatgaagctgtgacctttccccccagatctgggacaaaggagaacttgcaccgacgaatgcttgaaaaaacggcgagtctcctcatcgcttgtgttcataactccttgctacaacaaaataaaagctttcattaaaacgatagaaggatcattgcttcagttagtacagacatgtaaaacgatctaactgaagcaaactcatgctttccaacaagatagacagaaaaagggtcagatctgaacaaatatacgaaagtatgaaatgcaactgaaacaacaaaatatgtgactatgtgagaagttaagaacaaccaaatattagaccattcaaaattgtgtacaaacagagaggcactccatagaattatttaagtgataagctataaatcaaaatggagaaacaaaacagagaggcactccataaaattatatatatatatatgtttgattttatgggtaaacaataatagaatgtcttaatcagaaaaaaacagagttatgtagattcatactgtactgaatcccaaaagactccttgaagttggatcatcccacaccaaaaccaacactctaacaccttcttgagatttgactttaagcaactctactaacgtaccttgggtcggatcattgttaccacgaaccagcctaaccggatggaaaactgaccaacctgtgatataaatcaacctccttgcccgtcgtatcgcatcagccatatcctcccagcattttccatgtctatactgaatctcaccatcaagatgtacactcggaagagtaccgtcatcgacatgagcatcctgataaagagtaaccctaccgcctttcctcaaagggaagtatgtaccgggaactcctacacactcaacaccagaaccaacacccttttggtaaagtctcattctttccattggagtatactgaatagacagactcaacatagcaccttttctacaaggcttcccactactgttaagtatcggaaacagcccttcgattctattcccggaacacaactgcttggttggtattccaacaactcctatgatctttgatccaataggatcattgtctttcacaacaaaatgtacttcagcagcactatgagcaacgggtacatcgaaatgctgcatccacacaggattctcactattgctaataacaaaagttctaccaatgacagcaccagagatagagacagtaacataaggatcacttgtgaacttagaagacttctcaccatccactttacgaatcctccgacctaactcagaaaacgaaatcccaccaacaagcttgttacggtaacatatcatgttaggaagatgtttagcttccttaacccaaatgtctaagttaccatgtaacaattcaaccatcaaagagccactactcgtagctaacggaacgagttgctggtcaagccactggccaaactcgtggtttgaccctcctcccattgacatagtctcgttataaactggatgatacaaaatcaaaaacctccaaagcaggaaacttttagttgccagatcaaatttcaagcataaccaagttcagtgagacaaaagatcgatcacttggtgcttggtggggactaatcgagagatcaagattcaacaaaaggataaaactttgagataatacaaactcagatcaaatctatatgaataaatgtggatctaaaaatatgggcaaaaaatttaaagttcagatttttgtgaagaagaagaagaaggtaggaggaagcgaaggaaaacgttgacttgcaacggaagaatcggaaaaatttaaagattttggatgccgttgttgaatcgtttaactttagccattaataacacaaatttaagatctttaatcattaattaaagaacttaattaaacacaaatgccgaataaacaatttgtgttttagtaacgacgactaagaaagaagacttgcccactttggtttttggctgctcacaaagctctttctctctggcccttttttgatgcaacttcattttgattggtgatattactatttttatatatcaacaagaaattaaacatt

SEQ ID NO: 35340 - DNA, 16838 bp, Arabidopsis thaliana landsberg
  unsure (1)..(16838): unsure at all n locations
gcctgagctatggtatttgtggatgagtttgttttatgttatggctgagttattgaatgcttacggctgatttatggttatacagatgtctgaagaccaagcaagggattaccctccaagactttacccagaggaggattctaatctggagagtaaaggcattaatcacaacataaagctgggagatttccctgcaattagagaatcaataggaaaagatatatgggaagaactgaaagagacaccgcttggattaattgctaagcttgttgatagtcattttgtatggtctggtaagactgtacattatctactatgtagacagctgagaatactgaagaaggagctttgatgtatcgtggctggtcaacccatccagtttggattgaacgaatttcaacatatcacgggtttaaatacagatcaactacctacataaaannnnnnnnnnnnnnnnnnnnnnnnaacgttcttcagggaattgcgtgtgccaaccggtgaaggtcctattctagatgaacttaggcaaggcttagtaatgtgtagagcatgacctcctgaaaagcgtagatggtttgggttattgactcttctatccattggactttatggcttgcatactaactctaggataccatttgagagtgccaaaagagttttcgatgacgaagccatgaagacttattcatggggttgggcagcatttgaagcccttgtcgtttctataaagttgctgaggcctattggcaagacgtacaccgttagtggtatggctttcgtgttgcaggcttgggcgtatgattcaattatcaccatcggcgagcattttgggaacgtagttaaagcggatgagattccgttgcttagatggggaggcaacagtactcgtgcaataatagaatcggccattgctgaagataagtgaatggtggtgaggtacggttttggctctgttatgatagttattgactgagttatgttctgtttttttatcaaatatttatgttacggttgagttatgctctcttatgattgagttaatgttctgtttttttgtcaagtatgttatgtgacggctgagttatgatcagtgaaggctgagttatgttctcttttttggcaaatatgttatatgacggctgagtatgttatgtaatggctgagttatgttatgtgatggctgagttatgttctgtaatggctgagttatgtgctgtgacgcctgagttatactatggctgagttaaacatactgatgagttttattatctcttgtgttgtagctgtgtgtgcgtaaaatggttccaaaggctgagttaagcgagctaattcatacttggccaaacgaattagaagacctagcacttgatcacttgatcgaagacatacacgaggctaagtttgttaaaggttattgggatgtgaagacgaatgagaagaagaagaaactcgttaaagataaagatgcggatgtgtctgaatctcccgcaaagaagcaaaaagtctctcacagtgagggtgttcattctggtggaggagatgcacaaaagaagaaagaagaataagaagaaggaagtagctgtcgaatcagatgagtacgaggacaagcaggatgttcggggagaacgtcgttcgtggatgtggtttccaacttaatctctcccttaaactcaaggtttgacaccgctgataaaagcatcaaagaaatgtcctcctgtctggaggtgattggagatcaagtagaagagaggattgatgcaaagtttgaaagaaggtttggatctattgagaatgaggtcaaacagatgaaagagcatctgaaggtcattggggtaagcctaattggccaaactggcatagcatactcaacattaaactctagagtggttattagagaaatgttttcaacccaagaggagcaaggccaccctaaaccccaaactcaacagacaccaaaagttccacggaaacctacaaataaccaatatgttaatagtcctcctctggtaagctaatggctgagttattactttttatttagttatggctgagttatcttcatattataaggctgagttataacttttatttagttacggctgagttatcttcatattatacggctgagttataaattttagttagttatggttgagttatttgaatattatacggctgagttataaattttagttagttatagctgagttatcttcatattatacggctgagttataaatgttagttagatatggctgagttatcttcatattatatggctgagtttagttagttatggctgagttatcttcatattatacggctgagttataatttttagttagttatgactgagttatatttatacataggtatgagttttcgttatttaacgcctgagttttcgttacgtttatgcagtcgaaacaagctgtaatggtagagaatgatgctgatattgctgaggttggggtaagtaggaatcttgaaggagaatttgctaaggcctccatcgtgtctgattatgatttcattgagacttctcctctcaaccgccgtttacgctctacgacggcagcggggaaaatatccaaagcgaagccaccaccaaagcagaaaaaggagaaaacattaaatgagctaatcgagaaaccgccagagagaagaagaagaaaggctgctgcaaaggagcctaaaaaggtgcctccaaaggtgccaaagattacaattaaaaacccaaaatcatctgaggaagctaaggaaaaatttgaggaagccaaggacatgattctatacttgatgtcactgatcaggttgtatctgagtataatcaaatggtttctgagtctgatgaagatgaggaggaaaccgagaggctgcagagagtaaaagatgcgaggataaaaactgttaagctagccccggatgggaggtcattgattaaacccgatctaatgagcactaacagttttccagtcattggagacaacgggctgagctgcatgaggaagggttgtctgccttcacgagcaatctatgatcctctggcaccggttgatccggccaaactgcagaatcttaaggcttatttgacaagtcccgaatggtatggccctttatacattactaagttgataaatacgacatgcttacactatttgtttatattaactttctttactatttgttagcaaacaacctttggaatatgggatggacaaggtgctgttctactctgttatcatggccgaaagaaaggactggccagacccgaaacatggatggctgggtgatgatgtaagttattgttatattctgtctgagtttggctaatgttatggctgagttatcgtgtcgttctgtctgagttaaagtagataatggctgacttacgatgtaagttattgttatattctgtctgagtttgtctaaggttatggctgagttatcgtgtcgttctgtctgagttaagttagctaatggcagatttatttaggtgtaaggctgagttttacttggttacggctaagttaatgttgtgttttgtcttggttttatttttgtccagcacattgctgcgtatgtgaaaatcctcaccatgaggctcctgcgagatcccaccccatactacagcgaacgcatcatgattctagacccgtggttcacgtcaatgtggactagggattacacacagtggacgatgaagccgagagggtttctttcataggttctacgtatgaaacttgggtcagcggtacgggtggagaagacccgacagacaagaagtcgataacagatgtggatctcaagtatactatcctccaaaccggaggtaatcattgggtgaccatacacgtggacttgcctaggggtcacgtgcactgcatatgattgcatcgtcggatgtcatacaaaggaaagcgatggaaaaatcctggaacactgtaggccgttctcgaggatgattccacagatcatgagcgaaattatccctcccgaagtccgtgtcccgcaatacgaccaattttcattccagcggagggaccttaaaaaggtaccgcagaatactatcaccggggactgcggcgtttacacgttaaagattcttgaatgtttattgcttggtgtttcttttgatggcattactgattcaaatatccaggggctacaggttaggatggcaacagagatctacgatgaactacctcacagaattcccattcggttttatgagacatgatttgctttttcgaacatgtctgtgtcttttgggatttttagcatgtgattgtactaaatattgacactttaggattgataaccagaattatgtctgtatgaatctattgttatgttaattataacaaaaactaatgtaatggctgacttatcatcgctcgattcgttttacggctgatatatgctaacgtgaaggctgacttatcattgctcaaatcgtgctacacggctgagttattgttgtttaattcgatgtttagctgagttattataacgcggtggctgacttgtcatcagacaaatcgtttgttggctgagtttgtataacgtggtggttgacttgtcaaacccaaacttccctcccatcaaataaaccagacgtgactttaggactatagatacaccggtttacgacacccgaatagtcaagtatccaaacgtcgttataggaccaaacgtcgttacgttagaggaccaaacgtcgttaggttagaggacccaacgtcgttagaggactatatatacactggtttcctcttgtcttttcacttgtcaattcttagcaactacaactcttcattcttctcttgtcctttctctgagaaagaaaaccattccgagatcatggatgcatccggttcaggttcaggttcaaacaagcggcagtgtgtggatgacggtcccaacaaggggccgtctgtggatgacagccccaccctaaagctgtatgaacaggagaagcgtttcaaatgcgtcatctcttacatcaggagcaacataagggagacggaggaagcacacttgctcgatatcaaactgcatgagaaggaagcggaacttaaggtcttaaggaaagtggagaaattgggggacggatttaacgtgaaatacgagatagagaaagtgctggcgcaggttggcaaggcctacagagcgcagcgtgaacgcccggtgagtagtattgattgggacaaactggggtatggatcgaccggccgtccaaattcggagtctgattaagaatgaagatggcgattgatgtgattgtatcttcattttttattttcaattatattatatgtatgttgttggattccagtactccttatcctatgttatcataaactctgtcttttcaatttttaaactttaatttttattttatactcgcgtgtgtgattcacaaaactctgtctttcagatttatcgtagattaacttgatgtttggctgagttaaacatgtgactcaatcattgttattctaacgttaaggcggacttatcgtagattaacttgatgtatggttgagtgaatctaacgttacggctgagttattatattttaattcaacgttggttgagatagtattgagttgtggatgagttagtctaacgtaacggccgagttattataaatttaatccgattgtacgttgtggctgagttataatcgcacaattcgctgacttaatgataattgacagtacaaagaagttcaaattgagaaaaacagattaagctaagatcacagatacttgttcaggctctcatacttcttctctaacgattcaaacttcttttccataagaaagatctttttcgtttgagactcgacgcgcttattggctgcttccagatccttcttcatctcagttgtctcctcttttatcatgtcaaactcgtcacacaatgcaacagtccaccatctcttgaaaccgcatccttgaccgggacccttataaaaaaccaggaggttgattcatagggatacaaaataaaataaataaaataaagaacattaactcaagaaaagatgcttacatctgatatttcgtgcggacaactgaaaaaaagttttccggttgtaacaggatcaagagaagtggcaacgacaaccttagcattgcaatcacactcgatcggaacgcccttatcgcgcctcctgttttcgccgtacctcgttcgcatccttatttccatacggtcgagctcctacattaacacaaacatgatgtactcgacgttagatgggcaacgatttgtactattcagatgtggagataaatacctcatcaacactagattcgccttggaaaagagacctctgagccatcatcttcactgcaattagtatgttactaaagcactggttctatatagtcctgtctgccacaaaatgtactaatcaaacgacggcgtatttgtattggctgaataaatttcgttgtggctgacttgtcatatcattgcggctgagttttcactgatttgtggctgagttatgtcgtcatacagtatgtcactacttagcgtgttgctttgggttggatttatcgagattatttattatatcattatcgagataacaaacaacaactttatggggaaccgccagtaatgatttggtccacatgcacaggtacacacgcccgcagttaatattcaaaataatgcaaacgagttcgaaattattccttaactaaaccctccaataatcaaataacgttacggctgagttattcattaagatttcgtgttttggccgagttatgagataccatatgttattatgatatatcaaaccagccaccaaattgttggttatattattagcttgaagatgtgcaatttgaaaacagaaaataacttttattttcagcaagtgtcgattgacaaaacatggtctgtcaaaacctctaggaagtatgttgttggatatagtatgatgttggacaaagtaggatgttggataaagtttataggatatgacctagtttcacggttccactatttggaatgtggttatgatatgttaattacttgattttcacaactgttggctcaagaaaagcaatttcagggtttggccgagttataacaaagtgatggctgagttatgcctttattgtggctgagttatgttagaagatttcgattgttcgaactatataagagaaaaccaaatgttattatgagatttgaatacaagcattattgttggttcgatcgatgtcatcaaatcagtcagaatattgctgtgttttgcttttgcggagtttatcgagaaacaattattatgttattctcgaaattaaaaaaaaaaagagttaatagggaaccgcgaataatgattggtttcatagatgcacgaacacgtcaatattccaaataattcaaccgagttcgaaattattccttaactaaaccctccaataatcaaattttctgtttcgacgtggaataaaataacattacgactgaattatgcaataagattcgtgttttggccgagttatgagataccatatgttattatgatatatcaaaccagccaccaaattgttggttatattagtagcgtgaagatgtgcaatttgaaaacagaaaataacttttagtttcagcaagtgtcaattgacaaaacatggtctatcaaaacctctaggaagtatgttgttggatatagtatgatgttggacaaagtaggctgttggataaagtttataggatatgatctactttcacggttccactatttgaaatgtggttatgatatgttaattacttgattttcacaactgttggctcaagaaaaacactttcagggtttggccgagttataacaaagtaatggctgagaaattgggttagggtggctgagttatgttagaaagttctcaaaaaatattctccgctacgtcagatacgacgtcggtttgttacagagtctccgttattgaccagatacgtcgtcgttgtgacaaaaaccaaatgaacatggacacacttataaatccccaaaacgaaaccctaagttataaaattccaatttctgatttcagatccggagctccttcttgcttttcgtctccgaatttcccagctaaaaattaaagaaatgagtagcaattccgagaactcgattgcgagtacgcaatccgtcagccgttggggacgtgggttaccatcgaagtgtcattgcggattagacgtggtcatctatacatcgtcgtcagcaaagaaccctggaagaccatacttccgttgtcctacacgtttagatgtaagtatataattgatttgagggttttattggtttcgttgttaatcgtggatgtgattgaatatacaggaccatttgtttaaatgggtcaaaaatggtacatacgaagtggttgtagacagttggccgaaattggccggcttcgacagtgagttaagcgcggccaagtccgaggtttctgtcgagctagaagcgttacagtcgatggtgaaagaactgaaggaagaagtgatgaggagcgaaagggaaaaccagaaatggaaattgatgatcaaactttgctgcttttgtcttgcctttattatcattgtcattgtttttgctatcttaatgttcccaaaaatcaacgaacaaaggctttttctgggctactagtttgtcttatgtttgtatgaattgtttgctactggaatctattatgtgtttgatgtttatctcagcgtatagggttaattcgtttttttggttcaagtagtagcttgcaatgaaatggaactttgtcttcggccaagctaatccaatatcgttgactgagttatactggtaatgttgtggctgagttaatcatacgatatggctgagttaatatctgttgtgtcttcgaaaatataggttacgactgagttattataatgttatgaatgagttaattatacgctatgactgagttaatcatacgctatgactgagttatgataaaatttaacaagtaacctcaagcgataaacactgactttactgagaaggcgaaggcgatcgtagataatatgagatacaaagccatcacaaaaaaaaaaaaaaacagagaaacatattgagttcataggaatgagataaagggacgacaagtaagagacactaaagcattcaagacatgaaaccgacatcatccgggccaaattcagtaaacatgtccaccaaatcattccaaactgttgtcgtcatccacctcggcttatccaaaccacgcgcccatccccgtttcagcacccgcatattgtcccggtacaacgttctagccaccaaattaaactgcgtccacaccgtcagcgtgtgccttgaatcccaggtgtgcatacgctacaaagagagcaaatagtaagaatttggtctacggtttacaggaagtgctttatataaaaactcgatgcttaccgtgaggaggaaaaaccaccttgccttgaaaacaacgggaatcatccggtacgtcggccacgcatggtgaaagttgcgctggagtatatcaccaattgcgacagctagttggtgattgaatttgaaccacataacagtggttttgtcgacccatgtacccaatccacgatcaggagcggtgagcacggcttcgacatctcttagaaactgttcgtcgatgtgaggcaccatgtcgttaagatgtgaggatgagacgtctaaatgatgagttcaagtaactgatttatagaaaagaaaagacaggtagaggaatgcgaaaggttccgtgtctgttcgtttggccggaaaaatttccgtactacggctgagtttggcggcaaaatatattgttacggctgagttatacccaagacatgtaactattatacggctgagttgtcaagaattattaaaaaggacaggtaaaggaatgcgaaaggttccttgtttggcgggaaaatattccgtgctacggctgtgtttggcggcaaaatatattcgttacggctgagttacactcaagacatgtaacaatgttacggcagagttgtcaagaattattaaaaaagacaagtcaaggaatatgaaaggttgcgtgttacggctgagtttggcgataaatcgtccttgttatggctgatttaaacaacattacggctgagttgtcaataaaaacatgaagttcaattcgatttactgactaaccgaggtacggttatctccggcccaattaccagcgttttaatacgcctataaaatcggcttctcccataaacaccagaaggctaaactcgcacaaacagaagctaacgagttcaaaatatttctttaattttcaacgactcggaatttcaccatgggttacgacggcctccgcgacttgaatccttgcataacttgctggacgatttgtgttatggttcttaggaagtacgtctcgtttatcacaaataactcattcaaactacgggtcgtctttgtcgatgagtgggtaatgggatcttcactcgtgatacaaggcatacttaaccttctgcgtgtcttattccctatatgactcaccctccgattttgttttcatagggtatccaaattgaagctataatcggaagtcggttttctcaacgttactacgacatgcttgaagagaattagtggaaagaaatcagaacttttggtgttatcgaaaactggggttttgtccgaacaacaacccacaaatacatgattgagttcatgaatgcaactgaggtaactcattccgacccaagggaaactgtattatttaacagattcacaccttttgactacattattgaagacaccggtgatactgaaaatttggtcggtaagtaatacgtatctaatgcaaatttcatactttcacaaatcacatgcctgtttttaatctttatttcatactcccagatttggttggtgcactcgtcgaggtcggatgtctgagaaatattacagaagatggttgggagatggacggattcagacttaccttccagattatggacaaatagtataatttcttttgtttctttacttctaaatttctttcttttcatcatgtatttttcttgagttagcttaattgtaagactgttttatatgtttcagtaaggagaggttgaaatgtgaggcctctggcgaattggcggttgacttgcataggaaatttcgatattttcgcaatgacagtattgttattgacaatatatatgtagcactcacctggtggaagatctgcaggtatcatcctggccccaatcacgtgaagatccaaaatcatgccgggatatcagatgtcactgtcgaccccaatatcgaagaagtgcaagagttaaaaatggtcctcgagtaatggaagatggaaggaatcgggttattaccattgtttacttttcattcctcctatgtatccttcaaacaactatttatgggaacttcattttgtctttgccttcaaaattaagtttgataactcagccgtaccataattaaataactcagacactaaataacataatacgaatataactcagtcgtaagttaacatagtttatcgataactcagccgtaacaggtaaaatgaactcaactcggccgtaacatgtaaaatgaccggaccttttgactttcctaattatataactcggccataacatgtaaaatgaccgaacctttcgactgtcctaattatataactcggccataacatgtaaaatgaccgaaatacataccactgttgccaaacaagggaaagtagacacatacagagtacaaacagtactatgcacggcaagttttaacattgtgccctgtttctttacatcgagaacatgcgtgttccttcctagggcgtttagtctcaacggcgacttctagtgctgatttcatccttagtttcttgggcctgcctggctggttcgcaacaatcggaggcaaacacggttggtcaattacaatttgaggaacagggacttctgtatctgaaggcatgattgcaccagcgtacgcattgaccaaatgactgctcttataataaggactgcacagggatatacgagacacacccatatgctctgcagctgcgattgcatggatgcatggtaatttctctttgtcgaaaagacggcatgtgcattgtttttcatccacattaacaacatgcaaagatgctccataagctacttgaacgcgggaagcatcaatcgtttgtacatccagtagtcttgacgagttgacgcgggtctattaaagagaagagacaagaaacaaaacaaaaaagttatgactgagttattctctttatggctgagttattctcgttatggctgagttattctcgttatgacggggttatcgttattcgacgactgagttatgcactagttacagctgagttacctgtaagagtttctcaacaccacgtgtgagctgagtatgctgtttgctcgcatcatctctccgttcagcaaaccatctagtcatcatctgtcttatcgcttctaacagtcgaactatgggaagatttctggcttgtgacagtgctctgttcattgattccgctatattcgtagtcattaaattgtatctatcaccggggaaatgagcacgcgcccacatttcaatacccgctctttggaggtatgcatgtagtagaggatcaagctcttcaatctcgttgaacgcgttagtaaaatcattcagcctataacaccttgctgcttttttcaccagagggaacaaatcttttcttttgaattttaccaaaatgttcttatagagatggtaagtacaaatcccacgagcagccaacagatacacttcaccaattgctttccctattgacttatgtcagtccgagattatcgccaggtccgttgcatcaggaataacaactttgagttgcgtaagaaaccaacgccaagaatcatcattttcagtgtcaactacaccgaaagctaacggaaaaatctgaaaattaccatcctgagcaagggctgtcaagagcgaccctttgtaactaccatggagaaaggtaccgtcgacaacaacaactctacgcatgtaatgaaacccagcgatactggcaccaaatgcaatgaatatatagttgaatcttccactctcatcaatttgaagacgcgcgactgtacccggatttgcccgtcttatcatgtataggtaagaaggcagttcttcaaaactactatcagaggttcccagagtgagctcccttgcaaacctgagcgtcttgtatgactttgaataactcatctgttaacacaaacatattaggtgataagtcagcctaaactataccacaactcagccaacaagtgatcttaagtcagccttgaaagtcataactcccccagaatgtaattatatgtcagcctatatcaataggtcaaccgtaaaatatatatatgtcagccagcagctaaatagtaagtcatgccgaaacattgtaattacctttgctcgaaaattcttagtgatgcttatttcgactgtttttggtttaacatccggaccaacgtcaccaagatagtccctgtaaagaattcccagtacatcatgtgttgcttgtcgggatcgattagaatgttgcgtcacagaacatgtgtgttccgaatcgtatatacggacataaaaataaggctcatccccttgtgtagatgcatgaactctccagcgacatctatcaacccaggactcgtaattcactgtagtcgtattagatagttgtacatcaaaatcaaatccatcccttatcgcaagaagtttgagtcgatgctccaactcgaatttgctactgtatcgctggcctgccgcgagtgttagcgtagacagctccaaccttaaatcagtcgagctcccaacagatccaatcatttcaatgttttgaatttgagttctcttctttggaggaagttttggtcaatcttcgtttttattctgaggctcgccgtatacagcaaagttatcatcatcagattgagaaggcaccattttagagtgagaggattttcagatagtgtataggggtagaaatatttcctatgaccctattattatacattatttggaatgatcaattacaaatgttggaaaaataccgagggtgtcgatccagtatgcgagttctcctttgtttactctctaaaaagaataagtctggggaagagaaagaacaccaaagaaagaaaaaaaaaaaaaggtcgatttgtcatggtatagtagatgaatgagtctagaaggatcttgagtgttagcttgtttgatgagacccagcgatgaaagcctagtggatatagttgtggaacttaggtatggaatctagaatgttgtgtaagcttgtagagaagtacatgttggttaggatttgattagacttgctaggcatgtggatttagtttggatgatcatggcaatagtctagagaatgttgggagttcctttgttttcaaaatctcttccacgggttcggcttttgtgttttgcttgagggcaagcaaaagctaagtcttggggagttgatatatcctattttcaccgattttatctatgtgtttggtaatggattttgagtctttatgttatttctcgagtctttttagtgtcttttcaggtattctatgcaacgggacaacaatggagataaggagatattttcgagcaagaggtaaggaaaaggaagctaaggacgattttggacccaggaatcaagaggagtgtcgatcgacacactcttggtggaaattttcccagaagacttccctatttacattattagtccctagacgtttttagggtttatatacattgtttagacctaagttttgaggatccagttttcatcatcaagtttttatcaagcttttgaaaaccctgtttctgagagacacaagctattcatcgagtattttcagacattgattcagttcttaatacagtgaagagatcccttcttttccctcctctatttactgtgtttatgctttcatactcaattatgttgtttgcttcaatcaatatgtctgagtaatctgcttgttagaaatagggtttctcattagggattcatatggtttagtagattgcccccatgctaggtcaatccaattaggtgagtttgctatcaatcaagacgcaatcagcatgtattaagtcaagccaagtctatatgatttgagttatctaacaacctaagtaattatgcaagaaactaactatactaagcagaaaataaagaacatgagtgataaaagcaagaagtaaactacagaccaggaactctcaatgcataaacttaaacaatgaactaagtagaggaaagtaaagatgctcgaccgagtatgaacatgcaggtcgagtaaacatgtcgagtaacaaagtcgagcagaataacaaagcagaacgagcagataaactaaactgaacgagcagaagagtaaataacacgaaactcaataaatctaagcgcaacagagctcttaagaatggggtaattggttctagtggactcctcaatccatttagctaactaacaaactcaatcaagctatccctacacaatagattcaaaaccaaatcaatccacttccgtgcgaatgattctcataactttagaacttcctaatctcaatttccattgatgaaacatactaaagcaggctttaaacaccaatctattaaagtcaataaggagtctaaacatccaattccttgggctagaatctacaaatctctgaaattagttggttcagacatttcatcaaacatcttttggatggagaaagtctgaaatcaattttcaattgatcagaaagaaaatagcattaagaactcctaaaacagaagggaatcatgcatataaacacttagctagctaaagaagagaggatccacctaaacctaacccattctcaagaactctgaagaacactactcaagaacactcaagaacatcatagaacaaaacccagaaaattcataaaactcagaaatcattataaacttagcaaaagatagatctcaatgagataaacaagtttgcagaagaaatcaaatccaaattctcaacagaacaaccagaaaatgcaaaagaaaatcaaagaaccctaaaaaccagcggacaaaacgaagatcctcttgggcaaaaacataagaggtctatttataggcaatcctaggttgccctaattgggaataagacaaaaaagataagtcgcgcaggagcgctcgccctaggccgagtagaaaagccgagtggcttgctcttggtcacacagctcggctctaggccgagtgtcttggtcgagtagcttctcttcatccttaagtgcacaactcggcctccagccgagtgccttggtcgagtaggctccttgttcttcacgtgtgctccactcggcctccagccgagtacataggccgagtatacttcaaatccttccttaggttccccgaactcgagtctgtccatcccttgtgctagaaacctccaagttgagtccaaaagtacctaattcatctgcaaaacactccaaatgcaagtatgctatgcaatgcaatgcaaaatgtgcaaaagaaggagaagagactaagaatgcataaaaaggggcatgaaactaagctaaatgcatgaaaaacaagggcttaaaaaggttaaaatctagtgttatcaaacatgaaagctttgagaagctaaaagaaggttggttaatgttttggagtccaatatgacttgatgtcatgtgtatgaatagagtataacaacgtaaaccgcaaccggattttaaaggtgtaagaccgtgtatcc

SEQ ID NO: 35341 - DNA, 2489 bp, Arabidopsis thaliana landsberg
gacatgattgagtattacgagaggttgttgcttgatagggaacatgacgttatggcctagaaagacaagttttcttctcttgagtccgatctacgctcttccactgaagtcaagaaattcttccatccacgaatgccgaaacagtggtcatcgagggtgacaatggtttggattctgggatccctactgaacagcatgtcaccgatgtaaaatgtgagactgagacggctgctgtagtgacccgcgtaacgacatcggccctgggcaagtgtccaaattttcgaaagttgccgaatgcatggccaattgaccttaggtgcccaaaacaccatagaataccaaagggcaagtaagggcaagaatgggcacgaatgggcaagtttgggcaagaatgggcaagaacggacgtgccatgggcaaaagtttgccccgccgggcgttgaccgaccgttgaccgcgccaaggacgcgtggctcggctaacttgggcctaagcaaagttgcttggagccgaattttagttgcttggagccaaagtttgggtggccacgtgtcattcatctacttgagtagagagcgtgtcatcgcgggtagatgacacgtggattggtgactctcccatactcatgacacgtggacatgctgactcgccattcccttgcctataaaaacccaactcgaccccaattgatttgtgaagagaaattgagcgggagtgagagtctgccgagtttaaactgtccgttcgattcaagttaggatcccatagccgagaactctgcccgaatcgttaaaagctttccattggttactgagtgagttctggataatggtttaagtttcataatcatattctcatgcattcttgattgatttcatgagttatatcaattgtgtgaatggttatattagattgcatatgtgatctttagattcttatgctattgcttatggttgagaggttgtgatgagatattgatgatactatgtgttgatttaactgtatgtttcataatatcttaaactctggggtcttggtacgtggtgcttgtggtaggaggcaacgaccataagcgtgccaagatcgtgatatgtctggccttcgtagtgaaccgtgctatcgtggggtcttgtaacgttgttacttgatcgtcatgtagtgcgaagaactcggagtgacagggctagctaccctggccgagtgtctacacgacggtatagcgtttggtactgatgctccagttgcatacctttgtggttgtaacacgggagatcacgggagtgtgtgtgtttggtgttgggattgaaggcagcatatcggcccctttaaaacttaataaaaattggattcttaatgcatgtgcatatttttttgtagttgcttcaacaagctaccttacattgccactctctattgcgtgtttcatgttggatatttgggttggggtaaattaatatctgttgaagggaatcccaagctcactgagtaatcttagattactcatgattctacttatcgtacatgtaaccatagtgggatgaccatagcgggaagacaaacactagaaaatgccagaaataggatgttttacgttgcttctgcaaaattacttgttttatgtaaatttgaacaaggatccgatataaagatatatttttcgggtaactctttgccaagtatatgctatatactatgcataaagcgttttcttaaaggcagccgagtgtttaatgatataagacctagtccgggtcgctcatcaccagaatatcacgagggttggcaagcctaagtggtgttcctagtgggaggagggtcgattataatttggtttaggaaccggattcatctggaacctctactaagttgtgatcgatcatcttcactgtagcgtaaatgggtcgcccgtggcttgtccggccataggacgattcgggggcgttacaatttttggtattcttgtggacacttgggttttcaatgattttatcgagtaaatttgagtcacagaatgcaacattagattccggttgttcgtcttttagatgactaagtggaggataggtttacctcgttttgcaaatgttttctagcaaaggaagcaacactttcagttcgttgcacggtcttaatgtgcccaaccccgaaaacttcgctccgtcgagcagtgcagacgatgacagtttgtcccgggccaggaatgatcagataatggccgaagaaagtgaatctactttgtccaatatgtcaattgaatccgatccgtccgaatgtccggagaatgctgatgatcatgatgacccattatctagtgaagatgcgatccatgttgagtggatgatcctcgaagatggcgagttattccaggtaccaaccgtaaatacgactgaagaacaagcgaacgatagtcttaacaacatgctatcaatgttctatgtgccatcgacggatgaaggaggaaagttttgggtggttcccaaatctggggg

SEQ ID NO: 35342 - DNA, 663 bp, Arabidopsis thaliana landsberg
atgtttgaaacgaaatggaaacgtaaatataaagaataagaagtttacctttattcacataaattagaggagactcttttttttgttaagaaacaaaaaaaaattggaaaactttcgttggatttgggaaataaaattaattttcctcaacccactctgaaatattgtcgattagggtaaccaaaaatggaaagaaaaaaagaaagttaaggaaaatagaattaagataaaaatttcagaatccataagattatgcaaagctccaaaatcaatattatttttctaggcctaataaatcacaacttacaagcagtagcatctaagcttggttttagccaaatactgtacatgttttatttctcagccaaacaatcatgtaacagttacatattctccataaattcaacatcagccaataacttcacaagtacatcacaccataaggttgcatgaacatcaatacttcctttcttcaatcccttggaaaagcacaagcttaccacttatactgttccccggtccacctgtatctgcaatcggttccccaaccaaaatcattcccattcacatcataccatggagagcttgagacaaccacagatatacaaaccattctacttccatcacctgtttttgagatctttacattgtttacccaattct

SEQ ID NO: 35343 - DNA, 1237 bp, Arabidopsis thaliana landsberg
  unsure (1)..(1237): unsure at all n locations
ctgggataagccatagtttatggcgttttcggacagatttacacttaaataatattattttcacatcttttaaattcaattatttcattatgggggttatgagaactgagttttgtcggtaacattgtatctttaaaaaaaattatcctaaacaaagaacgaaacgatacaatagtatannnnnnnnnnnnnnnnnnnnnntaatttccaggtaagattaaggataaaacaaaaaagcttataatagcaatttaaaacacgaattcaacgtacgatccaccacaatcctcgtcgtctttcaaacttaaaataccgaaactacccttaccttcttctttccataagaaatcaaaaccaagtcctatggtcgcaattgtatctctatctaaaaatcttctttgaatttgtgtatacacaaatcttattcaacgaatcatttatcaccaaaaggttctctcttttttgtttgtttctgtcttgtgtgaatgactcgtcggtgttcgcattgtagcaacaatgggcacaattcacgcacgtgtccaacgcgtggtggtggcacgtgcggtggaagtggcggaggaggaggaggtggtggtggaggagggtctggttcctcctccgccgtgaagttatttggtgtgaggttaacggatggctcgattattaaaaagagtgcgagtatgggtaatctctcggcattggctgttgcggcggcggcggcaacgcaccacgtttatctccgtcgtctcctctggcgacgtcaaatcttaatgattcgccgttatcggatcatgcccgatactctaatttgcatcataatgaagggtatttatctgatgatcctgctcatggttctgggtctagtcaccgtcgtggtgagaggaagagaggtaaaggaaacgacttaataatcgattgttgcatattcatagtaaagtttggaactttgaatttgaaattgctctaaaggttttactttgacattagtaaaggttattgctagaaattgaatggatttagatcttactggtgagtggaattgttgggaacaacttagtgttggatgcttagatacttgtgttggacttaagtgcttatcaaaacatatctcattgtgaatcatattgttgaattttagtttaagaagatgaaaggtttagtattcttaaatgtgatatggtttttacatgtatatttggtgtaacaggtgttgccttggactgaagaggaacatagg

SEQ ID NO: 35344 - DNA, 2448 bp, Arabidopsis thaliana landsberg
gttgcttcagccaagaagctgcttccccagcaagtgaataaggaaaaagcttgcacagtaggtagtcctctgagactccattagccttgatgctcagaacaagatcctcaaatcactcgatataatatattggctgctaatgagataagccatggaaaggatgcttgccaactaaagcaaagtagtcaggcttcagctcatagtcgtttctctggaatggtaggggtacaatcgctgatcgattagcatagaacaggtctggcctgttgaaatccccaagagtacgacgtggttccgcagttgaaggaatagctgcaagaatttggtattggtgtcaccgattgcatcggcgtgctgctctcgatggtgtcgatcgacacctagttggtgtcgctcgacactgagccctgctgcgtctctagcagctaactgcgcattgaggtgcgcctgatcctcattggcgtcctcaggtaggatgagtccatgatcatccaatctctgaccagcctcataggcttgcccatcctcatctctcaaaactccttctgcatcagctctgatgactctgtcagccattgctaatttatgagtttttcggttggtgtgttcaagttttccccagtccagaacagacaagttgataagctctttctgttttgtgctccttgtttgcctaggcatacacgtgaaacacagaaaagaagaaaacaagaaacgcgtgagtaacaaaatagaagtaaaaactaggcaatttcactaaacaaaactcaatgatgattcccaagaactccaacaacggcgccaagtttgatatggttcaaattacctagaactactctctcaaataagagatcatttgcagtattttaggatcgaattcacggagttcttttgttcaaacaatgagttaaatgttgagattaagctaggagggtatgagtgaaatagtaagtaaacaaagtaaaaagacagcagattgattgggttgtaaacgattaggaaaagagctaggaacagggtattctcaggaaacgattggttagtagatctaataaaagctaggttgttatcgaaccattcttaaactcaaactctaattatggaataaccagtgggcgtgccgcgaaactccctatatctatagccaataataaccggagaagccgagaaactatcaacctaaatatgcattcttaacgagttcaattgttcatcttagtaaataggccgattcttattacacacctataaaccagactcatcaaataatagatccatatacagatacctatggcgggcatatctattgtctggattcaagatctagttaattactctagatcaagcattaagcataattaaagatgaagaattttacagataacctagcaaagggggcaatctactaaaccatatgaatccctaatgagaaaccctattcctaacaagcagactactcatacatattgaatgaaacaaacgacataattgagatagaaagcataaacacaataaatagagaaggggaaaaaaaggatctcttcattgtattaaaaactagaatctctcaagaacaatggatgaatagcttatgtctctcacaatagggttttgcaaagaacttgataaaagactttatttacaaaacttaggtctaaaaacaatatatatagaccctaaaaacgtctagggactaataatgcacatagggaagtcttctgggcaaatttgagcttctgtaaactcgaaagcgtctagggtttttgctgggccgaaactggtgtcgatcgacacaaagagtgattcgatcgagacactcctcgctgatttctgaaccaaaatcgtccttagcttccttttccttagcttttgctccaaaatgtctccttatctccattgttgtcccattgcatagaatacctgaaaagacactaaaaagactcgagaaataacataaagactcaaaatcctatacctaaaacatagataaaatcagtcaaaatagagatatatcagttgcatcaactaaagtctttgtagtttgtatacttacgagttatttttccattgtctaatgtgatatcaacttaatattgtgtcttttgttacaggtttaaccggcacaaggggaagctgtctagagtgattgctggaatattttggaggaagtttgatgggccttacttcagttggaaggttacaccaatacacattcaagagagatacttcaggaattttgcggtactatcttataaacctttcattatgttattgtatatatgaagtatctttgctaacttaactacttgttttgtagcggaagtataattaggatagtgggattactgagcttgttaaagaaggattcttggttatagccaagaatcgtatgaaagggcttgtcagtcaagcaaaaagagtgtcacaccccgtggatcaagataactg

SEQ ID NO: 35345 - DNA, 3259 bp, Arabidopsis thaliana landsberg
tcttcctggtttcttaagtcccttagctcatcctctgtaactcagcaggtgctcgattaggtagaatgagaccaaagtgtctgtctgatctccaactagaaccgtaccatccgatgctaaaccaagcaactcttgcagtgctgtctccatcaattctagtgccccattgacaaaggttccattccgctctcttgcaaatagagcacttacgaagtgtggccctgaatgactgaagctctctcttgtcaaaacgatgacttgtgtcttttccgcttggaaatccatacatcagctcgagatgctctattggaagccgatactctacatcatacacacaaaactccaggtatcccaaacttccgtatggcctgatttcatcgtccctctgactctccatataagagcaattccacagatgaaagaaactgaatggtctctttctcatacccctccattggccgaaacatgtgaatattcaggttgcattgcttaaacatatagtctacatcatcatagatgccgagtctctccatggtctcgggatgagggtaccgagttcctaataactcattgcgctttagcagcttgtagtattcatttcgagttgaacacttctttgattccaaatcatcatcgcctcctttctccgtttgatcatcttcctttggtgaagccatatcttcctcggagtcttcaactaccagctccaacctcctccccacgggcttcttcccttgagtgatatcttccttattcctcgagaattctcttgtagaaagcttactcgactttcgggatcgagtattttcagctggagacctgaaggtctcttcttcttgcatcacttcctcctcttggcttgattcactatgatcgatcgcaaaacttgcttgatctctcctactcgaccccaagggtgatggttctgaaagtcctcgagctgctgcatgcgaagaaaggtgtttgggtacctctttgatggggagagagctttgttccgaatctttgacaaaagcgagcgcctgttcatcgtcaagaacaaaggttggagaaattcaaaaccaaaattcagtagattaggagattgaatgatggaagaaacaaataaatttgtgaaaagtttttgataagaaagggaagtgaaggagataaagagaggattgtagggattcgagatgaggatgctttggtatgggagatggagagtatataatagctgtgagcgctcaagatgccaattttcaagtgttccccattgcttttgggatagtgaacagcgagaatgatgatgtgtggacatggtttatggagaggctaacagacacaatatcagatgatccggatttggtcttcgtttcggacaggcacttgtcaatatatgcaagcatacgcaaggtaacttatctgctaactagttacgtttagaagataacacgtatgtgcgctaagtgataatttatctactagctaaattgactttagggtacgtttattcccctagacataattatgttacattcaatgaggcgcgataacataaacgttattagttaacttaacctagtctgtctcgtacgaactaatgttaacgtgtaacaagtattttagttcaaacgtcttctatatgaatttgtgtgtaggtggtttagttcgtagcaataacgccgcaacaaaaattttagaagttaacaatacctgtttccgataattcaattagcggatattgcgtctttgtttgttatgggggaatgtttactaaacctaatagattgtcaaaactctgcaggtatacccaatgtcttcccacgcagcttgcgttgtccatctgaagaggaacataatatcaatgttcaagtcggaggggttgagttatttggtcgccagtgcagcgcgggcttaccggctaagcgacttcaatcaaatctttgccgagataagagctatgcatgggccatgtgcagattacctaacggacattggttttgagcattggacgcgttcacatttcgtgggtgaaaggtataattgtatgacaagcaacatagcggaatcgctaaacaatgtgttaacgatggcaagggattatccggtaatatcactattagagatgctccgaacaactctggttacatggtttgcactccgccgagaggctgcacaagtcgagggtaatcttttacctccgaaggtgaatgaaatggttattgaaaatttcgaaaaaggtgcaggctatgttgtggtgaaaataggagattcattttatgaagttagagacagacaagattcagcatttgcggataacctttgggagaggacttgcacatgcagggaattccaattgctaacaattccatgttcgcatgccatagcaacggctataaaagaaggaatccgtgtagagacaatggtcgacatctaccacacagttccatacctaagattggcctacaagggccttattatgccggtcccggacatggatacactgaccccttcaccaagtgatgtgggaggcgggaagcttgcactaccgtacgtccgtaagctgcctggaaggccacggaagaggagactattctataggggcgagttcaaggtaatgactgatattgtgtatattgatattatttttgttaacgcttcaattcactaacctagtacataataccgggataataattcgtttacagagaaaggcgctgaaacgttgcacaagatgcagggaattagggcataatagggcaacatgcagaggaccatcacggtaacaataagaacaataaatgtcaacaacttttgtagtaggtaaaattgataatagaaaatgtaaaattggtacaggggccttagttaggaaaaaagacgttttttggacgatggaagggagttttttggtaatgggcggtttgaaaaggatggtgccaagcacgttggagcactagaatgtgagataaataatgaagaaggaggatcagaaaattttctatgtatatacgtacgggatctgatcctacagatgtaatattaaaatcgggggcgatccccatcaaaccttctggtatcaacttggaactggtgttaaatcttttgttaaatgataaactatctattagtgttattgttttaatagctatattttaaatagaggacgccgtagaaaggataaatccaaaagctaagtgataacttaaatattatcgaaaaactaacaaattgttatagcaacatctaataatatacaaaagtcttatgtaaaaac

SEQ ID NO: 35346 - DNA, 821 bp, Arabidopsis thaliana landsberg
cgctggctatctgagaaattttctaaggaccgggctggggcacaaaatccgagggggcccggtactacttttcccccgttaagggaaagaagattatcgaggggttctatggcaaagccgggccatttcccgatcattttttttttggggtagttgtagttagaaatttattagtacccgaggtgatgttaaatttcgttctctaattgcagttttcttttcgcagaacgcactctcaagtttctcgagccgattccagacgattttttttcggcttttcacgcgttgtcggctcgaaagtgcgattggctgaagcatttctctcgggatcgaattgagcgtgcgcttcgtcttctccacggtgtttcttgtcccactagttcggagtcttccgatcatcgcactcaatttttcgtggatatgcaatcgacgaaacttactttgcgggaggtctacgccaagaagaaagaggacaaggagaggcgattggcggaagagaggcgccttgttaatgcgggattgatctcgccgcgggccgatcccgaggcgacccaagatgggaatgttattcccgatgctatcgcgccgcagggtgctcccgaggcgtctcgagatgggatactgccgatactgccgggccagttgacgcggtgcccgctgaggctcagggagccgagccatccgttgctgcgcccgaggcggttgtggcgttacctgcgagtgacaaagcggcagctaagcgcattcgggttgacgatgaatcgtcaaagaagaagaagaagaagaagaagaaggcatctggctccgaggcggagaaaata

SEQ ID NO: 35347 - DNA, 2006 bp, Arabidopsis thaliana landsberg
tttccgccgggaggcgaatggactgattctattttccagaatctgttttgcatattaaatgctaagctggtgcatccccatttggatattgatgggagtataggaccatggttgctgtggagattgtgaaagcgcaaaaatgactatatctttaaggggaacgagtactcaacgcatgacgttgtatgacgagcgcaggaggactaggtggaatggagactgccaaagcttactcttagcaaaacatctcaggcacttgacccagtgcaatcacgagttaaatggcagccgccacctccaagatgggttaagtgcaacatggacggtgcatggaataagataacttgagctgtggtattggatgggttcttagggaccatcagaacacagtgctttggatgggtgcaaggtctctaccaaaaactgaaaaagttctgacagttgagctggaaggccttagatgggcagttttatctctgtctagacttagctatggaaaggtcatattcgaaactgactctcaacaattggtatctttgatgcagggagaaacatttagtaatcacctagggctgattattgaggatattcaacagttgcttcaaggttttggggagaccaaagtggtgtttatcaaacaagaaggaaatagcatggcggacagaatagctaaggagtctttttcttttgggaatcatgattccaaattatattctgtaatgccagagtgggttaaactctctgtggaaagtgataatgtgtaatcgaacatttgggtaatgttaagtttgaagttgagccaaaaaaaaaaaaagaatacgatatctaaattttatagaacatgtgcactgtatagaatacacattctaaatttagaacatgtattctaaatttcgtagataatattttcttcatccaaaacggcataattttgacgttataagtatcttcatgacttcttcaccatttggctacaaattgttttgaattttatttgaaaattggttaaacaaattacaaaggctagattaggaatttgtgacatttgaatataaaaggcatagatggacaatatttttattatttttctctttttccaatttttcctaaagattataaattataaaaaacattcctttgaaacaagaccaatcatgataatattgacaccaaaatttcaggaaatttttcttaacaattaattttggacttcgttatatgcctatttcgtatttatctccttcctaattgtattaacagaaacagtgcatttgaataataaaaattaacttatttctcctcatatatgagctacgagatttaccattcttttatttcatttaatataaccctgtaccaaaatgcaaacaattgtgttattgtattatgataaaaaaatccttttattttatatttctttggtttatatggcctaatagtattagatggccaaaaatgatcttggccattcaaatgcattgttatgaaccgttgattagatggcataaaataagtgtctaatatatatttatattttattatagattaatatagtcttatttactttatcttattacatagagtttaaatttaattagatattgactcacgcattaatatctataattgcatagattttagcaactgaaaatattttgaatcaatagaaaatattctaacacgctatactttggaaaataacaaaacgtcatcactttttttttaactcacaataaatcctattggtttgaaacgatttgtatttcctttgcgacatcaactgtcaatcattgcattttttgagaaatcttccgtgttatatataaaactaattacactaaaaaaattcattaatctaaatgcttatctttcaaaacaaaaaaaaaacttccttttgaaagatatggagcctatccacaagctcactgatttgaatgtaaacttgaccgaatggaaggtttatgtgaagatcctatctatctggaatcatcctccaaagaatcatg

SEQ ID NO: 35348 - DNA, 6211 bp, Arabidopsis thaliana landsberg
tttgattgcggtttcgctaaacaatatgttaactatggcgggagattgcgccgataatttctatattagagtcaattcgcaccacactcgtaacattgtttgcgcttaggaggcaaactgccagaagtgaggataatatcttatcgtctaaggtgcacgatatgctaatcgagaattacgagaaaggagctggatgtgctgtgctaaagattggggatgggctatatgaggttagagaaaagagaggctcagcatttgcagttaacctatgggagagaacgtgtacgtgcagggagttccagctcctaactatcccctgctcacatgccatatcggcggctatagaagaagggctccgcgtggacacgatggttggagtccatcacacgacccccggcttagattgtcataccaagcactcataataccggtacccgacacggaaacgctgactccttcaccaaatgatgtaggaggtggaaaattggctccaccgtatgtgcgtcgaccgcctgggcgaccaaggaaacggagattattcttaaaaggagaattcaaggtaacatatttgacatcaaagctaataaaatatttatatggtaatactattaggatgtaaccatcgcttccatttgtagcgagcatcaagaaaaagatgctcacaatgcaagtcattgggacataacagggtaacctgcaatggaccagtaccggtatgtcaaatattttctgttaatgactatattatggaatatttatatgatctgttttgagtgcagggaccgtagaaactatggttcaaggacgttttttggcgcggaaagtgatggatgctgccaggattaataagaaatgccctggagatgtgtataaataaggaaccttaagcgatcagaaattttaaatgtgtatatgtacggctattgatcgctaaatgtaatattatcggaatccatccacttttcaagtagaaatgttaaattataatgtcatattttatctacccaaacagatattctgataacaaaagtagtagccgctaattcctagatattcgatgactcctgcacaaatagttatggtaagcgtgtatccactaagtttattaacaaaaagaaattgacattgagattaaaaatcagaatcagaaacacataataagattaataagtataacagtattatctgctaacagtttgaacaggataacctagtatttaaacgcaattaagagaaaccacataatatgataaacatgatagttacatgctattaatgttaactcgataagattgttacgatgacagctaaataaatagttgagataagcatggaccagctagcgttttttacatgatacattgttatttcaatgaagttcataaaaaaaccataatacgataaatatgatagtatgttatccactaataagataagattgtattcaaatattaataaaataagacacagaacccgtaatatgataaagccttgataactttgttaatcattatcggataaacgtgtttatgtttagaccggatctgaaacccatattatggtaaaacattgataacatgtttatctgctacgatcgttaaccacataaaaatcataacaactcactaattcaggacactcttaataaaatgttaataaaatcagactcagaaaaccataataatatgaatcacgataatcttgttaatatccagataacctcttatccaagtaaccttgttaatcactatcagataagcgtgtttatgtttagacaggatctgaaacccatattatggtaaaacattgataacatgtttatctgctacgattgtttaccagataaaactcataacaactcaccaattcaggacacttttaataaaatattaataaaatcaccaattccagataacctgttatccaaatacggtagttaataagataaaaaattaataacaacatacacaattcagaaaactatgattacaagacaaaatgtagcgaaagcgtttgaagattatcctagttagacccaacaaagaagatgaggatacatgattcgatgagagaacataaacacaaatgtaaaaatattcgataacacatcagttatctactaaccgccagcaaggattaaagcggagactagcttcttcacttcactttgaaggctgccaacatcaaaatccacacattcaggtacacccctggtagcatgcgtgtgtatgagaaatatagagaatatgcatgtgtcaagaggcgaagttacctgtggaatgacagaagggcgctctatagtaaatggatccggaagaaattgactcataacaggattgaaggctgcttgtttgaaaatatatggtgtgagaccccgtcccagacgtctcggcgtccggcgacgttgtactcaagttcgcgcctcttcctggccgaacctcttaatttttcgcgattcaacatagaattgcctttacgaggctaaattctataatcgctctcttattacacagcggaagtctttctaaccttggtttaattctaaccaactcttgtaccggtttcatcgtctttgttccttagacttagatcgatcctttactcggtcaagacatgcatatgttcgctaaccattctaagccaaacaatcgcatattcctttatcctactttcacggtcaattaccaaacgtctatcttaactaataagctagatcgttacataccttggtcaatatgcggatttgattccttagcccgtttgtcgccttactccattcgttcaacgactcgtcatcggtcgtgaattgatgaaccaatccctatcgttacttagccatacaaccaaccaaccccactggtctaagtacaacgatagagattggggatcgtacgattcccttggttcacgatggccgaatcaagctcttggcttattggtccattcgttctccaaacgtacgcccctccggctacatggtggacgattgagccctcggcttatcgaaccatccatgtttccgttccggtcgtttaacactacgaccgcccacggtttactaaccgtttacccgtccggtccatggtggtcgataaagctttcggcttaatgatccatccatgcggtccgaacgatatccttatcacacccaagggtccgtggattcatccactggatcatcgtaggctagcccatgaaatctttcttccgtcggccttaggtttgctcgcgggtccaacatccgttttgtccatcggttcccaccgtggactttcctgttggttatccgtcgagtcaccctttggtcttaccgatctctaatcggtttcaccatggctgaagagatagatacatgaaggcggccacgatgttgatcctatatggtgaatcacgttccttacccattcttggtgctttctccctttatcggtaagattgcatccatgggcgacccttgggtgtgttcggatgcacttatccttgtgcttcctcgaacacttttctcgatccatcccatccgacgatcggtctgtccgacccgttccgtcagacgatcggcctgtcccatccgacccgtccgacgatcggtctgtccgatccgtctggccgatccgatccgtctgacgatcggtctggccgatccgatccaaggatcggtctaccagatccgattcgtctctaagacgaacggtctaccctctccatcctctacactccatcgaaccgttggaccgggaggtagcatgcgcatcagttcggtcgagttatactcgccgagccgcaccccctttccgaccaacaactctaggatgtgttgggactcctttaagaatgttttatggtgttttggatgttgtgagatgatgtgagattccttgggcgtcctcccttatatagggggcgaatggatgcttcctgaagcatcacatccgttctttgcacccctccgaaaggtcacatccgttccttgcatcctttcgaaaggtcacatctgttccttgcatcctttggacgatgcaaccgttcgttggtacccgctcgaccttacactttttggccgagacacctcttcacccgtgagctacgacagtccaccagctcgagtgtcagctgaccggaccacccagctgggtcagtacttgatcagctcactgagctcagtcgagctgtcggtcagctcacctagctgagctagctagtcttccagctagtttagctcacatagcttacctagctagttcatacagcttgtccagctcacctagctggtttagcttatactttctcgttcttcctacttagtattttggtccgttcctcgaccatgatctagttttctcctaaaacaaacctgcctctttatgaacgcgggacgcggtcgttacaagtctaccccccttaaactgaattcgtcctcgaattcggcgtgtgtaagatcttggttactccctaactcgggacacgggcgttacaagtctaccccccttaaactgaattcgtcctcgaattcagcgggtttaagatcttgtttactccttaatctttagtctttccgagactttagatatcacatttgatcaaatctctatttccgagtttgatcaagtttcccgatctttgtctcttacgacactcgatcaaattcctgatcctggtcctctcccggactcgatcattatttcccgatctttgtcttttcctggacttgatcaatattttccgatctttgtcctttcttggacttgatcaacgttttccaatctttgtcctttcctggacttgatcaacgttttctgatctttgtctcttccgacattcgatcaaatttttgatcctggtcctttcccggactcgatcattatttcccgatctttgtcctttcctggacttgatcaatgttttccgatctttgtctcttccgacattcgatcaaatttctgatcctggtcctttctcggactcgatcatattctcgacttaagtctttttccgactttgtcaatatttccaaccttggtccccaaaggactcggtcaatatttccgacataggtctctttccgaccttgtcgtttttccatgatcttggtcaatttccgataagatcaaaaccccagaaatagtcaaatcccgactaagtctgtacccgatcttagtcaagttccgactagatccaaattccattgatatcggtccatctccgaatatatcaactcacttttccgtcatgtttaagttttgactacaaggataatatcttggttcgtgatcgtgagttgggtaactatttccgtttccaaacacatcgatccctcaacttccttatccgccaaaaccttactataacgttttctcgagcacctatccatcctaggatcaagcatgctctgataccaacttgtgagaccccgtcccggacgtctcggcgtccggcgacgttgtactcaagttcgcgcctcttcccggccgaacctcttaatttttcgcgattcaacatagaattgcctttacgaggctaaattctataatcgctctcttattacacagcggaagtctttctaaccttggtttaattctaaccaattcttgtaccggtttcatcgtctttgttccttagacttagatcgatcctttactcggtcaagacatgcatatgttcgctaaccattctaagccaaacaatcgcatattcctttatcctactttcacggtcaattaccaaacgtctatcttaactaataagctagatcgttacataccttggtcaatatgcggatttgattccttagcccgtttgtcgccttactccattcgttcaacgactcgtcatcggtcgtgaattgatgaaccaatccctatcgttacttagccatacaaccaaccaaccccactggtctaagtacaacgatagagattggggatcgtacgattcccttggttcacgatggccgaatcaagctcttggcttattggtccattcgttcttcaaacgtacgcccctccggctacatggtggacgattgagccctcggcttatcgaaccatccatgtttccgttccggtcgtttaacactacgaccgcccacggtttactaaccgttttgtaacgcccgcgatcctcaataggatcgttggctaggacttggtcccggagaagaaggtggagtcttggacaagtgagaaagagctggctataagctcggacaagggga

SEQ ID NO: 35349 - DNA, 5267 bp, Arabidopsis thaliana landsberg
agcaggttgaatcattgggaaaaagtaagtttcagtcatccacatatatacatttcagactgcaagtcttgctaagagaatttcattatatgttgtaccttggaagaactgcaagccatcctacattccatctcgttgataatattcaatctttccatcgcaacaggcatccccctagattcatctaagctggtgaatttctttttgttcctgcagagagtttagttatacgttacttcacaaccaaaagaatatatataccaatacgctcttatcatgcttcagtcacctgttcagaaacagtccgtgattctcttcatcattgacggatttcagacatttattttgtagataatctgcaaatgccggctccatcgctacacccattacttcaagctgattgttcccactgttcataagctgaatcgagagacgtgttccttctgatgactgcaatcagttccaaagtagtattaataaattacggaatttgaatggacatatatgcgtagttaagagaaacctacatatctgatccggtatatctttgcctcatggaggagggcacatgcattctcatgatacactagatcaaatcatcttcccaaagttttctgtagttctcatacgcatgtagttgcagaagcttggtgtctgtttcatcagatgcaactgcatggagctgaagcatttccaaaaaccatcccaaatgatcagaggaaagagagaaataaaagagagaatggaagtagagagtcaagaagacaagacactagttttgcttacatgcttaacaaacttctgaactagcttgtccaatgtgaaaagaacatatgactgtgctccaaaaatagctcggcactcatcttcaaactttgtattgtcgtcaatagaaccgtcaagtaaattatagagtgcatccatgaacctaaacgtgttatgctttgaatatcagtaaggaattgttttttcaagtaaagctattaacttggaagataaatctgttagagtaaaattcttttagaggtaatggagaaagtgtttaagtgttttgagagagttttttaggaaatagaacttttattactttgctttaaacttgaatacaacttcacaaccttgctttggatgatttatacaaggtagccctctcaccatttccttccttgaaagcaactccaatcctccaaaatttagatgtccgaatcgaagatgccatagccaagactcctctttgtaacacatcttaagacattgtgcaatgtcatttcgaatgttgaggacaaacattctatttttcgacattggcaccttggtaatgagattgctttcttggtctcttattgaaaggttattatcttttaatctaatatcataacctttctctaagagttgtccaaggctcaagatgtttgtcttcatgctcggaatatagtaaccgttggaaataaattgatgatctccattcttcaatcgaataagaatgtttcctttaccttttacctccatcttcgattcatctcctaaagccacatttcctctcaccgattcatcaagctccgcgaacatactttttctcccgcacatgtgattacttgcaccactatcgaggtaccacttatgattctcttcttgttcatctttcttgtagctagccattaataacatgtcttcttcttgaattttttcttcaacgtagttggccttctcctcaaattttttgttgctaggagctttacattcagaagcataatgtccaaacttcccacaattgtagcatttgacacttgatttatcgtatcttgattttgggtgtcctttcccacgacctcttgatgagttttcacctctttggtttgtgttgtcttcatgtggcctccaaccacgtccatttccatatccaccacgacctcgtcctcgtacttgaccaccacctcttctttggtaactttggccgttttcttcttttgtaatttgcatattgaggacttgttcgacgatatcttctttcttcttcttcttttcttcataagcttgtaatgacccaagaagttgctctattgtcatagcttctaaatcttttgtttcttcaatgacggtgacaatatgctcaaattttagatccaatgatctaagaactttctccatgattctcacatcatctagcttctctccgtttcttttaaggttattagtaaccgtcaacactcttgagaagtaatcggagacgagttcaccttccttcatttgtagtgcttcaaattctcctcttagagtttgaagacgtactttcttgacttgatcggcacctttgtaagaggttcgaagcttctcccatgcttctttcgccgacgtagcttcaacgaccttctcgaacgtatcttcatctaatccttgatagattagacagagagctttcttgtctctctttcttgagtctctcaaaccatctttttgagtttgagaaagactaccttcattctccggttcaatgaaacctttctcgactatctcccacacgtcatgtgctcctaggatagccttcattcgtagactccaattatcatagttgctctttgtgagcaccgggacttggaagggaacattgttactcgccatctttaggatcttcaagctctgataccactttgttagagtaaaattcttttagaggtaatggagaaagtgtttaagtgttttgagagagttttttaggaaatagaacttttattactttgctttaaacttgaatacaacttcacaacattacaacatttgagagagggatgaggtatttatagcctccaaactacaaaatatctaaaatattttaatcctaagtctagagagttcttacataagatctggattacattattcaaattatctagattattctattagagtatctagatttttatgtttaaggaggtggaagatgattctagaaaatttctagaatcttttaaagaggtggaaatgatgatatttctagagaaaattctagaacttggatttggccataattaattattgaataattgatccaataattaaacttgattcaaaatcaagtttaactttcaacacttctcaatcatatggggagataatcctcagtattggcaatggattccaattcctgaatctaggtactctaattttcattatctttgcgttagtttggttgtaatgactcgttgggatgatgatggacaattgttgccctgtgttatgaaggtttggaaaagtagcgaaacttcgcgatgtatgttggttcgagattcgtggcagaacgaatactcgtgtattatctccaagaactcgtttctcggcttatattgtgttcaagggagtggataaatgttatggctttcagaatgtggccatagaagctgcagttggaatggtgggacaggagccttctagaagattcatatgctttagtgaagctataaggaggggaaggaggaacgttgtgaaacctaagcagagagaagatgggtggatggagatagagcttggggaattcttcaatgaaggaggattaatgagtagtgatgaaattgagatgagtgccttagagaataagcggctcaattggatgggtggcttgatcattcaaggaattgaaatccgacctgccaaaagtcccctgaagtaatgcggcggaacaacccgattatcggctcatctattggtattattgtctgttccagttgataaaggtgtagttgtgtttgttttaatgattggttcaattagagtgtatgtggtgaacaacgtactttgctagttgctaggtagaaattttgcgaaacatactcattggtgcaaagaattgcatatatataagatgaacttaagaaagattcagaagtcatttaaagtctcagcttctagatagatgcagaaactactgatccatggggccaagacacgtcatacactttagaaccaaaggcagaggagtttttcggtttgttgttgtattagatagagacttggtacctttctagagctttccactttgtgttttttcttccctaacctttctaagtagtacttgatcaccagaactcatactcaatagattcctacattgtgttcaagaaaactgaaattgttatggctttagggtgttgtgagttgtaccaaggttctttgtttgccggcaagcccaaatcaaggcctctctcttatgggcttctttattgtaaaaggcccatatgagactatgaccccaaaaacaaaggagcgggaagtagacgcgctcattcttcgcaaatcagggatagtttcgtaaattaggagaacgaaataagaagagaagagtctcagaagtcagaattctctcaatagattcgacggagacgatgatacggctacggacactgattgagaaaaatcgaaacgaaagcagaaaaaagatcgtctcttctactctcgattcgttgcctgagggatgcatttcaaacataatctctttcacaagtcctgaagacgcttgcgtcgctgctgcggtttcgaagatcttcgaatcggcggtgaaatcagatatcgtatgggagaagtttcttccggcggattacgaatctctgattcctccgttgcgagcgttctcatcgaagaaggaactctatttctctctctgcagcgatcctcttctaatcgaagatggcaaaatggtaaaaaaagcttaacctatttatgtttatacgatctacaaattagcaatgtagaagttatgggaaattgcaattggtatgttagagtcattgaattaacgttgaagttctaccttgtgctgatgatactaaatatctctgattattttcgaaaaccgaagagcttatggttagagaaagcgagtgggaagagatgtataatgttatctgcaactgcgatgaatctatcaagcatggcagatatgtctcagcgtttcctatggattccatgtccagaatctaggtatgtactcctttttcattatctttgtgttatttcaactcaatccgatcatataattatgttgccaagtgatatactgatatgcaggtttgaaacagtagcggcgcttcgcgaagcatataggtttgagtttaattgcagaatgaatactcgtgtcctttctccaagaactcgttactcggtctacattgtgttcaagaaagcggataattggtgtggctttaagggtgtgtctatagaggctgtagttgggatagtgggagaggagtcttctagaagtttcatatgctttgata

SEQ ID NO: 35350 - DNA, 1230 bp, Arabidopsis thaliana landsberg
agaattgcattgccctcgagtaaattagtttgctttttgtttttgctggtttatagtttggttggcttgtgcttgatgaaatggttactcaagtgctattgtcttctctctactctttaattagcacatggggtaccatcatttggttttctttgttaagttgacaacttgatttatctaagttctcatgaagtttgacttctcattgagtctctttgcagaaaagtcatagaatggtagatatgatgcacttgagagagagactatgctagtccacattaagtttctcttagtactatgaaatataaaatgtccttccatatcgcttttctcgctgaaggtgataacttgaggtggatatcaaatgggtttgtcatatatcctctattgttaggcgtttttgatagcctgaggtggataaaggctgttgataagtgtttgattgtctatgatgcttgagagattgcttgttccatccatgatttatctttctgtatccttgagatgtagcatattttatcaaacaaatgaagattagaaagatctgttagtgtcaacattagtcagaagatgtatctattagttgctacttttcatcatttcagctggaaacatagtatctttgtgttctgacagaagtctgtattttcatttctctctaaaggttgaaaactgtactacaccgttagaagaagatttgcttgattcagttttgggatcactcataagcaaagatgaaactataatggggcgtctcttcttggaggcaaacatccacgaccaatcgtgccaagccttgctgagcaagtgggatcacttaaagccttcaacgcaaaaggttctttctttagtttcaaaggcaaagaaattcgaaaaggaaaaagaatgcatcatcatgaatctcgctaaagctgagcaagaggtaataatcataaacgataacactctattgttcttaaatgattccacttgactcacaaactttttacaggtggaacttgtgagcacgctaaaccgaaagctggataaagaaaatcgtaagttgctaaggcaacaacaaagccctctttgctccgcagacaagaaccgaaacagcgcatctgcaaaggtaaaagtaccacaaaaagaaagaagtaaacactgcgaaggaaaaagcagctatgtggactctctctttgattctaacttaggagtgttgttctgtttgcagtcaaacaagagaaagagtcc

SEQ ID NO: 35351 - DNA, 884 bp, Arabidopsis thaliana landsberg
cattgtccggatcgtatgatagagagtgcacaaatcgttatgaacccaaagacgtgtttccggagttataattacccttatcgtataatcgatctcgatgtaaccctaaatatattgatttacgatgtaatctttaaatatcttgatttttgggaatatatcaactttattaatcgaggttaatattttggattatattgaacatcattagcacaccttgaacatcgttaacacacatgattattattcgaagaattgtagttaatattttggattatattgattattaatcgaggttaatattttggatgatattgaatatcattaacacatatgtttatgatttgaagaatcgaatttaatattttggattatattgatcatctaagttaatctgtgctatcttggaaatattacttatttttgacacttcttatattgtgagtttgttatgcttaattgaatattgaaaattttaaaatatttaatattgagtatattacttctcagaatgatatgtctctgaaacatgacgcctgctgagaatgataatgatgaatttaactatataataatttaaaaacttattatcacagtaacaatttataatataactttatttttacaagtattcggtattatctaatctttatctgtttttctaaatcaataaaataagatatatagatatatatttttgtaaccgttctataattttatattaatttctatattattttatgttattctatataaagaataataacatatattaaatagttttctcttttagtttgagcaaaaaagtatatataattttgctgtttaaagtacctttttgtatcattattataaatataataaatagtgttcatgttggtata

SEQ ID NO: 35352 - DNA, 2326 bp, Arabidopsis thaliana landsberg
acccttttggggtaccctgtaacctctcttagatctcttgttccatctttttctatgtgttgtctcttttgttgcctgtctgtaatcccttcttgcccccgctgaatcgagatgctccatttggtcaaaagcattgtcctcaccgctagttattagttgaaacgaatgagcagattaaacatttatagctctgcggtttaaatgtgctgtgtataaataatttgagtcacaagaggagagaaaattacaagatatatagttcaaatcattgatcagatgcttggaaaacaaataacaaacacacgtgaaataaaatttaattttttggccggtgtgttgccgggaagtaattgtgtgggcatgatcttcttaagtggatacctcaattctgaaaatgatctacaaaagtataacaaatggatgaaagatgtcgacgaactaaattgctttgattttggattattttttgttttctgcataaaatattttttttataaattaataatttcgaaaccgtgaaattctattaatttatcgataaataaatatatattatcagtttgttgttgtaaaactaaattagtacaaagaaatgattatttttaagaacatctataacaagcattcaaaccttcaaatttgaaggtttttttaactccaacaaactctcaaacccttattttttgaggatgtgaataatgaagtttcaaatttcagggtgcatactattcacacattcaaaatctcttctaaattttattttagtccttatacttaatatatcttacaaataattctattacatttaattatgacaaatatatgcatataaattcaaatatattaaaatattaaaaaaataaataaataaatttatgcaacaataatattacattgagcatatatgaaagcattatagacataattacattgaatatttttgtaattttacatgtaattttataaattattttaatgttttatgttatgtttcttttctaatatatatataattttatataaaaaattaaaatattatttaacataattattttgataatatatgttttatatttatttatgaaacttttatcattatcagtgattattgttactattaaagactataatgtaaataaagaaataaaaaataaatttgagggagtatcattggtggagatcaccctcaaaccttaattttaagggtttattaccttcgtagataacgtttttttattgtgtttttttcatctattgccttgttggtatgaaaggacctggtttaattgatgtcaagaaaagaacccggtttaatttaatttcggtcagattcaccaatctcgaatccattctctcgccgtctttcaattctccgccatcgaacgaaacacagaatcttcaggatgtgacaacactggattcctccgccgtcttctccttcggtggagaagcgattcgaattggaagaatcggttggcttgacattgattcaacgatgaggctccttcaagctagtcccggtaatgaaaaagtccttattgctgcatttgcataataaattgttgcctgatatttcttggagatttggttacttgctttagctttttgatgcaatgatctatagtagttagtgggaatttggtgaaagaatgtatctttcttttacttgcttggttagttcaggggatacatacaactaatcttgaagtagctattgtagtactttaaggaagaagctttactgctaatccaaagcatggcgaaaactaactgtaaagtactaattttgaactacacctaatttccatactttctgtttatgaactcactcttatgagtgttaaataccattcattcatcacatgtgcacacctcaagtcttatcaaaaacatatatatacttaggattacatcacaaaagcagaaaacataggcttaatatccgcttcatcacatcacagtctttacatatactgatatacacacatatacacgtcttaggagctcctttgtcccaagtcatatcttttttctcgtgttgctgattctaacctgttccatcttctccaccaccaccacctcctcctccgtttgcaccccaattgtcaaagttttgtcttggaatgttatggtggttgtctactcctcttgttgatggaatggcggatctgtccttctgaacatggtgaagcctctgatcttttgtgtatatccctctccctcctccctccacagttaaagagctcataaccaaaattaaaaccagcaccactaccaccacgacatgccttgtctgaatttgcatttttgttttgtcttgctgcat

SEQ ID NO: 35353 - DNA, 2241 bp, Arabidopsis thaliana landsberg
gtgcaaaactatcacctaaccattgaatctccttgtattgtccatctgcatctaaccgtttcttcacctggtaatcctttgaaccaagaagtatcgaactcggaaacagtttaccgttaaactgctccaaaccggttaacttcttcaacagcaaatcagctaaacgcttctcggttttaccaatatcatcgctatccgatttcctcttctcttgcaatgcctccactagattccatctatcttctctccaagaatgctcaaaccggctgcaaatatctctcgagagcaaatactgtttcccaaacctccattgaaacagcttaggatcattccactctctatcatactttcttgaaaacacaactctccttctctccatctcagaagggtcaagacccgaaatctcaccagcagcctcgatggcttcaacaaccgcagagaaataacagaacaagttgtgtatatgaaactcaacacaatctttgttctgatgaagattgattactttaccccaccaatcactattgtccatacaatgtttgacatataactctccttctttaaaaactctataaagctcccttaaaggttgttcaagagctctccatttagtatgcttctcttcaagctttagattctgtctgatctcttctgcgaccgtgttgaaagctaagctgaagagttctaacaacaaacaacattgtctttggttgatcaagatatcatcttgtaataccattagtgcatttagacttccaagaacttcgcctatttgtctgaattgctccatcagacaaacacacaatgttgttgtgaaaaatcctcaaatctctttatctttcagtaaaaccaacgcaaataattgttccacaaggcttgagatttatgaatgctggaaaacaaaaacaatcaaaatgagaccaaagaacattaagatgtatatagatcaagaagaagcaacattagggttttggggtcaaacctgaaatgaagatcctttatgatttaaggatcgatgaatcgagcatacaaaagcatatcatatacgaaccaaaacagaggagatctcctaaaaactatctcaaattgaacaaaactcaataaaaagaaaatcaaccgttgaaaaattggttatgtagaatgtctctcaccgatcaatacaagagattcaaaagagaaattgaaagcagctgaggaattcagaagaagaaaaaaaaaaaaaaacagagttgtctattttcccctgtttttgtcttcttcttggttgctaagaaaatctgaaatatatgtgtggtttcattttgtaaaatgttgattttggttttggtgtattttgatcgttgaaaacatgtccgagttacttggagtcccatatatgatgtgtactgttcccgcgactttcgttgtatattacattttttaatagtatttgtttatttaaccatatagtatttatgttatggccttcacgttgtcaaaatatccacgtatctggagatttcctcagcactaattattaaatgtgtaattaggtgggatgatcaaaattttagtgacgcgtcaagataaattactgctttgaacgaatttgtagcgaactttctttttgtcaaaaaggtccaaaaaagttgaataacctaaccaaccagtaaacctagtatcggaaaacgagttctcaggctcggcccgtttataaagttacgagcccaatttcagttgtcaaattcgttatttctgtgataacttctcttttagtgtagtagcagtaaagactatgaaacagaagctgttaaggtcttgaaaagtaagccacacgctatttaaattccataattcaaaagatggctttaacaaacaacaacaaaaagaaattggcagggataaacctaaattaaacatccaacatcatcattcccaaaagcagaatttagtttcttgttgaataggtaaatatcaaatttcaacgtttgcaaagaaagtttggttcttcattcttgatgttcaaatggtcaattcgatattattgttaattaacttaatacaatgtaaagacccggtttacttttcaaaccaaatattcaataataatatgtacgaaaatagtcattggtcctcgacgactataacaaaacacagagtcgtcgaaatttctcttctccttttcgtaatttttaagttccagttacattccaatttcttcgaaacttctcttctcattttacgcgtttttgcttcagtaaa
